United States Patent Application Publication US 2004/0253606 A1 - sequence listing, part 4

SEQ ID NO: 3023 - DNA, 601 bp, Homo sapiens
gcttggcacgagggggcttctgcctgagagccagcagaagggctcgtaatgaaaccacctttgtcaggacgctgctctttgggcttgagacttccttacttgacaaactcccaggccctaaaatgttcgcttaaaaaggacgcagtctggccaagcgcggtggctcatgcctgtaatcccagcactttgggaggccgaggtgggcagatcacctgaggtcgggagttcgagaccagcctgaccgacatggagaaaccccgtctccactaaaaatacaaaattagccggacgtggaggtgcgtgcctgtaatcccagctactcgggaggctgaggcaggagaattgcttgaatccgggaggcggaggttgcggtgagccgagatcacgccattgcactccagcctgggcgacaaaggcaaaaactccgtctcaaaaaaaaaaaaaaaaggatgcagtcatcccagccacaggaaccagtctgtgaaaaccaggcatctctttctttctttctcctgctactggggcttgagatgctcctgaggcccatcctcctctccaccttttccatctgtggggaggcacctcagtattcctgccttaa

SEQ ID NO: 3024 - DNA, 413 bp, Homo sapiens
  misc_feature (289)..(289): n is a, c, g, or t
  misc_feature (319)..(319): n is a, c, g, or t
  misc_feature (373)..(373): n is a, c, g, or t
aagagaatccagtcatgttttcaatggtaaaaagccttaaaaagctgcccttcgaagatctcctatgactgcatgtcaaggtattttgtacctacaatcccagaacttggttccttccccatgaggactaacaaatgttcacaacaatcatgatcaagtgtgcactggaagaaaaaatccataatctgggcttctcacttcgtgcttcataaatgacaatcactgcttgatgcagatgttgcactgtatccactcagggatgtttccttaaaaaaaaaaaatacatcanggaaggagggaaaaaatttaaaaacagggnaaatggacaacaaaatgtggatggggtttaaatttaaatatggttggctggggnggcaccttttctggacagggcttttccgggcccacagggc

SEQ ID NO: 3025 - DNA, 377 bp, Homo sapiens
ttttttttttttttttttttttttttttttttttttttgagacacaggaacaattcttttattgtacattggagaaatagccctgtgtgctggttcaaggtgcaacatacagaatattgaattaagaaaagagggaacggggaagggaagggaaacctcttgaggtccaaagttgcaaacaaaaaatggtaaaagatttcctcacgcaagaggcatttttgcaaataccatgcaaaacaggcagctggtgtgccttaagagaatccctataaataacagaaaagacactccaagcattcctgtacgtggactcagagcacagagaaaagaaactaaaatgccttttggatttcaagatatttggcactcttgtgatt

SEQ ID NO: 3026 - DNA, 370 bp, Homo sapiens
  misc_feature (61)..(61): n is a, c, g, or t
  misc_feature (192)..(192): n is a, c, g, or t
  misc_feature (217)..(217): n is a, c, g, or t
  misc_feature (248)..(248): n is a, c, g, or t
  misc_feature (289)..(289): n is a, c, g, or t
  misc_feature (305)..(305): n is a, c, g, or t
  misc_feature (314)..(314): n is a, c, g, or t
  misc_feature (329)..(329): n is a, c, g, or t
  misc_feature (334)..(334): n is a, c, g, or t
  misc_feature (345)..(345): n is a, c, g, or t
  misc_feature (360)..(360): n is a, c, g, or t
  misc_feature (365)..(365): n is a, c, g, or t
tttttttttttttcctagagaagagacgaaggtgattcagggccgagcagggctccctggnaagccccctcctgggcacacagttaacatgtaatgcagttagggggagggagagaggggagagggcagggggggagtcagtggcctgcaccgcacagccactgggttagagaaagtcggggtttcccaggntgcaaagctttgttccagccatgtntctcctgggccctgggcttgacctcctgctntggccatagggtagacagcctgggcctttggggcttggggncatggctgttgttcangttaggggnaaagccaacatcctngcctncaattcccctnggggccctttttttntaagnccctt

SEQ ID NO: 3027 - DNA, 495 bp, Homo sapiens
gctgaaacatcttactttcttgatttctacttaacatccatgtggtgcactttttcaggcattgtaataagtgcaaataaataatcaattattgatttctaaaaatctatacaaatagacaatactcagacttggaaatatttatgaacactctagatataaaaattcattaaacaatttatgcatggtattttctctccctgtgctccctctccctcctcccttcccctatctatttggttaaataaaaaaaaaataaaggttcaatttcgagttgaggatcctagggcacggacaaatgtgaccctggataattgtcatctccagccagtctgttttctttagtttctcgattacatctgtccaggctcttctatcagcatcaatcctttcctgcagggacggaagagtttcaaatccttgctgaaagcttttggttctcctctgtaacagcacagggcatgaaattgttgggagtctttgtaaccagtctgt

SEQ ID NO: 3028 - DNA, 221 bp, Homo sapiens
  misc_feature (12)..(12): n is a, c, g, or t
  misc_feature (117)..(117): n is a, c, g, or t
  misc_feature (203)..(203): n is a, c, g, or t
  misc_feature (216)..(216): n is a, c, g, or t
aattcggcacgnggggagaaggcgccagaaccccgcggggtctgagcagcccagcgtgcccattccagcggcccgcgtccccgcagcatgccgagcccccgcctgctggccgcgctngtgcggagcgcgtgctctgcgcccccaagcctcctccgtcgccctggatatctgttccaaaaacccctgccacaacggtggtttangcgaagagatttnccaag

SEQ ID NO: 3029 - DNA, 266 bp, Homo sapiens
tgaatcttcagacaaacttctgggaggactcggtccctgcctcgcagcagatgttccctgtcactcagtagccaatccgggggacccaggacatgccccagctatagtgatgcagattacctttctggtcctgaatcgcacctgtgcctcagactttctcccctcagcttgagactgcatgtaaactgggatgtgtgaaagcaggaagcaaagctagtgacagctgagaggtccatgtctgggtagaaccaggcccacgatgctgc

SEQ ID NO: 3030 - DNA, 179 bp, Homo sapiens
  misc_feature (29)..(29): n is a, c, g, or t
  misc_feature (110)..(110): n is a, c, g, or t
gggtgtgtggcattgtgttctatgccagngtgacaaagttgattcacccctttttggggaccttaatatattttttaagggatgtgcctatgcattgatgcctgaaaaanatgtataaagaaatgaggttgactcttctgagcagttcatcttttccagaggtaagggtaggaggccaa

SEQ ID NO: 3031 - DNA, 336 bp, Homo sapiens
  misc_feature (31)..(31): n is a, c, g, or t
  misc_feature (33)..(33): n is a, c, g, or t
  misc_feature (47)..(47): n is a, c, g, or t
  misc_feature (79)..(79): n is a, c, g, or t
  misc_feature (116)..(116): n is a, c, g, or t
  misc_feature (223)..(223): n is a, c, g, or t
  misc_feature (243)..(243): n is a, c, g, or t
  misc_feature (248)..(248): n is a, c, g, or t
  misc_feature (287)..(287): n is a, c, g, or t
  misc_feature (307)..(307): n is a, c, g, or t
  misc_feature (315)..(315): n is a, c, g, or t
  misc_feature (335)..(335): n is a, c, g, or t
cactagacttttaaaattaaaaatccataantntctctccataaaanagggtgtctatattcccagtgatatggttttncagaaatctagtccctatcaatataaatctgggaatntctgccattccagaggatctaagcttctacactaccaatactgcatactaaggtatcagcaaatgtagcactcctcctcagtctgatgtccacagcacacccgggtngatcacaggtagacccaganaggtngttacagcactccttcctgcagagcccagatgtggtctnagaagtcttcccagcaaagngccctagnacagctagcccccagttggnc

SEQ ID NO: 3032 - DNA, 444 bp, Homo sapiens
ttgaatttaggtgacactatagaagagctatgacgtcgcatgcacgcgtacgtaagcttggatcctctagagcggccgcctactactactaaattcgcggccgcgtcgaccaagccccagtgggcgcttctcttcctaagtcctctggtgtaccccattcttcaagggaaacggtccccttaagaatctatgtgaaagggttctgaaattgctgtaccagttaatgaattatttactctaaacaatgtcttgataaagggggaggatgaagttagctgatgttgactaaggagagacggagttgccaaggaaattcttctaaatgaaaaaaaagtcgacgcggccgcgaatttagtagtagtagtcgacccgggaattccggaccggtacctgcaggcgtaccagctttccctatagtgagtcgtattagagcttggcgtaatc

SEQ ID NO: 3033 - DNA, 654 bp, Homo sapiens
cggctaggtacgagcccggtgttaatcggccgagggctggccgcccttccttaaggccaccatcctggatctgtcttgtaataaactgactactctaccgtcggatttctgtggcctcacacacctggtgaagctagacctgagtaagaacaagctgcagcagctgccagcagactttggccgtctggtcaacctccagcacctggatctcctcaacaacaagctggtcaccttgcctgtcagctttgctcagctcaagaacctgaagtggttggacctgaaggataaccccctggatcctgtcctggccaaggtggcaggtgactgcttggatgagaagcagtgtaagcagtgtgcaaacaaggtgttacagcacatgaaggccgtgcaggcagatcaggagcgggagaggcagcggcggctggaagtagaacgtgaggcagagaagaagcgtgaggctaagcagcgagctaaggaagctcaggagcgggaactgcggaagcgggagaaggcggaagagaaggagcgccggagaaaggagtatgatgcccctcaaaagcagccaaagcgggagcaggagaagaaacctaagaaggaagcaaatcaggccccgaaatctaagtctggctcccgtccccgcaagccacaccccgg

SEQ ID NO: 3034 - DNA, 1855 bp, Homo sapiens
gaaactgagatatggttcccatacaccaggaacataaaccatgaagacagtcataaaatattaaaagcttaatataaacatataagctttgtcacggtttaagtacaggaagcttcggagttacaaatgcctactgaatacctgtttttgagaaacaaccacaatcattgaatttcacacgtgatatttcttttggctttggtgatgcccagggatgctcttcttgtcattcctgagagtgacaatgtctccttgtgagtcagagaggagagaaggggacatgccaagtcacatggcacccccagaggcttgagctccagagaaagatctcttcccagcttcccaaagtccagcttggaagtcaggacacgttttccttgaaaacaatgaggaacgacgacaggactaataatacattgtaggttaaagaggcttccatgggccagctggaaatccaaccaccatttattccaagttctaaacaatgaaagtacaagtaaacttttcaatgacaagcctgccataatttggggtctgcttgtacataattaattccaaagaagtgatacagacggtaattgctatgaattcagaaaagggaacattttcccaaagttatgtgggtctcagagccttcttgagaacattgagatggtctagaattgagggcatgtacgtaatgaaaagatgtcatttgggaaagaccaactagtctctatccaaaatttgctatacttttaccatcatggtacctataaaaatgacatctcgatatgatgttttgccagtctcagaaatcaagtgctgaccaactgaattgttatttcgttcacaggagtggaatttcatggttaagtcatatttgctagttattccttagactcctgagttcaggcatcagatacttgataaacatactagaccaactaacagatttatgcagctagctctattcttacaccagggatactctgtcagaaatgccaatggaatagcagccacaaggtctgtgtgctactttaaacaaatcaatatctcaaaaggaaaaggcgtcgtctgtcactaattagatcaaattaaaatgtgctgctgtatctcctttgaatattcatgaggtgctctcaatcagaagccctaagtctgagaccagaaacttaagccagaaaaaactaaatactgtgagattcagataactcggtcctttgccaactagaacttcaaagagaagaggaatagcttaggtgcagagtaagcctcctgaaaagatgacaaaatcagcttaatgcagaatcgtggggttcccacccaacctaaagatggatcgtcaaaatagcccaggagctgataatcctagactctgttgacacacaggacacatagtttagcctctcttgtgatttacttgtccttctgtctggcggaaaccatggagattacacttgtccttatttgaattctggacttcatttttcatgaatgaagtgattcaaaaaatacagctgggtctaagcatgaattctaactttcaaaaatcacagatcttaaaaagtctgtattgaactgggtgcagtaactcatgcctgtggttccagcatgttgggaggctgaggcgggagggccacttgagccctggagttcaagaccagcctgggcaacagagtgagatcccatctctacaaaagactttttgaaaaattaggtgtggtggcacatgcttgtagccctaggtgctcaggaggctaaggtggaaggatcacttgagcccaggagttggaggctgcagtgagctatgattgcactactgcactccagcctgggcaacagagcgagatcctgtctcaaaaaaaaaaaaaaa

SEQ ID NO: 3035 - protein, 119 aa, Homo sapiens
MAGLSLKSLLVLSLFRTWNKWWLDFQLAHGSLFNLQCIISPVVVPHCFQGKRVLTSKLDFGKLGRDLSLELKPLGVPCDLACPLLSSLTHKETLSLSGMTRRASLGITKAKRNITCEIQ

SEQ ID NO: 3036 - DNA, 346 bp, Homo sapiens
tttcaaaaaaatgttggttgcaacctattaaattgatttcgtgacacactagttcataaccctcagtttgaacaactctgacctagacgcctgccaagtcttgggaaaataggaaggagacagataattaagtttgggagatgcatagtctaaggccagggttctcaatgttggcagtgcaagatcacgtgaggtacgactgaacacggagatctccaaaactgcggagagttttgcgtgtgaacgtatgcacagacatctacatggaaatggctgtaacgcatccagccataaggcgtacgagggtatatatacttacagagttaagaaccactattctcaggag

SEQ ID NO: 3037 - DNA, 1779 bp, Homo sapiens
agttattaatgaccgctgagcaggcagcaccatgtcagtgtgacaactgatcgggtgaacgatgcaccactaaccaccatggaaacaaggaaaaataaagccagctcacagggtctctcttcactggattgagagcctcagcctgccgactgagaaaaagagttccaggaaaaagaaggaatcccggctgcagcctcctgccttcctttatattttaaaatagagagataagattgcgtgcatgtgtgcatatctatagtatatattttgtacactttgttacacagacacacaaatgcacctatttataccgggcaagaacacaaccatgtgattatctcaaccaaggaactgaggaatccagcacgcaaggacatcggaggtgggctagcactgaaactgcttttcaaggaggtgaagcattccacagataatcagctactctattcagggaaggagtgtaaacatcaccactttttgcatgtttgcataaaaaaggcccactgaatcagttaaagacgaggaagaggaggagaaagagaaagaagaggaagatgttgggcaacatttatttaacatgctccacagcccggaccctggcatcatgctgctattcctgcaaatactgaagaagcatgggatttaaatattttacttctaaataaatgaattactcaatctcctatgaccatctatacatactccaccttcaaaaagtacatcaatattatatcattaaggaaatagtaaccttctcttctccaatatgcatgacatttttggacaatgcaattgtggcactggcacttatttcagtgaagaaaaactttgtggttctatggcattcatcatttgacaaatgcaagcatcttccttatcaatcagctcctattgaacttactagcactgactgtggaatccttaagggcccattacatttctgaagaagaaagctaagatgaaggacatgccactccgaattcatgtgctacttggcctagctatcactacactagtacaagctgtagataaaaaagtggattgtccacggttatgtacgtgtgaaatcaggccttggtttacacccagatccatttatatggaagcatctacagtggattgtagtgatttaggtcttttaactttcccagccagattgccagctaacacacagattcttctcctacagactaacaatattgcaaaaattgaatactccacagactttccagtaaaccttactggcctggatttatctcaaaacaatttatcttcagtcaccaatattaatgtaaaaaagatgcctcagctcctttctgtgtacctagaggaaaacaaacttactgaactgcctgaaaaatgtctgtccgaactgagcaacttacaagaactctatattaatcacaacttgctttctacaatttcacctggagcctttattggcctacataatcttcttcgacttcatctcaattcaaatagattgcagatgatcaacagtaagtggtttgatgctcttccaaatctagagattctgatgattggggaaaatccaattatcagaatcaaagacatgaactttaagcctcttatcaatcttcgcagcctggttatagctggtataaacctcacagaaataccagataacgccttggttggactggaaaacttagaaagcatctctttttacgataacaggcttattaaagtaccccatgttgctcttcaaaaagttgtaaatctcaaatttttggatctaaataaaaatcctattaatag

SEQ ID NO: 3038 - protein, 273 aa, Homo sapiens
MKDMPLRIHVLLGLAITTLVQAVDKKVDCPRLCTCEIRPWFTPRSIYMEASTVDCSDLGLLTFPARLPANTQILLLQTNNIAKIEYSTDFPVNLTGLDLSQNNLSSVTNINVKKMPQLLSVYLEENKLTELPEKCLSELSNLQELYINHNLLSTISPGAFIGLHNLLRLHLNSNRLQMINSKWFDALPNLEILMIGENPIIRIKDMNFKPLINLRSLVIAGINLTEIPDNALVGLENLESISFYDNRLIKVPHVALQKVVNLKFLDLNKNPIN

SEQ ID NO: 3039 - DNA, 5492 bp, Homo sapiens
tgagggctttgctatgacctcagtcccctcacggagccacgactgccccttgctgccacagcctttccaagaccctgcccggccctgccccatcctcagccccgagtcaccatgggcagcgtcagtagcctcatctccggccacagcttccacagcaagcactgccgggcttcgcagtacaagctgcgcaagtcctcccacctcaagaagctcaaccggtattccgacgggctgctgaggtttggcttctcccaggactccggtcacggcaagtccagctccaaaatgggcaagagcgaagacttcttctacatcaaggtcagccagaaagcccggggctcccatcacccagattacacggcactgtccagcggggatttagggggccaggctggggtggactttgacccgtccacaccccccaagctcatgcccttctccaatcagctagaaatgggctccgagaagggtgcagtgaggcccacagccttcaagcctgtgctgccacggtcaggagccatcctgcactcctccccggagagtgccagccaccagctgcaccccgcccctccagacaagcccaaggagcaggagctgaagcctggcctgtgctctggggcgctgtcagactccggccggaactccatgtccagcctgcccacacacagcaccagcagcagctaccagctggacccgctggtcacacccgtgggacccacaagccgttttgggggctccgcccacaacatcacccagggcatcgtcctccaggacagcaacatgatgagcctgaaggctctgtccttctccgacggaggtagcaagctgggccactcgaacaaggcagacaagggcccctcgtgtgtccgctcccccatctccacggacgagtgcagcatccaggagctggagcagaagctgttggagagggagggcgccctccagaagctgcagcgcagctttgaggagaaggagcttgcctccagcctggcctacgaggagcggccgcggcgctgcagggacgagctggagggcccggagcccaaaggcggcaacaagctcaagcaggcctcgcagaagagccagcgcgcgcagcaggtcctgcacctgcaggtactgcagcttcagcaggagaagcggcagctccggcaggagctcgagagcctcatgaaggagcaggacctgctggagaccaagctcaggtcctacgagagggagaagaccagcttcggccccgcgctggaggagacccagtgggaggtgtgccagaagtcaggcgagatctccctcctgaagcagcagctgaaggagtcccagacggaggtgaacgccaaggctagcgagatcctgggtctcaaggcacagctgaaggacacgcggggcaagctggagggcctggagctgaggacccaggacctggagggcgccctgcgcaccaagggcctggagctggaggtctgtgagaatgagctgcagcgcaagaagaacgaggcggagctgctgcgggagaaggtgaacctgctggagcaggagctgcaggagctgcgggcccaggccgccctggcccgcgacatggggccgcccaccttccccgaggacgtccctgccctgcagcgggagctggagcggctgcgggccgagctgcgggaggagcggcaaggccatgaccagatgtcctcgggcttccagcatgagcggctcgtgtggaaggaggagaaggagaaggtgattcagtaccagaaacagctgcagcagagctacgtggccatgtaccagcggaaccagcgcctggagaaggccctgcagcagctggcacgtggggacagcgccggggagcccttggaggttgacctggaaggggctgacatcccctacgaggacatcatagccactgagatctgaggggctgcctgggaaggcgagtctggggacctggcactgggaggcagggctctcccgtgcatcccccctgctcagcaattcagacccctctgagagacgccactccctgggacacagacccaggacccccgaggggagggcaggatggcctttccttccctctctgatgtcccagtgctcaccagccctgcagcccaccagacgtcaggccctgactcctctggctttcccaggagatgggtccaggggtctgtctgctttggttaagggctccctaaactttggcctttgttcgaaatagatatcctctccccctcctccagggaaggtggccacagcaagaacagcggctcccctccgcttctcatcccaacctctttttcctcctggacacattggaatgccttggaaatagaaagaagccatatatgaccagaagccttggaaccagccccatcagaacctgagctattttcctctggccgcagaggtgtaggggtggaatgagccgcggggaagctggctttgaaacctcagggctgtcccagccccggcaagccacaggaaggaggggagagacaggcagcccagcagtgtggagaccctgccacagccagaggagggcagagggagaatccaagggttgagagccagtggcgggtgatggccagcccctggggcccagcccctgtttactggttcttgcaaatgggagctgagcagcctctggacagccagtgacctttgacctcggtgaccactcttctttaagccatagaccctgaggccctgggctgggtgctgggaagggagggttgaaaccaccgtgaaccagagggtgtggctttccaggcaccctcagggagcctccccatctgtccagctggggccagaggctgggagtccctacctgcttcacgttggccggcggctactctggaatgtttttccctccccagaatcaagcttttgcttgatccagaagagcccatatcactaagatggcatatatgtgatctgggcattttcctcctctgcctacagccaggtttagcggcaaacctttcccccttagcaccttcagggctgagttctgggtttctagaggtcaggacggctcctcagagcgccaggaagccagagccccaagcaggacgaaaaagaggcatacacacagcagtgtgaatagcctggccaccagccatcctccctccacctcaagacccccatttgtcccagactaaaggatccagagagcagctccctttctcaggagcttgggcagtgccccagggagtccagggtttctctgcagatgtgcggagcgggaggcggtggtagagagagataaaaggtggagtttctctgttgtttggttcagggattttatttttaattttatgagacagggtcttgctctgtcccccaggctggagtgcagtggcatgatcatagctcactgcagcctcatactcctgggctcaagcaatcctcctgcctcagccttccaactagctgggactacaggtgcgcgccaccgtgcctggctaacttttcattttttttgtagggacggggtctcgttttgttgccaaagctggtctcaaacttgtggcctcaagcaatccacctgccttggcctcccaaagtgctgagattgcagatgtgagccaccgtgcctggccagatttttcttttattcttctttctttttcttttttgctttcttgtcttttcagaagcaagccagacctagcaggctgttccatgttctatttttgactgtagccacagctgctgttctcaggacagcatcccttcccacatgcctgcgcctgctgcctgctgagatgaggaggggagcgtctgggaacttgcgagtccaaggccagtccccatttctgcctcgctcaccgctggcccttagagaccccgaggtaggggtggggagatgcttctctccttgccccccgccctcatgggtcctagcccttccctgagtgcgggctgaggccagagtcaccttttctgtggctggctctaccttcctgtccctgaggttaaacggtgcccatcctgccatcctcaaacgacagaggagcttttctggaatttcaaaccattgctcttagtcccaagctaggcttaaacctggaatctacaagccaaaagtccctccctgcctgagggcagtaccctccattgggcacagtccagacccaagtcaaagatgccccattccttgcgcctcagccctcagttccttcatttccaccaggccgtgccttgtttgagtttttcctcccagtgagactgccccacggagacagaggaaagggctggctccccctccccaggctggagaccccccccaactccaggaaagagcagtcagagtccagtgctctgcctcagacgttgcctgagaagaagtggctgccacacccaggggaaggccctgaggcggaggctgtgctccgccatggtgtcccggtaccttccatacacagaggagtgcagccttctccatatctccatggccctgtcccaggccggcccagatgtgtcccccccaggccttgtcctacgtccaaggtggcagatgtcttccctgggctgccaccagcccccgccccagagtggcccaccgtggcactagaatgcaagtatcctgcgaccttgcaacctcaccttcctgtgggtgttctttcctgccctgtccaaaagcgccctcactattcttggaccatgccagattctgcctctctggaaagaggctctggacagcagaagcctccaagcacagagcctggccccaggccccagacagggtgggcttcctgcccttccctctgggcacgcctgctggccgacccactgacccactcggatggaccaacctgctctgtccccaaaggacgcctgcaggagagagcagcactccgcatcacctcaccaaggatcggactctgcccctggacctgggaacgactggactgtcacggggttccctcctagctctcccagtgaactcctgccaggcacacacagcccctatagcactgagctcacatgggactgggatatgggggcatctcttccccagagaggcactcagtgagcctcctgtgcctggccccagtctgggccatctcttaggtgagacagttgcccgaaactaagccaggcctggctggaggagcagcagcttggggagagggatttccctgcagacctcaagccatcatgcggtgggtgctgccatgacagaggctgcacccctgggccagcggggctgctcacccacctcttgtgcaaggtggcctttgtgctgcgcctgcaggcagagctggagcccccagcagaggcaggctgggacggaccagcatctggaagatgtacatagttatttttctctttgtggtttcttgtttggtttggtttgcttttgacagcttcattttatttttgacgtcactttttggccatgtaaactatttgtggcaattttatgtttttatttatgaataaagaatgccatttctcacgccctctaaaaaaaaaaaaaaaaaaaaaaaaaaaaaaaaaaa

SEQ ID NO: 3040 - protein, 596 aa, Homo sapiens
MGSVSSLISGHSFHSKHCRASQYKLRKSSHLKKLNRYSDGLLRFGFSQDSGHGKSSSKMGKSEDFFYIKVSQKARGSHHPDYTALSSGDLGGQAGVDFDPSTPPKLMPFSNQLEMGSEKGAVRPTAFKPVLPRSGAILHSSPESASHQLHPAPPDKPKEQELKPGLCSGALSDSGRNSMSSLPTHSTSSSYQLDPLVTPVGPTSRFGGSAHNITQGIVLQDSNMMSLKALSFSDGGSKLGHSNKADKGPSCVRSPISTDECSIQELEQKLLEREGALQKLQRSFEEKELASSLAYEERPRRCRDELEGPEPKGGNKLKQASQKSQRAQQVLHLQVLQLQQEKRQLRQELESLMKEQDLLETKLRSYEREKTSFGPALEETQWEVCQKSGEISLLKQQLKESQTEVNAKASEILGLKAQLKDTRGKLEGLELRTQDLEGALRTKGLELEVCENELQRKKNEAELLREKVNLLEQELQELRAQAALARDMGPPTFPEDVPALQRELERLRAELREERQGHDQMSSGFQHERLVWKEEKEKVIQYQKQLQQSYVAMYQRNQRLEKALQQLARGDSAGEPLEVDLEGADIPYEDIIATEI

SEQ ID NO: 3041 - DNA, 337 bp, Homo sapiens
  misc_feature (296)..(296): n is a, c, g, or t
  misc_feature (312)..(312): n is a, c, g, or t
tttttttttgccattagtccatttctttattaattttgacattggttcggctggtgaagggagaatggtctatacatcagagtagggtaggggattctctcccataacagagcatgtgggagagtcaagaaaagatccattttcataacaattaaaaaaatcaaggtaatttcaaaacttctaaaaagcgtctaatgtgcagactgcagcattctctaggcatcgtgtggagaccccaaactcctcccctaacggctcctactagcagccggagcgtgcagccatgccagccgganccagaaggtgccaaangcggagtctgggaagctgcgggggg

SEQ ID NO: 3042 - DNA, 470 bp, Homo sapiens
acccccgctgctccacgctgcccaccgccaacggggcccgaccggctgcgctccgggactgcgctttcctggccccgacgcgccgcccaacgggccttgcagcccggccggccctcgcttggcggcggtgtcgacttctacgacgtcgccttcaaggtcatgctggtgggggactcgggtgtggggaagacctgtctgctggtgcgattcaaggattgtgtgctttcctggcggggaccttcatctccaccgtaggcattgacttcctggaacaaagttctggacgtggatggtgtgaaggtgaagctgcagatgttgggacacagctggtcaggagcggttccgcagtgttacccatgcctactaccgggatgctcatgctctgcgtgctgctctacgatgttcccaacaatggcctccttttgcaacatccaggccttggttgacccgagatccacgagtacgcccag

SEQ ID NO: 3043 - DNA, 2190 bp, Homo sapiens
cccgggaggaggaggcggcgagaatggcagcggcgtcgtgggcgcggcggagatgagcgcccgcgaccccgggcccagggcggcacagccggagtgggcgggggtcccgatgcaggcccgaggggggccatggggcaggtcctgccggtcttcgcccactgcaaagaagctccgtctacagcctcctcaactcctgattccacagaaggagggaacgacgactctgattttcgagagctgcacacagcccgggaattctcagaggaggacgaggaggagaccacgtcgcaggactggggcaccccccgggagctgaccttctcctacatcgcctttgatggtgtagtgggctccgggggccgcagggattcaactgcccgccgcccccgcccccagggccgctcagtctcggaaccacgagaccagcaccctcagcccagcctgggcgacagcttggagagcatccccagcctgagccaatccccggagcctggacgacggggtgatcctgacaccgcgcctccatccgagcgccctctggaagacctgaggcttcggttggaccatctgggctgggtggcccggggaacgggatccggggaggactcttccaccagcagctccaccccgctggaagacgaagaaccccaagaacccaacagattggagacaggagaagctggggaagaactggacctacgactccgacttgctcagccctcatcgcccgaggtcttgactccccagctcagtccgggctctgggacaccccaggccggtactccgtccccatcccgatcgcgagattcgaactctgggcccgaagagccattgctggaagaggaagaaaagcagtgggggccactggagcgagagccagtaaggggacagtgcctcgatagcacggaccaattagaattcacggtggagccacgccttctaggaacagctatggaatggttaaagacatcattgcttttggctgtttacaagacggttccaattttggaattgtccccacctctgtggacagccattggctgggtccaaaggggccccaccccccctactcctgtcctccgggttctactgaagtgggcaaaatccccgagaagcagcggtgtccccagcctctcactcggagccgatatggggagtaaagtggcggacctgctgtactggaaggacacgaggacgtcaggagtggtcttcacaggcctgatggtctccctcctctgcctcctgcactttagcatcgtgtccgtggccgcgcacttggctctgttgctgctctgcggcaccatctctctcagggtttaccgcaaagtgctgcaggccgtgcaccggggggatggagccaaccctttccaggcctacctggatgtggacctcaccctgactcgggagcagacggaacgtttgtcccaccagatcacctcccgcgtggtctcggcggccacgcagctgcggcacttcttcctggtagaagacctcgtggattccctcaagctggccctcctcttctacatcttgaccttcgtgggtgccatcttcaatggtttgactcttctcattctgggagtgattggtctattcaccatccccctgctgtaccggcagcaccaggctcagatcgaccaatatgtggggttggtgaccaatcagttgagccacatcaaagctaagatccgagctaaaatcccagggaccggagccctggcctctgcagcagccgcagtctccggatccaaagccaaagccgaatgagaacggtgtctctgcccgcaggacgcctgcccccagcccccgcagccctctggccccctccatctcttgtccgttcccacccacccccctcctcggcccgagccttttcccggtgggtgtcaggatcactcccactagggactctgcgctaattacctgagcgaccaggactacatttcccaagaggctctgctccaggagtccaggaaagacgaggcaccttggccgcggggcctgctgggacttgtagttgcctagacagggcaccaccctgcacttccggacccgccgctggaggcgccgtgaggcgttggtgtctcctggatgctactagccccaacgccggggctttgcatggggcccaggggaggcctgagcttggatttacactgtaataaagactcctgtggaaaaaaaaaaaaa

SEQ ID NO: 3044 - protein, 545 aa, Homo sapiens
MGQVLPVFAHCKEAPSTASSTPDSTEGGNDDSDFRELHTAREFSEEDEEETTSQDWGTPRELTFSYIAFDGVVGSGGRRDSTARRPRPQGRSVSEPRDQHPQPSLGDSLESIPSLSQSPEPGRRGDPDTAPPSERPLEDLRLRLDHLGWVARGTGSGEDSSTSSSTPLEDEEPQEPNRLETGEAGEELDLRLRLAQPSSPEVLTPQLSPGSGTPQAGTPSPSRSRDSNSGPEEPLLEEEEKQWGPLEREPVRGQCLDSTDQLEFTVEPRLLGTAMEWLKTSLLLAVYKTVPILELSPPLWTAIGWVQRGPTPPTPVLRVLLKWAKSPRSSGVPSLSLGADMGSKVADLLYWKDTRTSGVVFTGLMVSLLCLLHFSIVSVAAHLALLLLCGTISLRVYRKVLQAVHRGDGANPFQAYLDVDLTLTREQTERLSHQITSRVVSAATQLRHFFLVEDLVDSLKLALLFYILTFVGAIFNGLTLLILGVIGLFTIPLLYRQHQAQIDQYVGLVTNQLSHIKAKIRAKIPGTGALASAAAAVSGSKAKAE

SEQ ID NO: 3045 - DNA, 10812 bp, Homo sapiens
gcggcgtcggggcttcacaacaacagtggtggccgtagcagcggccgggccgggctgaggcgcaggcggggagcgggcccggcgccgcggcgctggtggatgctggggctccgaggcgacggccggggggcgggggccgaggcaggtataacggtaccggcggcggcagcgccgctgctcttcccttctcctcaggaggggggccaatggctagcgagaagccgggcccgggcccggggctcgagcctcagcccgtggggctcattgccgtcggggccgctggcggaggcggcgggggcagcggtggtggcggcaccgggggcagcgggatgggggagctaaggggggcgtccggctccggctcggtgatgctccccgcggggatgattaacccttcggtgccgatccgcaacatccggatgaaattcgcagtgttgattggactcatacaggtcggagaggtcagcaacagggacatcgtggagacggtgctcaacctgctggttggtggagaatttgacttggagatgaactttattatccaggatgctgagagtataacatgtatgacagagcttttggagcactgtgatgtaacatgtcaagcagaaatatggagcatgtttacagccattctacgaaaaagtgttcggaatttacagactagcacagaagttgggctaattgaacaagtattgctgaaaatgagtgctgtagatgacatgatagcagatcttctagttgatatgttgggggttcttgccagctacagcatcactgtcaaggagttgaagcttttgttcagcatgcttcgaggagaaagtggaatctggccaagacatgcagtaaaattattatcagttcttaatcagatgccacagagacacggtcctgatacttttttcaatttccctggttgtagcgctgcggcaattgccttgcctcctattgcaaagtggccttatcagaatggcttcaccttaaacacttggtttcgtatggatccattaaataatattaatgttgataaggataaaccttatctttattgttttcgtactagcaaaggagttggttactctgctcattttgttggcaactgtttaatagtcacatcattgaagtccaaaggaaaaggttttcagcattgtgtgaaatatgattttcaaccacgcaagtggtacatgatcagcattgtccacatttacaatcgatggaggaacagtgaaattcggtgttatgttaatggacaactggtatcttatggtgatatggcttggcatgttaacacaaatgatagctatgacaagtgctttcttggatcatcagaaactgctgatgcaaatagggtattctgtggtcaacttggtgccgtgtatgtgttcagtgaagcactcaacccagcacagatatttgcaattcatcagttaggacctggatataagagtaccttcaagtttaaatctgagagtgatattcatttggcagaacatcataaacaggtgttatatgatgggaaacttgcaagtagcattgcctttacatataatgctaaggccactgatgctcagctctgcctggaatcatcaccaaaagagaatgcatcaatttttgtgcattccccacatgctctaatgcttcaggatgtgaaagcgatagtaacacattcaattcatagtgcaattcattcaattggagggattcaagtgctttttccactttttgcccaattggataataggcagctcaatgacagtcaagtggaaacaactgtctgtgctactctgttggcattcctggttgaactacttaaaagttcagtagccatgcaagaacagatgctgggtggaaaaggctttttagtcattggctacttacttgaaaagtcatcaagagttcatataactagagctgtcctggagcaatttttatcttttgcaaaataccttgatggtttatctcatggagcacctttgctgaagcagctttgtgatcacattttatttaacccagccatctggatacatacacctgcaaaggttcagctttccctatacacatatttgtctgctgaatttattggaactgctaccatctacaccaccatacgcagagtaggaacagtattacagctaatgcacaccttaaaatattattactgggttattaatcctgctgacagtagtggcattacacctaaaggattagatggtccccggccatcacaaaaagaaattatatcactgagggcatttatgctactttttctgaaacagctgatactaaaggatcgaggggtcaaggaagatgaacttcagagtatattaaattacctacttacgatgcatgaggatgaaaatattcatgatgtgctacagttactggtggctttaatgtcggaacacccagcctcaatgataccagcatttgatcaaagaaatggaataagggtgatctacaaattattggcttctaaaagtgaaagtatttgggttcaagctttgaaggttctgggatactttctgaagcatttaggtcacaagagaaaagttgaaattatgcacacccatagtcttttcactcttcttggagaaaggctgatgttgcatacaaacactgtgactgtcaccacatacaacacactttatgagatcttgacagaacaagtatgtactcaggtcgtacacaaaccacatccagagccagattctacagtgaaaattcagaatccaatgattcttaaagtggtggcaactttgttaaaaaactctacaccaagtgcagagctgatggaagttcgtcgtttatttttatctgatatgataaaacttttcagtaacagccgtgaaaatagaagatgcttattgcagtgttcagtgtggcaggattggatgttttctcttggctatatcaatcctaaaaattctgaggaacagaagattaccgaaatggtctacaatatcttccggattcttttgtatcatgcaataaaatatgaatggggaggctggagagtctgggtggataccctctcaatagcccattccaaggtcacttatgaagctcataaggaatacctagccaaaatgtatgaggaatatcaaagacaagaggaggaaaacattaaaaagggaaagaaagggaatgtgagcaccatctctggtctttcatcacagacaacaggagcaaaaggtggaatggaaattcgagagatagaagatctttcacaaagccagagcccagaaagtgagaccgattaccctgtcagcacagatactcgagacttactcatgtcaacaaaagtgtcagatgatattcttggaaattcagatagaccaggaagtggtgtacatgtggaagtacatgatcttttagtagatataaaagcagagaaagtggaagcaacagaagtaaagctcgatgatatggatttatcaccggagactttagtaggtggagagaatggtgcccttgtggaggttgaatctctgttggataatgtatatagtgctgctgttgagaaactccagaacaatgtacatggaagtgttggtatcattaaaaaaaatgaagaaaaggataatggtccattgataacattagcagatgagaaagaagaccttcccaatagtagtacatcatttctctttgataaaatacccaaacaggaggaaaaactacttcctgaactttctagcaatcacattattccaaatattcaggacacacaagtacatcttggtgttagtgatgatcttggattgcttgctcacatgaccggtagcgtagacttaacttgtacatccagtataatagaagaaaaagaattcaaaatccatacaacttcagatggaatgagcagtatttctgaaagagacttagcgtcatcaactaaggggctggagtatgctgaaatgactgctacaactctggaaactgagtcttctagtagcaaaattgtaccaaatattgatgcaggaagtataatttcagatactgaaaggtctgacgatggcaaagaatcaggaaaagaaatccgaaaaatccaaacaactactacgacacaagctgtgcagggtcggtctatcacccaacaagaccgagatctccgagttgatttaggatttcgaggaatgccaatgactgaggaacagcgacgccagtttagcccaggtccacggactacaatgtttcgtattcctgagtttaaatggtctccaatgcaccagcggcttctcactgatttactatttgcattagaaactgatgtacatgtttggaggagccattctacaaagtctgtaatggattttgtcaatagcaatgaaaatattatttttgtacataacacaattcacctcatttcccaaatggtagacaacatcatcattgcttgtggaggaattttacctttgctctctgctgctacatcaccaactggttctaagacggaattggaaaatattgaagtgacacaaggcatgtcagctgagacagcagtaactttcctcagccggctgatggctatggttgatgtacttgtgtttgcaagctctctaaattttagtgagattgaagctgagaaaaacatgtcttctggaggtttaatgcgacagtgcctaagattagtttgttgtgttgctgtgagaaactgtttagaatgtcggcaaagacagagagacaggggaaataaatcttcccatggaagcagtaaacctcaggaagttcctcaaagtgtgactgctacagcagcttcgaagactccattggaaaatgttccaggtaacctttctcctattaaggatccggatagacttcttcaggatgttgatatcaatcgccttcgtgctgttgtctttcgggatgtggatgatagcaaacaagcacagttcttagctctggctgttgtttacttcatttcggttctgatggtttccaagtatcgtgacatattagaaccccagagagagactacaagaactggaagccaaccaggtagaaacatcaggcaagaaataaattcaccaacaagtacagttgtggtcataccatctatccctcatccaagtttgaaccatggattccttgccaagttaattcctgagcagagctttggccactcattttacaaagaaacacctgctgcatttccagacaccataaaagaaaaagaaacatcaactcctggtgaagatattcaggtagaaagttcaattccccatacagattcaggaattggagaggagcaagtggctagcatcctgaatggggcagaattagaaacaagtacaggccctgatgccatgagtgaactcttatccactttgtcatccgaagtgaagaaatcacaagagagcttaactgaaaatcctagtgaaacgttgaagcctgcaacatccatatctagcattagtcaaaccaaaggcatcaatgtgaaggaaatactgaaaagtcttgtggctgctccagttgaaatagcagaatgtggccctgaacctatcccatacccagatccagcattgaagagagaaacacaagctattcttcctatgcagtttcattcctttgacaggagtgttgtggtgcctgtaaagaaaccacctccaggtagtttagctgtaaccactgtgggagccactactgctggaagtgggctgccaacaggcagtacctctaatatatttgctgctactggagctacaccaaaaagtatgattaatacaacaggtgccgtggattcagggtcctcctcctcttcctcctcttctagttttgtgaatggtgctactagcaaaaaccttccagctgtacaaactgttgctccaatgccagaagattcagctgaaaatatgagcatcactgcaaaacttgaaagagcgttagaaaaagttgctcctcttcttcgtgaaatttttgtagactttgccccattcctatctcgtacacttcttggcagtcatggacaagagctattgatagaaggccttgtttgtatgaagtccagcacatctgtggttgagcttgttatgctgctttgttctcaggaatggcaaaactctattcagaagaatgcaggacttgcatttattgagctcatcaatgaaggaagattactgtgccatgctatgaaggaccatatagtccgtgttgcaaatgaagctgagtttattttgaacagacaaagagccgaggatgtacataaacatgcagagtttgagtcacagtgtgcccaatatgctgctgatagaagagaggaagaaaagatgtgtgaccatcttatcagtgctgctaaacatcgagatcatgtaacagcaaatcagctgaaacagaagattctcaatattctcacaaataaacatggtgcttggggagcagtttctcatagccaattgcatgatttctggcgtttggattactgggaagatgatcttcgtcgaaggagacgatttgttcgcaatgcatttggctccactcatgctgaagcattgctgaaagctgcaatagaatatggcacggaagaagatgtagtaaagtcaaagaaaacattcagaagtcaagcaatagtgaaccaaaatgcagagacagaacttatgctggaaggagacgatgatgcagtcagtctgctacaggagaaagaaattgacaaccttgcaggcccagtggttctcagcacccctgcccagctcatcgctcccgtggtggtggccaaggggactctctccatcaccacgacagaaatctacttcgaggtagatgaggatgattctgccttcaagaagatcgacacgaaagttcttgcatacactgagggacttcacggaaaatggatgttcagcgagatacgagctgtattttcaagacgttaccttctacaaaacactgctttggaagtatttatggcaaaccgaacctcagttatgtttaatttccctgatcaagcaacagtaaaaaaagttgtctatagcttgcctcgggttggagtagggaccagctatggtctgccacaagccaggaggatatcattggccactcctcgacagctttataaatcttccaatatgactcagcgctggcaaagaagggaaatttcaaacttcgaatatttgatgttccttaatactattgcaggacggacatataatgatctgaaccaatatccagtgtttccgtgggtgttaaccaactatgaatcagaagagttggacctgactcttccaggaaacttcagggatctatcaaagccaattggtgctttgaaccccaagagagctgtgttttatgcagagcgttatgagacatgggaagatgatcaaagcccaccctaccattataatacccattattcaacagcaacatctactttatcctggcttgttcgaattgaacctttcacaaccttcttcctcaatgcaaatgatggaaaatttgatcatccagatcgaaccttctcatccgttgcaaggtcttggagaactagtcagagagatacttctgatgtaaaggaactaattccagagttctactacctaccagagatgtttgtcaacagtaatggatataatcttggagtcagagaagatgaagtagtggtaaatgatgttgatcttcccccttgggcaaaaaaacctgaagactttgtgcggatcaacaggatggccctagaaagtgaatttgtttcttgccaacttcatcagtggatcgaccttatatttggctataagcagcgaggaccagaagcagttcgtgctctgaatgtttttcactacttgacttatgaaggctctgtgaacctggatagtatcactgatcctgtgctcagggaggccatggaggcacagatacagaactttggacagacgccatctcagttgcttattgagccacatccgcctcggagctctgccatgcacctgtgtttccttccacagagtccgctcatgtttaaagatcagatgcaacaggatgtgataatggtgctgaagtttccttcaaattctccagtaacccatgtggcagccaacactctgccccacttgaccatccccgcagtggtgacagtgacttgcagccgactctttgcagtgaatagatggcacaacacagtaggcctcagaggagctccaggatactccttggatcaagcccaccatcttcccattgaaatggatccattaatagccaataattcaggtgtaaacaaacggcagatcacagacctcgttgaccagagtatacaaatcaatgcacattgttttgtggtaacagcagataatcgctatattcttatctgtggattctgggataagagcttcagagtttattctacagaaacagggaaattgactcagattgtatttggccattgggatgtggtcacttgcttggccaggtccgagtcatacattggtggggactgctacatcgtgtccggatctcgagatgccaccctgctgctctggtactggagtgggcggcaccatatcataggagacaaccctaacagcagtgactatccggcaccaagagccgtcctcacaggccatgaccatgaagttgtctgtgtttctgtctgtgcagaacttgggcttgttatcagtggtgctaaagagggcccttgccttgtccacaccatcactggagatttgctgagagcccttgaaggaccagaaaactgcttattcccacgcttgatatctgtctccagcgaaggccactgtatcatatactatgaacgagggcgattcagtaatttcagcattaatgggaaacttttggctcaaatggagatcaatgattcaacacgggccattctcctgagcagtgacggccagaacctggtcaccggaggggacaatggggtagtagaggtctggcaggcctgtgacttcaagcaactgtacatttaccctggatgtgatgctggcattagagcaatggacttgtcccatgaccagaggactctgatcactggcatggcttctggtagcattgtagcttttaatatagattttaatcggtggcattatgagcatcagaacagatactgaagataaaggaagaaccaaaagccaagttaaagctgagagcacaagtgctgcatggaaaggcaatatctctggtggaaaaaactcgtctacatcgacctccgtttgtacattccatcacacccagcaatagctgtacattgtagtcagcaaccattttactttgtgtgttttttcacgactgaacaccagctgctatcaagcaagcttatatcatgtaaattatatgaattaggagatgttttggtaattatttcatatattgttgtttattgagaaaaggttgtaggatgtgtcacaagagacttttgacaattctgaggaaccttgtgtccagttgttacaaagtttaagctttgaacctaacctgcatcccatttccagcctcttttcaagctgagaaaaaaaaaaaaaaacacgtttgatactttgtacatcagatgcatcttatttaaaagggatacttttgtaaaagtaaaaccttgtataaagaacaaaatgtttcttaattttattgtggagttacaacttgcatgttccttactcctgttggcttgatggaacaggtgcattcacactatgaaacagaaagatctgtccaaggacacagcttgtatgaaagggttgaatttgggctccatcagtaatttttgacattttcaccaaaatatagtttgcactttttaatctaaagtcatcccttctgagtgaaatttgctcataaagcatttggatactaagccattatttgccattttgggtactttatacaaagaaaattcagccctaccctgcataatttgaagacacagcagaaagggggcttagggatgaggtcctggtttttcttgtataaataggagtcatgggcgttagttctgtagtaataacttcccagcacctggacatctcttccagagttatcccactggcttggtgtgtatacattaggggaggataatctgatgctaactttttttttctctttggttcttgaatagcttagtttctttaataacaagtcaaactttattacaacaataactgaagttattcttttaggttctcgtgaaattctcactgaaagccacattcttagcctaaggcgtttcatcttttatgatataaaatgatggctatcaaatgattttccatacattgtactgatcaagttatacacccaggggtatatacactttcttcatgtttcttctttgtatatttggtgactgtatcgtcatagatgtacatattgtgtcggtagggctatgaggcatgttacaggaatgtaattttctcagaatttacactcactcgcagtcatttatttaaaaagataaaacaagataatgggttctttgtattggcactttgcaccagaaacatatcattatttattgatgtgattacttatttgttatccaccttgtactagtaagttttagcactgaattccttcttcactgttgtttgtatttatgaaattctgaaattatggggaatcagcgtaatgattaagttattcatcaccaggctgtaagcaatatcttgagtttgtagcttagaattgggaggatacttaacatctggaagacaagttcatttcatcttgagatcatggtgaaatattttggatatataaattccttaagctattgtaaccatgttttattgcaaagatgtaaaatatgccagatgtgtgtgagttggaaatcaaaaaaagaaaaataaaatatgcaaagaattcaaaaaaaaaaaaaaaaaaaaa

SEQ ID NO: 3046 - protein, 2946 aa, Homo sapiens
MASEKPGPGPGLEPQPVGLIAVGAAGGGGGGSGGGGTGGSGMGELRGASGSGSVMLPAGMINPSVPIRNIRMKFAVLIGLIQVGEVSNRDIVETVLNLLVGGEFDLEMNFIIQDAESITCMTELLEHCDVTCQAEIWSMFTAILRKSVRNLQTSTEVGLIEQVLLKMSAVDDMIADLLVDMLGVLASYSITVKELKLLFSMLRGESGIWPRHAVKLLSVLNQMPQRHGPDTFFNFPGCSAAAIALPPIAKWPYQNGFTLNTWFRMDPLNNINVDKDKPYLYCFRTSKGVGYSAHFVGNCLIVTSLKSKGKGFQHCVKYDFQPRKWYMISIVHIYNRWRNSEIRCYVNGQLVSYGDMAWHVNTNDSYDKCFLGSSETADANRVFCGQLGAVYVFSEALNPAQIFAIHQLGPGYKSTFKFKSESDIHLAEHHKQVLYDGKLASSIAFTYNAKATDAQLCLESSPKENASIFVHSPHALMLQDVKAIVTHSIHSAIHSIGGIQVLFPLFAQLDNRQLNDSQVETTVCATLLAFLVELLKSSVAMQEQMLGGKGFLVIGYLLEKSSRVHITRAVLEQFLSFAKYLDGLSHGAPLLKQLCDHILFNPAIWIHTPAKVQLSLYTYLSAEFIGTATIYTTIRRVGTVLQLMHTLKYYYWVINPADSSGITPKGLDGPRPSQKEIISLRAFMLLFLKQLILKDRGVKEDELQSILNYLLTMHEDENIHDVLQLLVALMSEHPASMIPAFDQRNGIRVIYKLLASKSESIWVQALKVLGYFLKHLGHKRKVEIMHTHSLFTLLGERLMLHTNTVTVTTYNTLYEILTEQVCTQVVHKPHPEPDSTVKIQNPMILKVVATLLKNSTPSAELMEVRRLFLSDMIKLFSNSRENRRCLLQCSVWQDWMFSLGYINPKNSEEQKITEMVYNIFRILLYHAIKYEWGGWRVWVDTLSIAHSKVTYEAHKEYLAKMYEEYQRQEEENIKKGKKGNVSTISGLSSQTTGAKGGMEIREIEDLSQSQSPESETDYPVSTDTRDLLMSTKVSDDILGNSDRPGSGVHVEVHDLLVDIKAEKVEATEVKLDDMDLSPETLVGGENGALVEVESLLDNVYSAAVEKLQNNVHGSVGIIKKNEEKDNGPLITLADEKEDLPNSSTSFLFDKIPKQEEKLLPELSSNHIIPNIQDTQVHLGVSDDLGLLAHMTGSVDLTCTSSIIEEKEFKIHTTSDGMSSISERDLASSTKGLEYAEMTATTLETESSSSKIVPNIDAGSIISDTERSDDGKESGKEIRKIQTTTTTQAVQGRSITQQDRDLRVDLGFRGMPMTEEQRRQFSPGPRTTMFRIPEFKWSPMHQRLLTDLLFALETDVHVWRSHSTKSVMDFVNSNENIIFVHNTIHLISQMVDNIIIACGGILPLLSAATSPTGSKTELENIEVTQGMSAETAVTFLSRLMAMVDVLVFASSLNFSEIEAEKNMSSGGLMRQCLRLVCCVAVRNCLECRQRQRDRGNKSSHGSSKPQEVPQSVTATAASKTPLENVPGNLSPIKDPDRLLQDVDINRLRAVVFRDVDDSKQAQFLALAVVYFISVLMVSKYRDILEPQRETTRTGSQPGRNIRQEINSPTSTVVVIPSIPHPSLNHGFLAKLIPEQSFGHSFYKETPAAFPDTIKEKETSTPGEDIQVESSIPHTDSGIGEEQVASILNGAELETSTGPDAMSELLSTLSSEVKKSQESLTENPSETLKPATSISSISQTKGINVKEILKSLVAAPVEIAECGPEPIPYPDPALKRETQAILPMQFHSFDRSVVVPVKKPPPGSLAVTTVGATTAGSGLPTGSTSNIFAATGATPKSMINTTGAVDSGSSSSSSSSSFVNGATSKNLPAVQTVAPMPEDSAENMSITAKLERALEKVAPLLREIFVDFAPFLSRTLLGSHGQELLIEGLVCMKSSTSVVELVMLLCSQEWQNSIQKNAGLAFIELINEGRLLCHAMKDHIVRVANEAEFILNRQRAEDVHKHAEFESQCAQYAADRREEEKMCDHLISAAKHRDHVTANQLKQKILNILTNKHGAWGAVSHSQLHDFWRLDYWEDDLRRRRRFVRNAFGSTHAEALLKAAIEYGTEEDVVKSKKTFRSQAIVNQNAETELMLEGDDDAVSLLQEKEIDNLAGPVVLSTPAQLIAPVVVAKGTLSITTTEIYFEVDEDDSAFKKIDTKVLAYTEGLHGKWMFSEIRAVFSRRYLLQNTALEVFMANRTSVMFNFPDQATVKKVVYSLPRVGVGTSYGLPQARRISLATPRQLYKSSNMTQRWQRREISNFEYLMFLNTIAGRTYNDLNQYPVFPWVLTNYESEELDLTLPGNFRDLSKPIGALNPKRAVFYAERYETWEDDQSPPYHYNTHYSTATSTLSWLVRIEPFTTFFLNANDGKFDHPDRTFSSVARSWRTSQRDTSDVKELIPEFYYLPEMFVNSNGYNLGVREDEVVVNDVDLPPWAKKPEDFVRINRMALESEFVSCQLHQWIDLIFGYKQRGPEAVRALNVFHYLTYEGSVNLDSITDPVLREAMEAQIQNFGQTPSQLLIEPHPPRSSAMHLCFLPQSPLMFKDQMQQDVIMVLKFPSNSPVTHVAANTLPHLTIPAVVTVTCSRLFAVNRWHNTVGLRGAPGYSLDQAHHLPIEMDPLIANNSGVNKRQITDLVDQSIQINAHCFVVTADNRYILICGFWDKSFRVYSTETGKLTQIVFGHWDVVTCLARSESYIGGDCYIVSGSRDATLLLWYWSGRHHIIGDNPNSSDYPAPRAVLTGHDHEVVCVSVCAELGLVISGAKEGPCLVHTITGDLLRALEGPENCLFPRLISVSSEGHCIIYYERGRFSNFSINGKLLAQMEINDSTRAILLSSDGQNLVTGGDNGVVEVWQACDFKQLYIYPGCDAGIRAMDLSHDQRTLITGMASGSIVAFNIDFNRWHYEHQNRY

SEQ ID NO: 3047 - DNA, 886 bp, Homo sapiens
gttctcaataccgggagaggcacagagctatttcagccacatgaaaagcatcggaattgagatcgcagctcagaggacaccgggcgccccttccaccttccaaggagctttgtattcttgcatctggctgcctgggacttcccttaggcagtaaacaaatacataaagcagggataagactgcatgaatatgtcgaaacagccagtttccaatgttagagccatccaggcaaatatcaatattccaatgggagcctttcggccaggagcaggtcaaccccccagaagaaaagaatgtactcctgaagtggaggagggtgttcctcccacctcggatgaggagaagaagccaattccaggagcgaagaaacttccaggacctgcagtcaatctatcggaaatccagaatattaaaagtgaactaaaatatgtccccaaagctgaacagtagtaggaagaaaaaaggattgatgtgaagaaataaagaggcagaagatggattcaatagctcactaaaattttatatatttgtatgatgattgtgaacctcctgaatgcctgagactctagcagaaatggcctgtttgtacatttatatctcttccttctagttggctgtatttcttactttatcttcatttttggcacctcacagaacaaattagcccataaattcaacacctggagggtgtggttttgaggagggatatgattttatggagaatgatatggcaatgtgcctaacgattttgatgaaaagtttcccaagctacttcctacagtattttggtcaatatttggaatgcgttttagttcttcaccttttaaattatgtcactaaactttgtatgagttcaaataaatatttgactaaatgtaaaatgtga

SEQ ID NO: 3048 - protein, 88 aa, Homo sapiens
MNMSKQPVSNVRAIQANINIPMGAFRPGAGQPPRRKECTPEVEEGVPPTSDEEKKPIPGAKKLPGPAVNLSEIQNIKSELKYVPKAEQ

SEQ ID NO: 3049 - DNA, 381 bp, Homo sapiens
gactttttttttttttttttttgagttccattatacaggtgcagagtgtggaggtttgttacataagtagatgtgtgccatggtcgtttgttgcacctatcgacccattatctaggttttaagccccatatatgttagctatttgtcctaatgctttctctcccctcacccaccaaccgccctcaagtcagttttctaagagtattaatcaagaaaccatctcataatcacaccaaagcatatttctacacaagatataaaatactaggatatttgctaaagataaatgcatgccatacactgtaacaatggaaatgacttcctacaggataacaatgctaaaattaaactctttgtaattagtaaagatgaacgtcgacg

SEQ ID NO: 3050 - DNA, 356 bp, Homo sapiens
gctcgaccattcccagaaagcactcgtgtggccaaaagcctctttctgagcaaacacgatgtggactaaattagcaaaacatccagccggtgggcaacttcaaaacggaacaggctgcgtttctctgaaacacaaagccccggcctccctttggggcacccaggaccccaaattgccctaagactgtcccagctctcgcaccctctgccttcgccccccggggacctcgggctcacatcacaaggccctgcggggaagcagatggctctcagcaaatgcactttcagcttccggctgccggggctgggtgacccggtgcttcctcaccgtgagttcctgatgtcctcgtgcccaga

SEQ ID NO: 3051 - DNA, 577 bp, Homo sapiens
ttttttttttttttgttcttaaggttcatttaatgccacagacagagaacattccataaaagattaagattaattttatatgcaaaataacttatatctacaggtatagattatcactcaaactgttagaagaaacagatattcattcccaagaatatagttttggaaaagaatgttactaaatgcactatttttggctatatctatgtatagaatttaaagacatgccttgattgctcttatgggggcagtgaatataattttttaaatataaaaagtatatcaaatttgggcttgtttaacagctagcaatttaacaattatttcccttttgcatacttaaaaggcccttaaaattatctgaatcaaagcaaaaaaaatattcattgctccccaaactttataccatagaactttttaaagactgtttaaactagtaatcatttcttcataactattaactaccattgaaccaatccatctattaagacaacagtggatgttgtcttttttttttttaacccaattaaaagaaaaaatctgcttgctcagtctttaaaaagttgaactcagtcac

SEQ ID NO: 3052 - DNA, 414 bp, Homo sapiens
  misc_feature (14)..(14): n is a, c, g, or t
  misc_feature (279)..(279): n is a, c, g, or t
  misc_feature (299)..(299): n is a, c, g, or t
  misc_feature (318)..(318): n is a, c, g, or t
  misc_feature (342)..(342): n is a, c, g, or t
  misc_feature (401)..(401): n is a, c, g, or t
gcgcgcggctccgntgggaagcatgacccgggtggcgggacaagacttgcttcccggccacgcgcgctcggccggccgtggggcggggcataggccgtgacgtggtgtcgcgtatcgagtctccgcccccttcccgcctccccgtatataagacttcgccgagcactctcactcgcacaagtggaccggggtgttgggtgctagtcggcaccagaggcaagggtgcgaggaccacggccggctcggacgtgtgaccagcgcctagggggtggcagcggncaagtgcggggcggcaaggncgaccatggaacttttgcnggactatcacctaccagccagccngccagcaccaaaatgttcgagcaggctctgggcaaagggtttcggaaggaacttcgaanaagaagcggccgc

SEQ ID NO: 3053 - DNA, 454 bp, Homo sapiens
tttttttcagcctggggaatgggaaactttatctctagtaacaaggaaaccattttaccggaatttttattaacatggaaaagttctgtcaattaatcagacttcactgtccatatcactttcaaccttttgggaaggtagaaagatggaattctgaaactaaagttggtaaagttcacagacatcgtcaaacttgcatggtctaaggtatttcttctttctgtggttcatgagttagtaacagctaaaccaagtgtctaggaatattagctctgattctagaaatctacacttatttaactaaatgctgtaaggactcaggaaatccattctttcaacaaaagttactgaagactttccccattagtatcctaaacaatgtctgcaaaattggttttcatacctggataccttgtcttctaagagacacggcagggaaagatcataggaaaaa

SEQ ID NO: 3054 - DNA, 2126 bp, Homo sapiens
gctctgtcagtaacacatgtgtaagagccgcggagggagcgagcgagccggctagaggccagcgccgccgccgccgccgcctccgagccgggcagcaacagccccggcagcggcgcaggctccagcgcgccgggcccggccggccgcagcccccgacgcctgggtgcgcctgcctgccggcctccgcaccgtccgccgccgctcccggggctgttgtgtctgcgactgctcccggccggaggtgcagggagctcagccgagccgccgctgccatcccggagcgagcaagcgagcgagcgcgcgggagggaggaaggcggcggcggaggaggaggaggagcgggaggagcgcgggcgggggcgggggccgccgggcgggggaatatacaaagtgaagccacattgccaaacttgcagcagcgattgcagcagttgctgccgctgcgccgcgcctgaagccgcgccgcgcgggccgagggctcctgcagctgctcgcgcgcagtcggaggcggagaaggacgaagactgagactgacacttctgctcccggccgcccggcacttacgcgggggccccccaacccgccccagagcaacgcgatttaaaaaaaaaaaaaaagccgcccttagccccctcctctcctttcctgcttctgcgagaactccctccctccctccagctccgccagcccaggcgccccttccctggaagccgagcggcttcgctcgcatttcaccgccgccgcctctcgcaatattgcaatataggggaaaagcagaccatggtgaatccgggcagcagctcgcagccgcccccggtgacggccggctccctctcctggaagcggtgcgcaggctgcgggggcaagattgcggaccgctttctgctctatgccatggacagctattggcacagccggtgcctcaagtgctcctgctgccaggcgcagctgggcgacatcggcacgtcctgttacaccaaaagtggcatgatcctttgcagaaatgactacattaggttatttggaaatagcggtgcttgcagcgcttgcggacagtcgattcctgcgagtgaactcgtcatgagggcgcaaggcaatgtgtatcatcttaagtgttttacatgctctacctgccggaatcgcctggtcccgggagatcggtttcactacatcaatggcagtttattttgtgaacatgatagacctacagctctcatcaatggccatttgaattcacttcagagcaatccactactgccagaccagaaggtctgctaaaaggtcagagtaatgcagaatgcgtgccttcatctcagatttgttcatcacaggtggatcccatgtgtcttcagtagacaagtcacctttgtagctagcaccagtgccagctccatgccattgcaccttctttagtcttgattgcccttcccgcatttattggtgtattaaaatgactgaatatgaacattaaggactccatgaacctgggctaatgggagactgtagagaaaatgaaaaaagatccaccagaggacatcttggggagggggagggagctgggggggagggaaatgactaatgaagctaattaaaagaagcattcaaatctgctttctaccctcattaacaattagcagggcactggccagagtttgtaccctgtgttttaccttaacaacattctatttgctctttgtatatttaagtgttgtaaggaaacgtgtttcaatcaaaactgaccatgagataaaggaaagagatgtggcttttgtgatattctatcacaaacacttattgtatctctgtaaaatacaatgtatgtatgcatgtaagtgtttttgtcctaatgttgctactcccatggcaaagaaaaaaaaaagaatgaaaaaaagaaaaaaaatttggaaaaaaaaatcaggctcatagcagctactgtgtagaaaattccccctacttctaatttgctgaatgaagaaaaaaaaaaatcttttatttgtgatattttcagagacatttgctctagtatggtgtatttaaataataaaaacttaaaagaaaaaataaaaaaaaaaaaaaaaaaaaaaaaaaaaaaaaaaaaaaaaaaaaaaaaaaaaaaaaaaaaaaaa

SEQ ID NO: 3055 - protein, 165 aa, Homo sapiens
MVNPGSSSQPPPVTAGSLSWKRCAGCGGKIADRFLLYAMDSYWHSRCLKCSCCQAQLGDIGTSCYTKSGMILCRNDYIRLFGNSGACSACGQSIPASELVMRAQGNVYHLKCFTCSTCRNRLVPGDRFHYINGSLFCEHDRPTALINGHLNSLQSNPLLPDQKVC

SEQ ID NO: 3056 - DNA, 461 bp, Homo sapiens
  misc_feature (416)..(416): n is a, c, g, or t
atgtttatttacttttattttggctgcagagatacactggaattatagagggaggaaaggaaatggaacaagaaactattaatattatttttatctcaattgtttaatagatattgaattttaataaatattaataattgaccttttttcacagactctcatagtccccatccttgagggatttgaagtacaggaaaagaaaaaaaataaaaatactttttgtaatatgggtagtcttcagtataatatacttttttggaggtcatggggaatttcaatcaagtgcttaaaaacagtgcttctaatttaatatttaccttcacaccaggagcaccgggctgtcccttcaatccatccagaccattgtgtccctgaaaggaaagccttattataaaatgctgttccatgatagtgtntggtcaaataaaaattgtattgtatatctttgccattaatctctc

SEQ ID NO: 3057 - DNA, 731 bp, Homo sapiens
tggcacgagggtcctgtagagagaaggaagattatcatccctccattcctggcctatggcgagaaaggctatgggacagtgatccccccacaggcctcgctggtctttcacgtcctcctgattgacgtgcacaacccgaaggacgctgtccagctagagacgctggagctcccccccggctgtgtccgcagagccggggccggggacttcatgcgctaccactacaatggctccttgatggacggcaccctcttcgattccagctactcccgcaaccacacctacaatacctatatcgggcagggttacatcatccccgggatggaccatgggctgcagggtgcctgcatgggggaacgccggagaattaccatccctccgcacctcgcctatggggagaatggaactggagacaagatccctggctctgccgtgctaatcttcaacgtccatgtcattgacttccacaaccctgcggatgtggtggaaatcaggacactgtcccggccatctgagacctgcaatgagaccaccaagcttggggactctgttcgataccattacaactgttctttgctggacggcacccagctgttcacctcgcatgactacggggccccccaggaggcgactctcggggccaacaaggtgatcgaaggcctggacacggacctgcatggcatgtgtgtgggagagaggccgcagctcatcgtgccaccgtacctggccca

SEQ ID NO: 3058 - DNA, 161 bp, Homo sapiens
  misc_feature (24)..(24): n is a, c, g, or t
tgattaatttggtatggatttgtntgttttgtgtggagtttaagaaatagaacagccttaaactctacatttcaaaatacttgtatattttaaaataaagctgattagttcacaggttttgaaaaaaaaaaaaaaaaaaaaaaaaaaaaaaaaaaaaaaag

SEQ ID NO: 3059 - DNA, 420 bp, Homo sapiens
actctatgggcggtggtgtggtcagctcagcgccgccacctcggcaggctccatcccaccatcaccctcccaatcaggctgatagttgtctcctaatgccaagtggaaggaactggaatcaaatactgacacgacctgcaaatcctccagggccctgggctactggttaggccagtagggctgtgtatcaaccgattaaaccaattaataactggcagcacagcacggcctccttctcaacaaattacgatgctgatccccagactcggccatccatgcccatggtctattgttcttacgctttccaaaacgcctcccctgcttcatgctttctagtcttgaggacttggcttacatatgcttctgaattgccactccctcttgttgaccattcttctttttttccttggggaaccggag

SEQ ID NO: 3060 - DNA, 455 bp, Homo sapiens
  misc_feature (362)..(362): n is a, c, g, or t
gcggccgcctctggactaggctccgggctgccccgggtcttcttgagcgtcgtccgggatggagggtgctgaactagggaagtgctgctgctgcgagaccccgttacctccggccctccaggatctgggctgcgatctggccatgacgggacaactccttttcagggctctcccacccctcgaggcttgccagggtgggtctccagaggccgacgaataaccaagtggagctgggggcctccagctcggatccgctccacggcctgagcatgggtgaggccctgcgttgactctccgttgatgtggagcacgatgtgcccgacctgcaaacgaccacagcgctgtgctgggccatcctgcancagcccgcgcacggacagcggagtgtccccagctacataccggcccgcgacctaggtgaggccaaagcctgcgtaaccgcgaaccaggcggac

SEQ ID NO: 3061 - DNA, 473 bp, Homo sapiens
ttttacttttaaaaaataacaaaatgttttatacacatttctgtatatacaactgaacaacattttacatgtttcttttgcacagcaaaagatataaacattcagctctgagaacacagttatgtacagaaaaaagtcaaaaatacttcacaacagtgcaaaaatattttacacagtatcatggagtgagatcttttgagcaagaggaagggtgtgtgtgtttctaaaggaaaactcctttttaagatattggatgtctttaactgtaaacaaaacgcgactctctttcatctccccccaccccccaaacagttatttgaagaatttggcaacatttcaggggtctgagtctgaggtaaacagccagaattcttgcaccaaaaagaaccaagggctaaagggttgcattaaagcctcaaacaccttgagagcaaattttttttttttttttaatgagatgtcagtgacagcgc

SEQ ID NO: 3062 - DNA, 422 bp, Homo sapiens
  misc_feature (39)..(39): n is a, c, g, or t
  misc_feature (54)..(54): n is a, c, g, or t
  misc_feature (61)..(61): n is a, c, g, or t
  misc_feature (64)..(64): n is a, c, g, or t
  misc_feature (96)..(96): n is a, c, g, or t
  misc_feature (163)..(163): n is a, c, g, or t
  misc_feature (171)..(171): n is a, c, g, or t
  misc_feature (173)..(173): n is a, c, g, or t
  misc_feature (218)..(219): n is a, c, g, or t
  misc_feature (231)..(231): n is a, c, g, or t
  misc_feature (259)..(259): n is a, c, g, or t
  misc_feature (270)..(270): n is a, c, g, or t
  misc_feature (282)..(282): n is a, c, g, or t
  misc_feature (296)..(296): n is a, c, g, or t
  misc_feature (310)..(310): n is a, c, g, or t
  misc_feature (315)..(315): n is a, c, g, or t
  misc_feature (376)..(376): n is a, c, g, or t
tttttttttttttttttttttttttttttttcttcaaangccccttttattttnaaaaganctnttttttaaaagaaaactgcagccttgccccangtgggaccatgtctgcgtcagaaggaaagtcggcaggtgcgcatcggggcacactcctgcagctaanggggctgntntctctgctcagcacggggaggccggtcctgggtggccccaggctnnagcagcatgagnttttgctcctcaccttccaccagacggntgggaaggganttgagtgcggantgagctatttgccngcctcctccagggntccanttgaaatcgtcctttgcaggtggtcattgtccttctttcaggataacccaaggtcccccanccctggggccaatggggtttccagttaattgggcatcttccctttt

SEQ ID NO: 3063 - DNA, 403 bp, Homo sapiens
ttttttttttttttttttttttttttttgctttcattgccattttaataaaaaaatagaaactcctatattacaaaatatattgcgtattgatgtcacaatggaaattttacaaacacaaactttataaaagggtgttaagccaattccagatgaagcaaagacatgaaaacaggaaagttctagaaaaagtctaaataaatgtattcatattctatgagtgaaaaagataattcaaaaggatgtccgtaagtctgggcacagtagctcacgcctgtaattccagcacttggggagggtgagacggggggactgactgagcccaggagtttgacaccagcctgggcaacatggtgggacctcgtctctacaaaaaatacaaaaattagtacggtgtggcagtg

SEQ ID NO: 3064 - DNA, 532 bp, Homo sapiens
ttttttttttttagcggcgttctccacctgcgcgggcctgaatggcttcaggagcacagtcggcctgaggagttgatggttactcaccgccgtgagcccaagtaactcgccctccttcggctagaaaccctccgcctgggcccgcgcgacaggagcgcggtctctgaggggagcggcgaccccgccagccccggtctctttccctggcggcggcggcttcttccgtgggacaatatgttcaagagaatggccgaatttgggcctgactccggcgggagagtaaagggtgttactatcgttaaaccaatagtttacggtaatgttgctcggtattttggaaagaaaagagaagaagatgggcacactcatcagtggacagtatatgtgaaaccatatagaaatgaggatatgtcagcatatgtgaagaaaatccagtttaaattacatgaaagctatggcaatcctttaagagttgttactaaacctccatatgaaattactgaaacaggatggggtgaattcgaaataatca

SEQ ID NO: 3065 - DNA, 350 bp, Homo sapiens
  misc_feature (333)..(333): n is a, c, g, or t
gtcaggggtctcattctgtcacccaggctggatgcagtggctcacgcctataatcccagcactttgggaggctgaggtgggtggatagcctgaggtcgggagctcgagaccagcctggcccacatggtgaaaccccatccttacactacactacatttttagtgtagatcccaaatatttagcgtaagtatggtttgtgtaatatttaggatgctcatattttaaaacggtgatactggaatgcttctccccaccgtcatgaagctggcactttcttaccagctgggacttggggtccaacggggtctttttctgaccatgtttgtgtaacgntcacaaccttccctcaa

SEQ ID NO: 3066 - DNA, 2254 bp, Homo sapiens
  misc_feature (1150)..(1150): n is a, c, g, or t
  misc_feature (1393)..(1393): n is a, c, g, or t
ctggcttacagggcggcggcggggtgtgtgtcctctgttaagagtgctactcgcccggggttgatctgtgcatgccactcctgggtcagacggtgaggtcggcgtctgcgaggacgcggcggtggagtagaagggcagccggagacaggcccggcgcctcttccgaggctagacggccccagcttcgcggggatcatggcattgtggtggaccgagtgcggggccactggcgaatcgccgcgggttcctgttcaacctgctggtgtccatctgcattgtgttcctcaacaaatggatttatgtgtaccacgggcttccccaacatgagcctgaccctggtgcacttcgtggtcacctggctgggcttgtatatctgccagaagctggacatctttgcccccaaaagtctaccgccctccaggctcctcctcctggccctcagcttctgtggctttgtggtcttcactaacctttctctgcagaacaacaccataggcacctatcagctggccaaggccatgaccacgccggtgatcatagccatccagaccttctgctaccagaaaaccttctccaccagaatccagctcacgctgattcctataactttaggtgtaatcctaaattcttattacgatgtgaagtttaatttccttggaatggtgtttgctgctcttggtgttttagttacatccctttatcaagtgtgggtaggagccaaacagcatgaattacaagtgaactcaatgcagctgctgtactaccaggctccgatgtcatctgccatgttgctggttgctgtgcccttctttgagccagtgtttggagaaggaggaatatttggtccctggtcagtttctgctttgcttatggtgctgctatctggagtaatagctttcatggtgaacttatcaatttattggatcattgggaacacttcacctgtcacctataacatgttcggacacttcaagttctgcattgctttattcggaggatatgttttatttaaggatccactgtccattaatcaggcccttgacattttatgtacattatttggcattctcgcctatacccactttaagctcagtgaacaggaaggaagtaggagtaaactggcacaacgtccctaattgggttttttgtnggagaaaaaaatgttgtcccaagaagataaaaaatattgttaagtgtgccagttatttaaaaaaagaaaattgggccaggcacggtggctcacgcctgtaatcccagcactttgggaggccaaggccagcggatcacttgaggtcaggagttcgagaccagcctgaccaacatggagaaaccctgtctcaactaataatacaaaattagccaggcgtggtggggcatgcctgtaatcccagcnactcgccctccagcctgggcaacaagagcgaaactccatttcaaaaaaaaaaaattggtgacagactcaatgatggaatgatttgtcggaattaacacaaagcagattttattcatataatgactttttttaagagtctctttttttaaaaaacttaattctctaaaccgaaatggttcatgcttcttttaaaaatgattgtataaaatgtatgaatggttagcctggtgtggtggtgcacacctgtaatcccagctacttgggagactgagacatgagaatcgcttgagcctgggagcgcaggttgcaatgagccaagatcgtaccactgcactccagcctgggcgacagagcaagacactgtctctctctctctctccatatatatgtgtgtgtgtgtgtgtatatatatatgtatgtgtgtgggtgtgtgtataccatgtatccacatatatacacacacacatacatatacatgtgtatatatataccatcccatatatatgtgggatatatatatatatatatatggatatggttatatatatgggatggtttggttggtcccagcaaagtatatgaaaattaaagttctgtgataatgacaaaggaattgctgttactgtactgcaaatatgctgtgggttctcggtgttcaaactcttctaaggaaggacacacagtagctctctgcttgctgatagatggtttcccagtgtgagatttgttattttgatcagagtattcaaatcagaatttaaatctagtgtttctattttagtttagcttcctgatttatataaatgaaatctcgatttataaagtataataaagatgactgtaagacaaaaaaaaaaaaaa

SEQ ID NO: 3067 - protein, 354 aa, Homo sapiens
MPLLGQTVRSASARTRRWSRRAAGDRPGASSEARRPQLRGDHGIVVDRVRGHWRIAAGSCSTCWCPSALCSSTNGFMCTTGFPNMSLTLVHFVVTWLGLYICQKLDIFAPKSLPPSRLLLLALSFCGFVVFTNLSLQNNTIGTYQLAKAMTTPVIIAIQTFCYQKTFSTRIQLTLIPITLGVILNSYYDVKFNFLGMVFAALGVLVTSLYQVWVGAKQHELQVNSMQLLYYQAPMSSAMLLVAVPFFEPVFGEGGIFGPWSVSALLMVLLSGVIAFMVNLSIYWIIGNTSPVTYNMFGHFKFCIALFGGYVLFKDPLSINQALDILCTLFGILAYTHFKLSEQEGSRSKLAQRP

SEQ ID NO: 3068 - DNA, 1932 bp, Homo sapiens
aagcttggcacgaggccgccattgacacgcacagatagaacccaaagaaaggcaaagagtcctgcccggcaccggcgccgcgtgggccaaacctgcgcccgtggaggggcgcgcagagggcaccgggcgccgggagcaggcggcgcagcaccagcattgtgttagtgccgggaggccactgtgtcagcaagctgagagggaaactgaagcaagatgtcgggccggagtgggaagaagaaaatgtccaagctgtcccgttcagctagggcaggtgtcatctttccagtggggaggctgatgcgttatctgaagaaagggacgttcaagtaccggatcagcgtgggcgcccctgtctacatggcggcagtcattgagtacctggcagcggaaattctagaattggccggcaatgccgcgagggacaacaagaaggcccggatagccccgagacacatcttgctggcagttgccaatgacgaggagctcaaccagctgctaaaaggagtgaccatcgccagtggaggcgtcctgcccagaattcaccccgaactgctggccaaaaagcgagggaccaaaggcaagtcggaaacgatcctctccccacccccagagaaaagaggcaggaaggccacgtcaggcaagaagggggggaagaaatccaaggctgccaaaccacggacgtccaaaaagtccaaaccaaaggacagcgataaagaaggaacttcaaattccacctctgaagatgggccaggggatggattcaccattctgtcttctaagagccttgttctgggacagaagctgtccttaacccagagtgacatcagccatattggctccatgagagtggagggcattgtccacccaaccacagccgaaattgacctcaaagaagatataggtaaagccttggaaaaggctgggggaaaagagttcttggaaacggtaaaggagcttcgcaaatcccaaggccctttggaagtcgccgaagccgccgtcagccaatccagtggactcgcagccaaatttgtcatccactgtcacatccctcagtggggctccgacaaatgtgaagaacagcttgaagagaccatcaaaaactgcctgtcagcggcggaggacaagaagctaaagtccgtcgcgttcccgcctttccccagcggcagaaactgctttcccaaacagactgcggcccaggtgaccctcaaagccatctcagcccactttgatgactcgagcgcgtcctcgctgaagaacgtgtacttcctgctcttcgacagcgagagcatcggcatctacgtgcaggagatggccaagctcgacgccaagtagccgccgcactttccagcagggatcggaggacgacccgagtcccaagagtggggttttgctttttaaaaggagagaggaggggtgatggcaggggagtggagggtggccgggcaggtcctgccggcgcagggagccctctgcccttcacactctcctccaaaagagcctccatctgtaaggaagcaggtctccgcgaggggtttctttccatgtgttttcctcctgttgttaaaagaacttttttaaaaaaacagacctcgttttagatttatagcattgacttttacacacattcacacaagaaaaaaatcctttcaaaattcttaaatcttctgttcctcctttttccaagggaagagggcaaaaagtggcctgggctctgttggtgtgcgtgttccgtggcggagagaagaaaatgggaaagacatctcactggtgcttttctcttttgttttagtgccccccgcccccatccctataatatctgtaactactcctaaaaaggttttgattcaggcttttttttggtttcattttgtttttttaagaaaaagaaaatgaaaggaaaaaaaaaaaaaaaaaaaaaattcctgcggccgc

SEQ ID NO: 3069 - protein, 372 aa, Homo sapiens
MSGRSGKKKMSKLSRSARAGVIFPVGRLMRYLKKGTFKYRISVGAPVYMAAVIEYLAAEILELAGNAARDNKKARIAPRHILLAVANDEELNQLLKGVTIASGGVLPRIHPELLAKKRGTKGKSETILSPPPEKRGRKATSGKKGGKKSKAAKPRTSKKSKPKDSDKEGTSNSTSEDGPGDGFTILSSKSLVLGQKLSLTQSDISHIGSMRVEGIVHPTTAEIDLKEDIGKALEKAGGKEFLETVKELRKSQGPLEVAEAAVSQSSGLAAKFVIHCHIPQWGSDKCEEQLEETIKNCLSAAEDKKLKSVAFPPFPSGRNCFPKQTAAQVTLKAISAHFDDSSASSLKNVYFLLFDSESIGIYVQEMAKLDAK

SEQ ID NO: 3070 - DNA, 372 bp, Homo sapiens
cgtgatccccgttggaaaataatcaatgtcacaaatgactgaagacttcataataaacacagaattatagagggaaaatatttccttttttttttaacatacatagactttagttcctttattatttttcagaaattgcttatactttactacaactatgtattgagcatcttattgtatgcaaactttgttatatatttctatataaatacctatgtaaatatgtgactgtttcctgagtgcattagaataaacaagggtatatatgtgtgtgttgccttttgttcaagaggaaataagtgaaagcaaagaacatgccttaaatttctaaacgctagttggtctgcagatttaatctttctctctacttct

SEQ ID NO: 3071 - DNA, 374 bp, Homo sapiens
ttttttttttttaaagacaggttctcattaaattgctgtggctgatctaaaaatcctgggctcaagagatcctcctgcctcagccttccaaaatgctaggattacttgcatgagccacctcccccaaccaggtgtttactggggactaacatgaagcacttacaagagtatgtggaacatagtgagctacataaaatatttgctattagcataataattttattgtatatcttaacaaaattgtgtatgttaggcaggtggcatgccaatggaagtagtctcctatagctgcactgaatcattcttctcaccactgagagttgcagcaaatgcgggggcacataatttataacttacttttctctgtgtatgac

SEQ ID NO: 3072 - DNA, 525 bp, Homo sapiens
gagtcagggtcttcctccgttgcccagactggagtgcaggggggcaatcatggctcactgcagcctcaacctcccgggttcaagcagttctcccacctcagtctcctgagtagctgggattataggcaagtgccaccaggcccagctaatgtttatttatttattttttttgtagagacaaaggtctcactatgttgcccaggctgatctcaaactcctggactcaagcaatccttcgccttggcctcccaaagtattgggattacaagcatgagccaccacggattggccaggacttccttaatctctttaggggcagctaaaggaaattctgaatatgtgactcttagatccaaccaccatctctcaagaagaaatactactaccaccatttctgccctcaaaactcactaccgtgactatgggaggagggtagcacaggtctaacggaggctcttccagaagttaacaaattgctcatgaaattacataagaagccaagattcagggccacttctgcatctg

SEQ ID NO: 3073 - DNA, 254 bp, Homo sapiens
taaacacagagaatttttttttagcctgacaaatttcaaagaggctttgcaagtgcaaacagacttcagctttttcacattcctatgcccagaaactgggacgtgaaaatgccaggaaccctttcaataactagactatgtgatagatgcaggagaaactctccaaccaccaagattactcctatggagctgccaaagaaccagatgcttccttcaaaagcatatcaatttggcggtgaaaaaccctgtggcct

SEQ ID NO: 3074 - DNA, 508 bp, Homo sapiens
ttgtttttttgagacaggcaatcaaaaagcatgctgatgccaaaataccagaggacgattctgcagaggcattaagataacgctgtccagatacatactctcccgtgtgcatctgggatcctgggtcctgaggcctttcaggagtcccacagaactaccttcccgagcgtcctaagccgccaccagccttgctcactctcattctcacagagtgcacagcagaggcctccgtgggctgcaaggcgtgtgatatcacaggaatgaacgcgagattcgagagcctatcttttatcaagccagacattaagatatttgcaaaaatgtaatgggtttttattgctaattaactatagaaatattctaatactattttaatttctaatatggtcaatattgatgactattacccacacaaacaagaactctcatttaagaatgactggggttccaatcattcttaaaaacatataggaaatgtgctacatatataccatggcatactacatag

SEQ ID NO: 3075 - DNA, 379 bp, Homo sapiens
tttttttttcctctgttcattttttttttttggccattttaattattttatactgggacgtgtaggtggcagtaggggagatagtgaaagtgaccaatggggaacatctcccagcagatctcatcagtctgtcctcaaggttagaaccactgagtcgtataggatgcgtgtatgtgggtcctcaccgtaaaccggagaacagttgcacccaaatatggttgagttctgtgtctcttcctttaaaacacaaactttttatactgcttggtgatggacatttcacagatgttttaaagggatttttgaatgctatgttgactgatgcttgtccttcagctgggcaaattgaactcctgttgttatcaataggagtctaaga

SEQ ID NO: 3076 - DNA, 1794 bp, Homo sapiens
tacagctttgattttataacatcctgctaatttttgttcttacagaaatacactttcgggaaatggcctctaaatcctggctgaattttttaaccttcctctgtggatcagcaataggatttcttttatgttctcagctatttagtattttgttgggagaaaaggttgacacccagcctaatgttcttcataatgatcctcatgcaaggcattcagatgataatggacagaatcatctagaaggacaaatgaacttcaatgcagattctagccaacataaagatgagaacacagacattgctgaaaacctctatcagaaagttagaattctttgctgggttatgaccggccctcaaaacctagagaaaaaggccaaacacgtcaaagctacttgggcccagcgttgtaacaaagtgttgtttatgagttcagaagaaaataaagacttccctgctgtgggactgaaaaccaaagaaggcagagatcaactatactggaaaacaattaaagcttttcagtatgttcatgaacattatttagaagatgctgattggtttttgaaagcagatgatgacacgtatgtcatactagacaatttgaggtggcttctttcaaaatacgaccctgaagaacccatttactttgggagaagatttaagccttatgtaaagcagggctacatgagtggaggagcaggatatgtactaagcaaagaagccttgaaaagatttgttgatgcatttaaaacagacaagtgtacacatagttcctccattgaagacttagcactggggagatgcatggaaattatgaatgtagaagcaggagattccagagataccattggaaaagaaacttttcatccctttgtgccagaacaccatttaattaaaggttatctacctagaacgttttggtactggaattacaactattatcctcctgtagagggtcctggttgctgctctgatcttgcagtttcttttcactatgttgattctacaaccatgtatgagttagaatacctcgtttatcatcttcgtccatatggttatttatacagatatcaacctaccttacctgaacgtatactaaaggaaattagtcaagcaaacaaaaatgaagatacaaaagtgaagttaggaaatccttgaaagaaaatcatgaatgaacaaaggtaatatgtctagcactgcactgaaaaaggacttctgcatttctgacatagaacactggaatcccagtgaggaattctaagtgaacattccttatagaaacctttcacatgaatgactataaactgaagctttaaatgagctgtgaagtgtgttaaaatgtgttttgatacagtaatatataaatatgtctatatatatgaggaacttgtgttttttaaatggtggccaggtagaggaactagaaaagagattttgttgcctgttttctgaccatctgtgttattgtcactgagaaactaaaatagtaaatttactaaaactacactgcaccatgttagtaataaacagatctgccttaaagaaaagaaaattttagaaagaaatattgttgctcagtgttgttaatatagctcaagaattgagtttatatttgcagtatgctataaatgatacccccctaccacacccacacacacagtttttgtctaatgaaaatgttgctgtgattatttataattggtagtatttcttccagaagaagctaaaataagactggcacttaccctgaagtgcattaataaaaccacactttaaaattaaaaaaaaaaaaaaaaaa

SEQ ID NO: 3077 - protein, 363 aa, Homo sapiens
MASKSWLNFLTFLCGSAIGFLLCSQLFSILLGEKVDTQPNVLHNDPHARHSDDNGQNHLEGQMNFNADSSQHKDENTDIAENLYQKVRILCWVMTGPQNLEKKAKHVKATWAQRCNKVLFMSSEENKDFPAVGLKTKEGRDQLYWKTIKAFQYVHEHYLEDADWFLKADDDTYVILDNLRWLLSKYDPEEPIYFGRRFKPYVKQGYMSGGAGYVLSKEALKRFVDAFKTDKCTHSSSIEDLALGRCMEIMNVEAGDSRDTIGKETFHPFVPEHHLIKGYLPRTFWYWNYNYYPPVEGPGCCSDLAVSFHYVDSTTMYELEYLVYHLRPYGYLYRYQPTLPERILKEISQANKNEDTKVKLGNP

SEQ ID NO: 3078 - DNA, 2555 bp, Homo sapiens
cacggggctgcgtggaaagagcgccgagcggtggcgtcgttgtcgccccctcctcgtcgggaagaatcgtttggtctcctgccgtgcccggccggtgctgctgtcgctgctgctgcccgcgcgggttgtggatgttgtcggctccgtgttgtgatgacaggagaatgtgtgtgtgtcccgggcccagacgaattggaatcccagtcagaagttccagcctgccactgttctctgatgccatgccagcaccaactcaactgttttttcctctcatccgtaactgtgaactgagcaggatctatggcactgcatgttactgccaccacaaacatctctgttgttcctcatcgtacattcctcagagtcgactgagatacacacctcatccagcatatgctaccttttgcaggccaaaggagaactggtggcagtacacccaaggaaggagatatgcttccacaccacagaaattttacctcacacctccacaagtcaatagcatccttaaagctaatgaatacagtttcaaagtgccagaatttgacggcaaaatgtcagttctatccttggatttgacagcaatcaagctgcctgcaaatgcacccattgaggaccggagaagtgcagcaacctgcttgcagaccagagggatgcttttgggggtttttgatggccatgcaggttgtgcttggtcccaggcagtcagtgaaagactcttttattatattgctggctctttggtaccccatgagactttgctagagattgaaaatgcagtggagagcggccgggcactgctacccattctccagtggcacaagcaccccaatgattactttagtaaggaggcatccaaattgtactttaacagcttgaggacttactggcaagagcttatagacctcaacactggtgagtcgactgatattgatgttaaggaggctctaattaatgccttcaagaggcttgataatgacatctccttggaggcgcaagttggtgatcctaattcttttctcaactacctggtgcttcgagtggcattttctggagccactgcttgtgtggcccatgtggatggtgttgaccttcatgtggccaatactggcgatagcagagccatgctgggtgtgcaggaagaggacggctcatggtcagcagtcacgctgtctaatgaccacaatgctcaaaatgaaagagaactagaacggctgaaattggaacatccaaagagtgaggccaagagtgtcgtgaaacaggatcggctgcttggcttgctgatgccatttagggcatttggagatgtaaagttcaaatggagcattgaccttcaaaagagagtgatagaatctggcccagaccagttgaatgacaatgaatataccaagtttattcctcctaattatcacacacctccttatctcactgctgagccagaggtaacttaccaccgattaaggccacaggataagtttctggtgttggctactgatgggttgtgggagactatgcataggcaggatgtggttaggattgtgggtgagtacctaactggcatgcatcaccaacagccaatagctgttggtggctacaaggtgactctgggacagatgcatggccttttaacagaaaggagaaccaaaatgtcctcggtatttgaggatcagaacgcagcaacccatctcattcgccacgctgtgggcaacaacgagtttgggactgttgatcatgagcgcctctctaaaatgcttagtcttcctgaagagcttgctcgaatgtacagagatgacattacaatcattgtagttcagttcaattctcatgttgtaggggcgtatcaaaaccaagaaaagtgagtggctctttactggcaattctcaaatgattacatttaaagggcagattttttaaaagatctactataataaacattttcaggtggcattctaagcatttacccttttgatactctaggggcgctccaaattgactttgcagcagggtggcagggcagaagagtctggtcctgcctagctcagatttcatggcacctgcacttgaggcaagcacttctttatcacaggtgtcttgaaacattagcttcttttaccaacctgagaaaattaggatgacctggcaaataagatcttgaatagccaaaagcaagtatcttgctgtgtgtagtctcttggttaaagtgaagaacagtactgttcacacctttcttcactgagattccagtgacatgagaacatatatttattgcatgattttctagtacacagtctatgcattattcatatacatttattttagcctaaagtggttttcaaatccagttcttcaagccataaatgaccaagatccaagcaatctgaatttgtttttgtgattatttgactggaatgcttcttaagtggaataactatactccgttatccacccgatttcctaatgtaattgaaacattttctagtttgccacacacttggagaccgtaagggtttttagtttgatctactcttctattgaagttaaaaaaaaaaaaaaaaaaa

SEQ ID NO: 3079 - protein, 574 aa, Homo sapiens
MLSAPCCDDRRMCVCPGPRRIGIPVRSSSLPLFSDAMPAPTQLFFPLIRNCELSRIYGTACYCHHKHLCCSSSYIPQSRLRYTPHPAYATFCRPKENWWQYTQGRRYASTPQKFYLTPPQVNSILKANEYSFKVPEFDGKMSVLSLDLTAIKLPANAPIEDRRSAATCLQTRGMLLGVFDGHAGCAWSQAVSERLFYYIAGSLVPHETLLEIENAVESGRALLPILQWHKHPNDYFSKEASKLYFNSLRTYWQELIDLNTGESTDIDVKEALINAFKRLDNDISLEAQVGDPNSFLNYLVLRVAFSGATACVAHVDGVDLHVANTGDSRAMLGVQEEDGSWSAVTLSNDHNAQNERELERLKLEHPKSEAKSVVKQDRLLGLLMPFRAFGDVKFKWSIDLQKRVIESGPDQLNDNEYTKFIPPNYHTPPYLTAEPEVTYHRLRPQDKFLVLATDGLWETMHRQDVVRIVGEYLTGMHHQQPIAVGGYKVTLGQMHGLLTERRTKMSSVFEDQNAATHLIRHAVGNNEFGTVDHERLSKMLSLPEELARMYRDDITIIVVQFNSHVVGAYQNQEK

SEQ ID NO: 3080 - DNA, 1774 bp, Homo sapiens
tgaacccagccggctccatctcagcttctggtttctaagtccatgtgccaaaggctgccaggaaggagacgccttcctgagtcctggatctttcttccttctggaaatctttgactgtgggtagttatttatttctgaataagagcgtccacgcatcatggacctcgcgggactgctgaagtctcagttcctgtgccacctggtcttctgctacgtctttattgcctcagggctaatcatcaacaccattcagctcttcactctcctcctctggcccattaacaagcagctcttccggaagatcaactgcagactgtcctattgcatctcaagccagctggtgatgctgctggagtggtggtcgggcacggaatgcaccatcttcacggacccgcgcgcctacctcaagtatgggaaggaaaatgccatcgtggttctcaaccacaagtttgaaattgactttctgtgtggctggagcctgtccgaacgctttgggctgttagggggctccaaggtcctggccaagaaagagctggcctatgtcccaattatcggctggatgtggtacttcaccgagatggtcttctgttcgcgcaagtgggagcaggatcgcaagacggttgccaccagtttgcagcacctccgggactaccccgagaagtattttttcctgattcactgtgagggcacacggttcacggagaagaagcatgagatcagcatgcaggtggcccgggccaaggggctgcctcgcctcaagcatcacctgttgccacgaaccaagggcttcgccatcaccgtgaggagcttgagaaatgtagtttcagctgtatatgactgtacactcaatttcagaaataatgaaaatccaacactgctgggagtcctaaacggaaagaaataccatgcagatttgtatgttaggaggatcccactggaagacatccctgaagacgatgacgagtgctcggcctggctgcacaagctctaccaggagaaggatgcctttcaggaggagtactacaggacgggcaccttcccagagacgcccatggtgcccccccggcggccctggaccctcgtgaactggctgttttgggcctcgctggtgctctaccctttcttccagttcctggtcagcatgatcaggagcgggtcttccctgacgctggccagcttcatcctcgtcttctttgtggcctccgtgggagttcgatggatgattggtgtgacggaaattgacaagggctctgcctacggcaactctgacagcaagcagaaactgaatgactgactcagggaggtgtcaccatccgaagggaaccttggggaactggtggcctctgcatatcctccttagtgggacacggtgacaaaggctgggtgagcccctgctgggcacggcggaagtcacgacctctccagccagggagtctggtctcaaggccggatggggaggaagatgttttgtaatctttttttccccatgtgctttagtgggctttggttttctttttgtgcgagtgtgtgtgagaatggctgtgtggtgagtgtgaactttgttctgtgatcatagaaagggtattttaggctgcaggggagggcagggctggggaccgaaggggacaagttcccctttcatcctttggtgctgagttttctgtaacccttggttgccagagataaagtgaaaagtgctttaggtgagatgactaaattatgcctccaagaaaaaaaaattaaagtgcttttctgggtcaaaaaaaaaaaaaaa

SEQ ID NO: 3081 - protein, 378 aa, Homo sapiens
MDLAGLLKSQFLCHLVFCYVFIASGLIINTIQLFTLLLWPINKQLFRKINCRLSYCISSQLVMLLEWWSGTECTIFTDPRAYLKYGKENAIVVLNHKFEIDFLCGWSLSERFGLLGGSKVLAKKELAYVPIIGWMWYFTEMVFCSRKWEQDRKTVATSLQHLRDYPEKYFFLIHCEGTRFTEKKHEISMQVARAKGLPRLKHHLLPRTKGFAITVRSLRNVVSAVYDCTLNFRNNENPTLLGVLNGKKYHADLYVRRIPLEDIPEDDDECSAWLHKLYQEKDAFQEEYYRTGTFPETPMVPPRRPWTLVNWLFWASLVLYPFFQFLVSMIRSGSSLTLASFILVFFVASVGVRWMIGVTEIDKGSAYGNSDSKQKLND

SEQ ID NO: 3082 - DNA, 267 bp, Homo sapiens
ttttttttttttttttcaaattaggttatttattcttaaatatgaacaggaaactcagagttatctggtattcaaggaaagcccgccttatgaatggcaaagactcaaattcaaaacacaaaagtaattctgaaggaagagataatttaaagaaaccacacaaacacagactaatgagagttttcaaaaagtttcaagaaatcccacagttcacaaaataagaatatgattatttttaaaataacacttaaagagatcctgaaaatg

SEQ ID NO: 3083 - DNA, 581 bp, Homo sapiens
cgggagcttctagatagaaatcagaaagagattcaaggagccaaatgagcggtcagcccccaccatgcactccttgccccgtgcagagctccagccagcttcgtcaccagccccactggctcctggttggaacgaaagggtctctggttgcactgaatgcagctctcaaactggtcttgtacttgctgaataaatactgttgttcttgccttagctgctctctaggtttgtggggttaagttgccagaaaattgtgctactgtgtgtgcgtgtgcgtgcgtgtgtgtagtgctaggagtccacagtaggtctctgtcaagccgatgtcgtgatgagggcttttctgatactgacccagaagccacagaaccacaaggaaacccaaaccccctccagctgctgaggcgcaggcacagcctggggtcggatggagcctccagcaccccagcacccaggtgacttccccactcccctgtaaatgtcatggtgctaagactgtgtcaaccccaagacgacacatggtcctgtgctttggccaccgtttgaggcaaaaactaaacagtccgacacgttgtgttctg

SEQ ID NO: 3084 - DNA, 233 bp, Homo sapiens
gctcgacttttttttttttttttagtaacaaagatgttgtcaaaaatgacaattttttgtgtcccctgatgatgccttgctagcatttggttataagccataaagcaggaataatttcagcctgtcaggagtctcgctaatgcccagtttccccctagagagaattcctgtcaaatctaatgagagctccaaaggccctctctacaatataatgagcacttaggccgtcgacg

SEQ ID NO: 3085 - DNA, 177 bp, Homo sapiens
  misc_feature (52)..(53): n is a, c, g, or t
  misc_feature (63)..(63): n is a, c, g, or t
  misc_feature (126)..(126): n is a, c, g, or t
  misc_feature (144)..(144): n is a, c, g, or t
ggccaaacagagctgtccgtggcacagtgcacgcagcggcccgtggacatcnncttcctgctngacggctccgagcggctgggtgagcagaacttccacaaggcccggcgcttcgtggagcaggtngcgcggcggctgacgctngcccggagacgtacgaccctctcaacgcacgcg

SEQ ID NO: 3086 - DNA, 1348 bp, Homo sapiens
tctggctactggtgacacactgctgtgcctgccctggccttctccagacagccctgtccacccaaagcccagccaccctggcctgcagcaggcctgtggagttctcagttgcgtggggaccagagggtgctggagaaacaaaccagacgcagctgaaggcagtcagggcagggcgcaatcagcgataagagctgcataggggccacagcgtaacctgagctccagtcggtggaaagaaaaggcagagacgttgcagaggccaggtctgctcaggggaagacagttctgggtgtagaggactcacatcccagagaggctgaggaagggtttaccacgcaagcttctcattcgggactcttgaggggtggctggggtcttcctggcgacgggctgcggcactgaagccctactggagtttggcctgtctccggcacaggtttggacggagctgttttgtgctgaaaggttttctcggggtccgtggtgtcccccaaaggtgccaccgtgcgggtctcctagctccctgccagcttcctgtccctgtgctcactgcccccacgcctcctgccaaggccgagccacacacccgctccacctgcatttcctctaccgactcgccagcccaaatgccgctcttcactctggcctcgctgagcggctgcccgaggaggagctctaggccgacgcccaccgcaggccttacagtcgtctctggacgctcccttgcagatgcaccgtggcctggcggcgagcccccggtcaccttcctccgcacggaagaggggccggacgccaccttccccaggaccattcccctgatccaacagttgctaaacgccacggagctcacgcaggacccggccgcctactcccagctggtggccgtgctggtctacaccgccgagcgggccaagttcgccaccggggtagagcggcaggactggatggagctgttcattgacacctttaagctggtgcacagggacatcgtgggggaccccgagaccgcgctggccctctgctaaagcccgggcacccgcccagccgggctgggccctccctgccacactagcttcccagggctgcccccgacaggctggctctcagtggaggccgagagatctggaatcggggtcagcggggctacagtccttccaggggctctggggcagctcccagcctcttcccatgctggtggccaccgtgtcccttgctgcggctgcatcttccagtctctcctccgtcttccagtggccgctctctttataagaaccctggtcattgaatttaaggcccaccccaagtccagaatgacctcgcaagacccttaactcactcccgtctgcag

SEQ ID NO: 3087 - protein, 429 aa, Homo sapiens
ECDVMTYVRETCGCCDCEKRCGALDVVFVIDSSESIGYTNFTLEKNFVINVVNRLGAIAKDPKSETGTRVGVVQYSHEGTFEAIQLDDEHIDSLSSFKEAVKNLEWIAGGTWTPSALKFAYDRLIKESRRQKTRVFAVVITDGRHDPRDDDLNLRALCDRDVTVTAIGIGDMFHEKHESENLYSIACDKPQQVRNMTLFSDLVAEKFIDDMEDVLCPDPQIVCPDLPCQTELSVAQCTQRPVDIVFLLDGSERLGEQNFHKARRFVEQVARRLTLARRDDDPLNARVALLQFGGPGEQQVAFPLSHNLTAIHEALETTQYLNSFSHVGAGVVHAINAIVRSPRGGARRHAELSFVFLTDGVTGNDSLHESAHSMRNENVVPTVLALGSDVDMDVLTTLSLGDRAAVFHEKDYDSLAQPGFFDRFIRWIC

SEQ ID NO: 3088 - DNA, 448 bp, Homo sapiens
  misc_feature (134)..(134): n is a, c, g, or t
tttagagaagctcctcaccatccaacactcaagtcacactcatgaagatagagacagtcatttgggagatttaaagggatatcctcaaaacagaacaacaggctctcaccaccagagatgaccggaaatatgtnttctcttcttccttccctgcatcaggggaagaggctggtgaagttggtgagcatcagctggaccagctgccctgggtagagagcatgggctgctgggtcagatgtctcctgctctggccgaaacagggttggtccaaacacaattcccaggttgtggggtgtcatgcgattcttatctgagtgtgctatcaccctgcataaatgctccaggaggtaccgtagagtgtcatggtcgggctttggcattgagcctattaattcttgtatctgagagaggcactgctctgattcggagagtgcaagggcagcacgga

SEQ ID NO: 3089 - DNA, 405 bp, Homo sapiens
ttttttttttttttttttttttttttttttttggtgttgagcagcaatctttccttttattaaaattcatatatttaccaaatgttttcagagtgttataatagactgttccaggcactgtttatatctactggattaggagtcaaatgactgatgttatagtgacatttcagtcagagaaaccctgaataataagtcatctactactatgtgtagcttaagtatttcttcttatagaaggacaacaacacctggttggatggaccaaagaaactgatacagtgaaagggtaatatattgctctcctagatagaaacaagtcataacaaataagtactggaatgtgtacacctctggctcccgtacactgggggtacagtattttgatgtaatgaacatatttag

SEQ ID NO: 3090 - DNA, 530 bp, Homo sapiens
gctactgccagctgatgccgggagctaactaccgcgccggggccggggccggggccggggcccgacgtccccgcggggcccgggaccgcgaggaggacggcgggggcctggagcccgcggccgtggcccgcgacctattgaggggcacatctaacatgtcatttgaggagctgtaggaattgcagagccaagtggggactaagacgtacaaacaattggtagctggaaatagtcctaagaaacaagcttctagaccacctatccaaaatgcatgtgttgcagataagcacaggcctctggaaatgtcagccaagatccgagtaccatttttacgtcaggttgttcccattagtaaaaaggtagcccgggaccctcgctttgatgatctgtcaggggaatataatcctgaggtgtttgacaaaacataccaattcttgaatgacatccgagcgaaagagaaagagctagtgaaaaaacagtagaacgaagcaccatttcaggagaggagcatgagaaactgcagcaacatc

SEQ ID NO: 3091 - DNA, 633 bp, Homo sapiens
ggcgcacatagcgacttggtgggcgcgtccagtgatgactgggggatcccggcaagtaacatgactaaaaagaagcgggagaatctgggcgtcgctctagagatcgatgggttagaggagaagctgtcccagtgtcggagagacctggaggccgtgaactccagactccacagccgggagctgagcccagaggccaggaggtccctggagaaggagaaaaacagcctaatgaacaaagcctccaactacgagaaggaactgaagtttcttcggcaagagaaccggaagaacatgctgctctctgtggccatctttatcctcctgacgctcgtctatgcctactggaccatgtgagcctggcacttccccacaaccagcacaggcttccacttggccccttggtcaggatcaagcaggcacttcaagcctcaataggaccaaggtgctggggtgttcccctcccaacctagtgttcaagcatggcttcctggcgcccagccttgcctccctggcctgctggggggttccgggtctccagaaggacatggtgctggtccctcccttagcccaagggagaggcaataaagaacacaaagctgttcccgtaaaaaaaaaaaaaaaaaaaaaaaaaaa

SEQ ID NO: 3092 - protein, 117 aa, Homo sapiens
GAHSDLVGASSDDWGIPASNMTKKKRENLGVALEIDGLEEKLSQCRRDLEAVNSRLHSRELSPEARRSLEKEKNSLMNKASNYEKELKFLRQENRKNMLLSVAIFILLTLVYAYWTM

SEQ ID NO: 3093 - DNA, 565 bp, Homo sapiens
gtagaagtaaaaagaaaaaagaagcaattattcggataaatgtgggaggaaaactcttaaccaatcatctaaaggagatcatatcttacaggcagctacatgttatggatgaaacacatgtgattaatcaagtgaaagaagatgtatgctatgtgtctcaggatttttatagagacatggatattgcaaagttgaaaggagaagaaaatacagtaatgatagactatgtcttgcctgacttcagtacaattaaaaagggcttttgtaagccaagggaagagatggtgttgagtggaaaatacaaatctggggaacaaattcttcgtttggccaatgagagatttgctgttccggaaatactctttaatccttctgatataggcattcaagaaatgggaattccagaagctattgtctattcaattcaaaatctacctgaagaaatgcagccgcatttttttaagaacattgtcttgacaggaggaaattcccttttcccaggatttagggatcgggtttactcagaagttcgatgtcttactccaacagattatgatgtttctgt

SEQ ID NO: 3094 - DNA, 582 bp, Homo sapiens
tttgtaagcaaacatttatagccatgattccacagatgtggtgagtaaaccaacagccattcctaaataaaatacaagaatttccatcatgcatagtttacaggcttggtaagaagcggtctctttaggggccagatgcttaagaaatattcaacaaacaatgaaatcttggcttttttttttttttacacaaatgtttggttatttagccacactagtgataaaacatattcatattctaactgcaagtggaataaacattgcaacaaaaatgcaacccaatcaaaatcattagtaataactattactccctcttagcagtaagaaccattattcttggatttcaaacattttattttctgtgcatagcttatagcactgtattataggaatcagagtgtataagccaaaaaaatgaaaaataaaacttcttggagaccatttccattatttatgattaaatcaatgaaactatacaatttccacattaaatacaaattagtagaagaattcctccaagtagtattgcatataagctacaactttaccccaactattttaatcactatgattcgagatttc

SEQ ID NO: 3095 - DNA, 633 bp, Homo sapiens
ttgaatttaggtgacactatagaagagctatgacgtcgcatgcacgcgtacgtaagcttggatcctctagagcggcccctactactactaaattcgcggccgcgtcgacttttttttttttttttagagtaaagtaaaagcaagtttattaggaaagcaaaggaataaaaaatggctactccataggcagagcagcctttttcactatacacttccaaatgcgggtcctcattccacaagtatttgacgaatgtgttgtatgggccagacactagtataacaaataaagaaattgaatctccgagaatttaagcaatagtccaaacaaaaaataacagaattagcacacagtgggaccaagagtcaaagattccagagcctgagtccataaccatacactatgcatctacacttaaaaccgccataggaaatgatcagtttttgtagctttacccagcattttccttatgttttcattgttcagaagttggaagttctgccatcatccaatacctctatgcatttgttacgatcatcctgatttttaaaaataacttacttcagctaaaatactttcagcttttttttggacatccttgtttccttcttccttcttcccttatgttcttctac

SEQ ID NO: 3096 - DNA, 440 bp, Homo sapiens
  misc_feature (347)..(347): n is a, c, g, or t
  misc_feature (363)..(363): n is a, c, g, or t
  misc_feature (409)..(409): n is a, c, g, or t
attcggcacagggcagatcttggggccgcttctaccggcagatcaaaagacatccggggatcatcccgatgatcggcttaatctgcctgggcatgggcagcgctgcgctttacttgctgcgactcgcccttcgcagccccgacgtctggtaaagctgggacagaaagaacaacccggagccctggaaccgcctgagccccaatgaccaatacaagttccttgcagtttccactgactataagaagctgaagaaggaccggccagacttctaagccaggctgggctgccagtgccatgcaagccacagccagccagcccatccacttcttccactcctccccgcaggncccaaggcattcactncgggccaccctgttcccgctactggtttacacagggccgggtttcncacggcagaaggggagggtggcttcaaccct

SEQ ID NO: 3097 - DNA, 516 bp, Homo sapiens
ttttttttttttctttacattgtctaatagacttgtttattattttaagctggtaaaaagagacttatgattcatgttgaagaaagagttatttgtgcttgatacattgaagacactgttcaaaagcagtttgtccttataaaaggatgacccctgtagtatttcttaggcaaggagggacaaattcaaccaacgaaaagcacatctcgccccgagttccccatgatttctccacatatagcaaaaaaatacacatcagtaatttatttgaacatgcacatcagtgagtagcatagttctaggctactcaagaaacaaaagggagaatatcagcattacctaaataaaaaagagaggtgaatcacaccattttaattgtcttaaaaacacggataagaagagcaattaaaatatagtcctaaacagtactagctaatgtagattacataagtatacaatatgattcaactaatagtgctctgacaagcataaaccaccagttctagtaaacaagga

SEQ ID NO: 3098 - DNA, 153 bp, Homo sapiens
  misc_feature (57)..(57): n is a, c, g, or t
  misc_feature (119)..(119): n is a, c, g, or t
cgggcaccaacgtgtacggcatcctgcgggccccgcgtgctgccagcaccgagtcgnttgtgctcaccgtgccctgtggctctgactctaccaacagccaggctgtggggctgctgctngcactggctgcccacttccgggggcagatttatt

SEQ ID NO: 3099 - DNA, 530 bp, Homo sapiens
agggtaagactgacttttttttgctaatattgcgcccatgatatcttattggattctaatatatataaggatatcatatttacatcaacaagataatatttttctttttatacttccagatcattgtctctatataacaaaaagtatttaatattttaattttcaaaaatgtctctgtaaataagatacatcttacacagactgtatgtcttacagaatagcaattatattcaatatgtttatttctttgtgttacaatttccttgtttgccttatagagatgattcaggaccctaccaaatccactaggctgttgcaaatatcaagatcatctatgcaatagtcatttgagaaaaataaagcattatgcaaaatattgctatgctgataccaactatatgagcaactagggattaagccagatccccgtggggaacagaatattcaacttcctccttgcagtgaggtgataaaacctgtatggaccagctaggtaaccctagggggaaagaaattgtttaaagagacct

SEQ ID NO: 3100 - DNA, 330 bp, Homo sapiens
  misc_feature (291)..(291): n is a, c, g, or t
gcacgaggaaaaaggtcacccagttctctggaaaaaaaaaaaaaaaaaaaaaaaaaaaaagggatttatatgtgggtagttttttttttggtacaacacaatcattctgttagagcccacaaaattggtaaccttaaattgtgtgttttggtaagtaataactaactgtttcctcatagctagttctcaagctgcatgtaagattttaacgggaagagaaaataggcctggacctgaaggtctcaaatatgttgagaagaaagtatgaactataaggaacttgagatgtanatttattttgcaggaaatacgaggaaaataggaaagaag

SEQ ID NO: 3101 - DNA, 495 bp, Homo sapiens
gcggccgccgcggccagtgggggtggtgtgggcggggacagccacctggccctgcccgccctggagcgagaccacctcaaccaccaccactacgtggctgccgccttcaaggcgcactacagcagcaaccccagcggcgggggctgcgggggcaaaggcccgcctggcctcaactccatccacgaacctctgctcttcaagagcggctccaaggagaacgtgcaaaagacgcaaactgaagccggggggccgggcgggcgaggggcgtggagccccccacccaggtcccagcccgggcgcagcctgaccgggacccctccctcccacagcccagcccaccttctgggaccacgcagggaattggggagaggtggcttccagccccatctggggctcggacccccagtaaggacagggtggggctccaggagcggagtctctgggatcctcgcctcacccccgccaatccccggtgacgggaggggacgtgggacc

SEQ ID NO: 3102 - DNA, 527 bp, Homo sapiens
cagcgggcgcctcgtgattccgcccccgggatgtgccccgcctcctcccgccccgcggcaaggcgcgcacagggcagtgcgcgggtgggtgggtcctagcagcgcggcctgacgggaccaaggcggctgggagtctgctggtctgttccactcgtgactgtgtgacctgtggctgtgcactgcactgctggtgcagtggtaacatgtgcgtgatgctgtgaagtaattattttgccaaagaaacataagaagaaaaaggagcggaagtcattgccagaagaagatgtagcctgaaatacaacactgctgaagaatttcttatcaaacctgaatccaaagttgctaagttggacacgtctcagtggccccttttgctaaagaattttgataagctgaatgtaaggacaacacactatacacctcttgcatgtggttcaaatcctctgaagagagagattggggactatatcaggacaggtttcattaatcttgacaagccctctaacccctcttcccatgaggtggta

SEQ ID NO: 3103 - DNA, 453 bp, Homo sapiens
ttttttaactttttaaaaaaatttttagtaagttccaattgggtgtcagaattgtgctaggcgcagggggcaacaataagcaagacagatcaagcctataccgtcttgaaatttaagtttagggaccactctctgtcaaaggatccagcgctggtaatataaattgctgaaggcctttgccttctttccaccaggcaacagaatttgtgtccccgtcactgcttcttcttgtgtgaaaaatatagcttcagtttggtccacgaatacaagaagtggtcagagaatattgtctttcaagcacacaacaagcaaaacttggccaatacacaccaatcaaatgcacttcgtttttccctgggagctcctgccacatctcagccctgcagggcagtcttcataagggagacaaaagaagggctatgcactggcactgacagttgggcaggcagtgct

SEQ ID NO: 3104 - DNA, 185035 bp, Homo sapiens
tttggaaaagcagaaccttttttcgtggttcaagaaatcaaagtcttcccgggaggtctttctgtaaatccagagctgcagatgtttgaccgtgttcagagaggggcccttgtgctgggtgaagtggatggggcacagcaggcaatgggtgaaaagcaggacaacctggggccctgggaggaccagggagggcccatgtctttgactgttcatcagccggctgacttcctgtccgcctgtcgtctgctctgcccatccatccgtagtccttccgcctgtctctgctggttgccgctgtgctactcagctgtgtctgtctgtccgcctgactgtctgctctccttcaggatgccttccgtgccttccatcaagatctcaattttgtgcgcaagttcctacagcccctgttgattggagagctggctccggaagaacccagccaggatggacccctgaatgtgagccagagccctaggagaggctcagcccctgagggagggggatggctggagggctgggagacattgccacatggccaggagccgctccctcggcattcgcccaaggggatgcagagccaggggtgagcctgccctcccctcccagggggcaggcagttgaaagtgaagctgtagggatgccctgagaagtccagggctccagatctggtttagccaggcactcgtttggatcccgaggcaagctccctccctgttgtcgcccagtgtccccatcaaaaggaggattttgatgaactgatttctctcctggctgtagcgtcttacccaccccataccttttgggagggagaggaggcttcaccaccagccagtgctccagctcacaccccgggctgggtactcttgtcacttcattcctctttgcccacaccccttgggcctggcgatgggaggagcggctggggctccaggagaatgggggtggggaggaatttcttccttggctgatcggcccctctgctatggcaggcgcagctggtcgaggacttccgagccctgcaccaggcagccgaggacatgaagctgtttgatgccagtcccaccttctttgctttcctactgggccacatcctggccatggaggtgctggcctggctccttatctacctcctgggtcctggctgggtgcccagtgccctggccgccttcatcctggccatctctcaggtgaccccagttctgtgttgcagccaccttaactgcccaacagacgtgggcccccatgcatctgggcattgtgaacatatttgctaaatgaatgaatggacctatgaaaggatgaatggatgaataaacagatgaatgagtgaacagtctgaaggcccatcaggcatgtctgtgggtcaagctgcattccagatgagccaagaagttccttcttgaacagattccgatcaagcacagggccactgagccagaggctgctgccctgcagcttcatgacacttacgagcccctccacctccctgggactcagttctcatctgtaaaaagaggacactggcccacaagggtcttgaaatggagcattagcacgggggtaccctgcaagctgaaaggattcactggggccccaggccctggcgggctccgtccttcccaacagcttctgaccctgcctctctccccaggctcagtcctggtgtctgcagcatgacctgggccatgcctccatcttcaagaagtcctggtggaaccacgtggcccagaagttcgtgatggggcagctaaaggtgagggtggggtgggtggtcagccaggtgctgggtggcgctgggtctgcccaagtgtgtgggcacagtcgggggcacagcctgccctgagagccccctcctcctccacagggcttctccgcccactggtggaacttccgccacttccagcaccacgccaagcccaacatcttccacaaagacccagacgtgacggtggcgcccgtcttcctcctgggggagtcatccgtcgaggtgggtggggagggacgtggacaacctctggctgggcctgcagctgagggggagctaatgcactgggtccccactctgcccctgacctagcccctgatctggcctccactctggctgggccaagctctgcccccgtgtctttccttcccacctcccaacctgctggggacgaccagcccgcttgctagaatctagagttgcctttgacccttggccccagccagccccgtgaccttgcccgggagaaggaggtggcctggagagctgctgtctccagccgccgcctgtctccacagtatggcaagaagaaacgcagatacctaccctacaaccagcagcacctgtacttcttcctgagtgagtgtccatctgtccttctggggtgggggagtgcctgggcctgcactgtcctccctgctgtcctggaccactcccagccacttcctggggcggggcacgtctgtcaggtctccctggtcatggcatcctcccagcctctgcagtctgtacacactctcccagcagcatgcctttgccccagctgtctcccgtgcctgggacaccttgcagccacgggccatcacagccctgctgggagcttccccaagccccacgtagaatttcttcttgccctcactagagtggtccggagccctagagtctttgggcagttgttggggcggacagagtgaggactcaagtctggccctgacttgcggtgaagggtggtgggaggtggtggggtaagggcagcctggggaggcttggacacagaattgggggtgatatggggtcattcagctggatgtgaccagcaccaacgtcccaggggcattcctggagtaacagagcccctcactctggcgcccactcaccttggcagcccagccccactcctgaacactctcatgccccttcttgcagtcggcccgccgctgctcaccctggtgaactttgaagtggaaaatctggcgtacatgctggtgtgcatgcagtgggcggtgagtggggttgcccaggaccccgggcatacggctgccgtggcaggaggtggtgcctcgggggacagtacctgcccatgaaggcaaacagggtgcacatgtgcgtgcaacagtgtggctcacatgtatgcgtgcaacagtgtggctcacatgtgtgcgcgcagcaggagagcgagtgtgcccgtgactgtacgtgtggtgggggggggttgaggaacagggggggtgtgggtctctctcggtgagggtgtcttcccaggaggagttgctgggccgactctgccaggcatctgtgtccctggcagggtcttccccaacacaccctgcatgacaccttcgtcactaaaatcagcctcgtgagctggcagggcaaggaccctgttcctttactcagctgagaaaaccagagagggtggtggcctgtcctgggctctgaggcaaatcaggcagaagggttggatgcctgaggtcctcctcccacccaccaggcctccagacctccgggcacctggagacctctcggtatcgcctctgccctcctctgcaggatttgctctgggccgccagcttctatgcccgcttcttcttatcctacctccccttctacggcgtccctggggtgctgctcttctttgttgctgtcaggtatggcagggagtggcgaggtcacacacaggcgacaggtgacccccactgcagccccccaccagagcttcccttttcccgtctgcagaatggggccagtggtactgcctccctggcttgctggtggaatcacataaacacaagcgtggcaggagcccagggtcggtgggtttagggagcgtggcctggcttgtaagtggcccggtgggtgtcggagctgctctggactcagcctcacagtggacactgctccattcagattctttaaacactggcaagggggcgatggccacaatcctattgtacagataaggaagtcaaggccacttggggacagctgctctccagcctccactcagggtgcctaagtggtgagctggacctagggcagtgcccgagcctccccacagggtcctggaaagccactggttcgtgtggatcacacagatgaaccacatccccaaggagatcggccacgagaagcaccgggactgggtcagctctcaggtgggcagcaggggtggggcccatcctgggtggggtggggggtcccagctaggagccagatggcaaagcagggatgaggccctgacggggctgccaggtgggggatggtgccgtggggtcagggatctgcaacggcctcctcacatgtgccccgccggcttccggcagctggcagccacctgcaacgtggagccctcacttttcaccaactggttcagcgggcacctcaacttccagatcgagcaccagtgagtgtgggtgctgggggccagtgggaggtggggagggggtcctgggaggggatcctgggaggggacccgtgggtggggcctctctctggaatctcccacttcaggtgccagcatacgctccccacccccagcctcttccccaggatgccgagacacaactacagccgggtggccccgctggtcaagtcgctgtgtgccaagcacggcctcagctacgaagtgaagcccttcctcaccgcgctggtggacatcgtcaggtgaggctgcagcccggcccctctgttctggtggcttccccagggcctatgcctacccttgtccaggtcagcctcatgctgagcccccagggtccctgagcctttctgtccacgtcccatgcccttcctcccttccccagccttcacgcacacagtgagaatttctggagcacctactgcagactcacaaacagcagtgcctgcggtgagcaggtctatgcaaacctacccccaaaggctgagggaaaaaagctaacagatccagtttctcagaaggaaacacttaacagggactcataaacagaagccatgtctcagggccgggtgcggtggctcacgcctgtaattccagcacttggggaggctgaggtgggcggatcacttgaggtcaggagttcgagaccagcctggccaacatggtgaaaccccgtctctactaaaaaaaaaaaaaaaaaaaacaaaacaaaaattagctgggtgtggtggcaggtgcccataatcccagctacttgggaggctgagggaggagaatcacttgaactcgcaggggcggaggttgcagtgagctgagattgtgcctttgcagtccagcctgggcaacagagcaagactctctcaaaaacaaacaaaaaaaccatgtctcaggcagccaagagttgggacatcccctcacacgccctctagaaagaaccctctatatagcaagcttttagggtgaaccccatgcaggtggttcttatgaacctggtgaccactggaggttagataagcgtctacaagaggaggttatctatgccatgagcttggcattcagggtcaagcatcggtcatcagacagttttgcttgaagatggcattgcccttgtagcaatgcaggctctagagagcttcctgccctcttggagctgatgttccttccagcaaaggaaacagcaagcaattaaaataacaaataagtacattacagaagatgggcaaaagaacaatgaaaagcccctcagggtggggacaggggaggggaggggggcggccaggcaggggcggcagtttctaaataggtggtagggtgggcagtattgacaggctgacgtgtgagcagggacagggaggaggggagaggtctcgccacagggacatctggcaaagagcgttcaggcagagggcacttgaccctgaatgccaagctcatggcatagatagccgaggcaggcatgcaggcactcagagaagggacacgcccggcttgcatcttggaaagctgcccctactgggaatgactggcgggcaggagtcgaagtggaaaaggagagcagaggacactgcagccatccaggcgaggggtgatggggctcagcccttgtggtcaccttggaggtggggaacagaggccagattccaggtcttatacctctgcgcctttgtacacgctgttccccttacttggttgcccttccttcctgtgctggtgttcagatgcccacttctccttcatgatctctcccagcctgatgctctgagcccctgccatttggcacagccctttagagcgcctggcacagggcttcctagcagattgttgacatttctggctccactgcccaatatcaggcccaagatcgggtgggcaggttccacgtcctctctgtccttgggttgcagcgcccagcaggaggcagcaatggagaactgggtgcaggagggacaggcccacccaggctcatgcctggacttggccttggctgccctccagctcccctacccgacacccgtcaacccggtctagattccattccagagaatgagcattcagctgttctcccaacccaccctccagcccgcatcgctgcctgcccccagggaagggaacccacagggaatggggatctccgctcacacttaccatgggggatacaggggtgttaggatcttgcaactgagctcctaacacccacccccactgccacccccacctcccaggtccctgaagaagtctggtgacatctggctggacgcctacctccatcagtgaaggcaacacccaggcgggcagagaagggctcagggcaccagcaaccaagccagcccccggcgggatcgatacccccacccctccactggccagcctgggggtgccctgcctgccctcctggtactgttgtcttcccctcggccccctcacatgtgtattcagcagccctatggccttggctctgggcctgatgggacaggggtagagggaaggtgagcatagcacattttcctagagcgagaattgggggaaagctgttatttttatattaaaatacattcagatgtattatggagtggagtggtgaatttgcatgagttttgaagctggggtctgcccagactccccaacagcattcaggccctcggccatcaatgtgtgtgttggggccggcggcggggttgagggggagcgctaaggagctccctttagctctagatgccctgggcctgggagcccagggatgcctggactcggacctgcccgagggcctattcacttcctattcatgctgggcttcaagtcacttgacgcttctgcatggtgggatgagcgggcccagcagatgaggacccagggctgggggccatgtctgcggacgcttctggacatggactgggaaagacggttgtgcctcttgacctgcactggcctcccacagccctccatgatggggggcctgaaagggccccgcgcagcgggccacctgctgatcttagcgccacatctggcatcacaccagtggtggtggtgcagcctgtgcctggtggcccaaggaggcaacgtcgatctccctcaagcccacctgggaccaggtgcttgtctgtagttactgcagtgaataggctggacccccgaggcatggccattcctgtccctgagtccctggagtcaggtcttaggctctttgtctggcagtgggctggactgtgcctgtgggtttcggacagttctggggagggctttgagttgcctcttggggcacccagaattgggaagaagatctggctggaccaatcagtccccagcatccacacagcctgacagctccaagctgagctgagggtttcatctgaagtgtcggcagtttgaaaaagaaagctgagtgaggatttctatgaggcctttctggagtgggagctggggtcgccctaccagctgcaggggttgccccctactttttgggcttccattggcctggactgggttctctttgggaggtggaaaaggcgcaaattctgccaatttttgttcagcccctccaaggcccatcctccgtgggacggagctggaggggaagccccactgccccatcaacccgccccctactccacacacatacaaggtggcgctgagtgttgctgcccatgaacttctcttccgagacagccagaaagctcctcagtgctaaagctgatcaccgtagtctcacacctgcttcctctctgtgaggaggggccgtctgcacattcccatggactcttgcggctcttcccaggggctccccttctagaaagttctctctgacccgcagggctcctccccttccctgcccagcctgtgactagggtctctgtgacagcacctggaatactgacatcatttgctgctggaggctggtggcagcccagagcctggcccgggagaccctggggtgtgttttctgagaggatgacagacagggtgtttgggtcctgcttccctcaccctgatttctggggcaggagagcactgggggaggtcctgttcggctcacataatctcccagacccaggagcagacagcccaaagctccctgtggcctcccggcccagggcagtgccagcagaggcctcctggtagggccagggaagcagagggtggcagccccttcagcttggttgtgagtgagatgcctgccctcctccgggtgccacccagccccaccagatccactcaagtcagacagacttgggggtggggtggggtgggggcaagtcctgtttctgccaggacgcaggctgtgtgaccttgggggagttccttgaccccgagcagcagtacctagggtgatggaagaaaggctcttagcaaagggcacagcagcaggctcagtttattcacaaattttgtgcacacaacccaattccccaggatgaccatttgctctgtcacctagggcaagttcttttttgccttccctgagcctcagttttcagccgagggtaagattggatgctccttgaaaggtacttcctgcctcagacacacgcttctcatggccagggcgtgccttgcattcagggtctctgcacaggctggtccctctgcagggactcccccttcctgtcaccgcctgtttaaatcctgttggctcctagtgccacgcgggcgccctgagccagcgcaggctccgaatggcattccctccgtccacaccctggtagagatcgctgtgcgctggctccgaggcgctcgccagggagatgctaacaccgaggatccacgacagctgagcctgcagcgccacccaggggcgcccggagcatctgcgccagtgtggggcgggccgtgctccctactgtccctggtaacttgctttgcggacccctgggaggccccgccttcagcagccactcctagatttctccagaccacctgggacccatcactggcaggggaatctttgctcttgtcccactgtcccccatgctagatcccctgggaacaggtcaccctcagtcctgagctgagctcccccttctccatctgtaggtctcctagtctcagaacaaaggcttagggcacaggggccaggtttgtaaaaggaaagaggctttggtggaacctctgaacctctgagaaaccgtgttccttttttattgtctgtacaagaggcgtgggcccggaggaaaaacagctcccgagggaaaccataaccgcagtgttggtttgttcctttgatcatcaacatttgctacgggtctcccagcccaggcagatgttggaaatgatgatgcccaagagccagcccctgcctggtgtgttgggagtagctggaggggagcagggggtcaacaaactcttttgtgacgggacaggccatgggtttctcaaggttcctccccccaccacactatgtcctcaggcaatgagccaccacaactactgggagcttggcctattccaagctcttggctgctgtcactctttctcttggacacttgctcttgaatgggacgatttagaagaaagacctgaatgcctttaaaatccaaagcaaagtgtttgtgatggtggaggacgatggggacgtgatcctgaaatctcagcacgctggggggctgcttgttccgtgtatgcactggccacatgaagccagtctgctgagaaaaggaaaaccagtcccgagggcagtggcgtttcagcctggggcaagccatccccacggcgccccatttccctctcagatgttggaacagggactctttgagaggcagcttctttggccagaggggcacacctctcgggggagggtgcagcctggctcgctgaggagtcccgatgggcccaaggcactgtgtcacataagcaatggccagccactcctgatggcagcccaagcccagccccagtggctgccagctctgccctggtccagcttggtaaaggcttcctctcccctccgagtaggcacgagggcttcggagtgtccagccagacaccccgaggatccgcctgtggtgccacagcaccctcccccgccccacacacacacagcttagacttggggcgctgcagatgtccccgctacccacaaagctgatacccttttatctgcgtagctacactgcccttatctcctcctcagagactaactgccctccactgcccccactcctccagccagccgctgggcctcctgggagctgtctgacatttgacgtgatgggggcaaggtctgggaaccagccctttctgtgcaggagaggtggccaggagcctgcgggttaggagcagggtcctgctgctgtgtggcctgcgcagtcctgtcctctctctgggctcagcctcttcgcccatgatggtggtgttggggtttgattgctcagggccttgaatattggggcaccatgactttggcaggggatagggattagaaactcacaattctgggtgtgttggcaagggggtcagctgagtacagggacaggagggggcggttaagcagagagcagatatgaatgtcttcagcttcttgacccagggaagtattcaagggcaaggcggggctgggtggggctggggaagtcagagaagctccaagtgcccggtgaggctaggccaagatttatctggtgccctcatagccccagcgtccatctggcctccagtatccccaattccaagccccctggttgttatgggtgatggacccatggatttccaactggtagggttgggaggcctgggctggtcgccatcctggaggcgggtcacaggcacagggcagagggtgggagccgtgcctgccagggtcttgtaaccttgaaggccactgccagcgggtccaccaggagggcaaggcctagggtaagcgggtgttgagataatggcatccttggggcccctctagcctgcccctgtggactatggcccacagggccagggagggcaaaggactccccagagccacttggtgaatctggggtgagtcggccacctcgctcagggcttctgtaatgccaggccctactcaggacaccctgtggccactggggagccatacgtaccccagccagtctgctggctgtccctacctggctggatttcggccaggcaaagcgggggtcaggggaagcaggcgggggctgaggtctactcaggagccctccccagccctgctgggagcagctacaaagccaaggggaggccccaaggtgttaactagccagtgcctcttggcccttccttggcactttcccaggatcagccctgccaggaaagccagcccagagacgatgacggagcagcatgggggtccatgggagacggactgtacaagtgcccctggcatgttgctttagactcttcccagcctctggggtcagacagacctaggatccaatctctgtgcctatgaactggtgaccctgggctaggatgatatcagcccccccgacagcctgtgggttctgaatgagccattgcatatatgggcacgggagccacaaaaagaatcatcagcctccagagccttcttcagcccccttttaatttaatttaattaattaatttatttatttatttgagatggagtctcactctgtcgctaggctggagtgagcgatcttggctcactgcaacctctgcctcccaggttcaagcgattctcccgtctcagcctcctgagtagctgggactgcaggcacgcaccaccatgcccagctaattttttttttttttttttttgagacggagtctcgctgtcgcccaggctggagtacagtggtgtgatctcagctctctgcaggctctgccccgccggggttcacgccattctcttgcctcagcctcccacgtagctgggactacaggcacccgccacctcgcccagctaattttttgtatttttagtagagacggggtttcaccgtgttagccaggatggtcttgatctcctgacctcgtgatctgcccgcctcggcctcccaaagtgctgggattacaggcgtgagccaccgcacccggcctaatttttgtatttttagtagagacggggtttcaccatgttggccaggatggtctcaatctcttgactttgtgatctgcccgcctcagcctcccaaagtgctgggattacaggcgtgagccactgctcccggccttctccagccccttccaaggaggccaggaattctgtttggcctggcgctctgtggaagctggctggcccagggatgggagggcagattgcacttggggagacagctggggggggaggatgttaggaagagtctctgcaagcccctccatgccaccctccttgggtaggggtcagctgctgagaggtggctctcagccctgttttagaattgggctggggtcggctgctgagaggaggaagatgggccaatgtttttgggtcatttccaccaagttccgggccccagaatgaatttcagaggcagcagggagaggcgggtgggatggccacaggggagggaggggatacagagagatgcaagcatggggacccctcctggtgcccaggcccagctagaagggcctcatctatcacccaataccatggcctggcattggcgtgcaggaaacacaggaagtgagaataaaattccttattttatttcaaaaaatgtaggggtggggaagtaacatgataaacattacgatcagctccctatgggttcattctgcctctgcgggggtcgggggcatacagtagctggggggcatgccattgccatggcaacccagatgcttagatgcaggtccctcctggctgcttagagctggggggactaggcgccctccccgaaagcccccattctgagttgttggtgcctgcccttcccctgaatctaagaactgattagtgggttagactgcaacagcagctcaggatcctcccaggacttccctccctcccctctcacttgcccgtcccctcagctaccagcacctccagcccccacctcctcctcttctcagctccaccctggtcctcatgaggtaccccctccccagcccctcagggcagcctcctcctgagactccctcccgctctgcctccctggccctccctgacagtcagggccaccgaggcaaggccatgtggtgaaaggcagattgtcacaaggcccagccctgccgccccctcctatcagaatgcatcctggagcaacaggttaaacacagtaagggcaggttcagacaggagagtgcctgaggcagcgccgtccacacagcagccccgagatggggagggctgggacgagacctcccagctccagtgccctcctgcagcctgcagggcccacgtcccctggggccaaatggccagggattggctggcactgcccagctgataacagagcctttggagaagggtcagattgctccagaatcttggacctcaggacaccctgaggaaaagctggagggtgggctgagcctccaggccagccggcccctccctgaacgtggccactgcctctgctgagtcacaagagacgagggactccccctttggtcccaaggtcacaggctcaagttggggaggcggtggaatggggcccgtgaaagcccagggtcagagcactctagtgatggggtggaggactcttccagggcccaaggtttgggctggctgtgcccgcgggcctggggccctggacatcttaagagaggcctcgggtacttaaccgagctgcaggagggagacccgagctttgtaacaaagcaggcctctctatgaaagggtggaccaatggcagccgtcagggagagtgaagccaggccgggagggtcaggggccctgcccgactaggacctgcccctatgaaccccaagagcatctgaagaaccaaagcgggggtgatgcctagtgaccaggctgcaaggggagactcacaggccagacccatggaccgctggtctcctcccatctttaggggcagagagtggaggtaggacagagccacccccggtggccacctctctgctccttggaagaaggggctaggaggcactgggagggccatggctgatggctgacggctgagggagggcaggtcccatgagggcagggtgctatgggggagatgtgaagagaaaaaggagaggagaaagggagaaagatccaacatggggtccgtgagcagtgcatacaccagcctctcggacacccctcagaacaaaagcccatcattcctctggccatcaccccacctgcaccccttccccacggtgtcccgggggctgtggcttcatttgtgaaggtaggcgtccagccacagcttcccagacttcttcagggacctgcaaagttggggatggaccagggtcagggaccaggacgggagtggccccagggagtgcaagggctgaggaggccatcattaaggtggcatgtatgtccccttggccctaaccagggcttaccactgccactgggcctgtggggctgtcagctcagagcccaccaggaaccccacacagaaagggatggtcttctcgcagcccagggagaaaagcccaacagctcctaacacaggctcgggagtaaggcaggtgccctggtgggtgactgtgccaggagggcccagcccctcttgtgatcccactgtctgcaccacgggtgatcccagggcccagcgcctgtggacctccacccctcacctgatgatgtccagcagggccctcagtagcggcttctcctggtattcaatgccatgcttggcacatagagacttcaccagcggggcgatcttgtgtaagttgtgccggggcatggtggggaagaggctgaggagtgtgtagggtgggcagagcgtgaggactcagagggccatgctgctcccgcttcctcccaccacctgggcagaggctggctggggccctcagagaccctgtccacagccaggaccagtctcaaagtgtggctcctcgtgtgtgcccagtggggtgccacgtgtgtggaggggagggtgcagccctccgtgagcaggagggcgtttgtgctctatggagctgggaagatattgggtggccagagacaaagtgtcatgtttttcaaaaaagaaatgaaatagctggggaatgctaggaaaagaggcagtgaggtgaggcacggtggctcacgcctgtaatcccagcattttgggaggccgaggcaggcagatcacttgaggccagaagtttgagatcagcctgggcgacacggcaagacctcttctctacaaaaaataaaaataaaaaattaggccaggtgcagtggctcacacctgtaatcccagcactttgggaggccaacgcaggtggatcacttgaggctaggagtttgagaccagcctggccaacatggtgaaaccccgtctccactaaaaaatacaaaaattagctgggcgtggtggcacacgcctgtaatcccagctacgtgggaggctgaggcctgagaattgcttgaacctggtaggtggaggatgcagtgagccgagattgcgccactgccctccagtctgggcaacagagtgagattctgtctcaaaataaataaataaataaaagtaaaaaaaaaaagaaaaaattagttgggcatggtggcacgcacctgcagtcccagctactcaggaggctgaggtgggaggatgactttagctcaggcgttcgaggctgcagtgagccaagaaagcaccactgcactccagcccaggaaacagggtgagactctgtctctacattttttattttttaataaaaaaaaaaaaaaacagtgacaagaggtgaagcaaggacaaggggcagcagggcagtccctcggccgatgttccaggcaagctacgtagccctgccctgctagcctcacagggtcatgaggtgcgtgtgcaggctccataactacaaagtcccaggcccacatggagggaggtggtaaccactatgaccaagtggcacagcatgaggggcacaggatgaccctcagggagatggaataggggagcccctctcctgacctcagcggggctggctgggagccttgctctatattgggcagagaccttgtcagagagacaaagaggtggcccccacattctgcattctgcccagtgggatagcggccacttccctcccgctgtgggtctccccgcctccccgcagccccgcgctcactggtgctcaatctggaagttaaggtgtccactgaaccagtcgttgaagaaggactgctccacgttgcaggtggctgtcagctgtcagtggaggggatgagtgtcagggaacaaaggaaggcccaagggcccggcctcattcccagggggcccagccttacccagggtctccaggccacccgtccacatcataccgtcctgcctgatggcctcagcccacccagatgccccacctgtccctctgggggattcctgctgccctttcttgctcagccctgaagctcccagcaaaaggacacaggcagccccgggaggcccagcacagccctgtgttagcaggtgcagatcatctggggccaggacatggacattgggaccaggctctggtgaccggccctgacttccctacctggctactgaaccagtcacggtaggcctcctggtcaatctccatgacgatgtgattcatctgtgtgacccacacaaaccagtggctctccaggaacctgcaagagaacacagctcagcgcaggggcctccgggggcccagccacagtgggaacagatccactctcccaaccagcccaggacagcccctgccaaggggccaggatgggaggtccccaggcaaagtggagccgtccgagcctcttctcatgccaaagccatcatcagtgccagtggagggcccagggatgaatcagcaaagcccaggcacctgatgaagttgaggaaaaggagggctcccaggatgccgtagaaagggatgtaggtgatgaagaaccggatgtagtagctgacggcccaggccaggtcctgcggggaaagatgaagttaggtgcaacctgccctctcctctgccctggcaccaagtgcgtgccccagatgtgcacacacctcacactcaggcctctagaagctggaccgcagcccactgaaatgcaatgggcaactacacgccacctgcttgctcggggtttgcatggctgcctttgtttctagggaaatgctgagtgttttagcatcaggaagtgactgtgccctgtttttcgggagagaaacggaccctcctgctgaggggcagccatggggtaggggtgggggtcagcagccctctcgtggggcaagggcgattctgaaggtgcgcccccaacccggggccaggtccccaaccgtcccccagtcctgtccctcctcctcagcacctgggtctcctcctggcatctccttccagcaggacagagggcttggaggggtagggaaggtcagaggtaccatcgtccctatctcagagctctcacagcagaggctggcctccccacgccccactgtcatcctgtgtccctccactctgctctcctccctgcctctggctggactggtgtcagggactgggcttggacgtcttctctcatgtactgggagggtgacttcacggctccaccctgtccactgtctctctgccacccaagtcttgtctcaactggaccacagcatcagcttcccacagtctcctgcttgtcctcgtggccatggcaaccagagtggccttcgctccaagcaggtcccaactctcccctgctaaagcccccaccccacccagtcacccacggagcctcatggggttaagaacctgtctttactcagccccctgacctagcttactccctccccggggcctctgcatggcctgttcccactgccagggcgctcatcctgccatgagtttaggtatggtgacatgccacaggctcagcacaggtgtccgaggtggaaggtgaggccaagggactgccctgtctcacttcaaacgactgaagaacaaggtcacatttgtgtcttaaaatagatccccacccactggagagggggagactaggaagttattccagcggctcagacatgaaatgacagaggcctaaaccagaacccacggcactgacaaggaggtgacagattccagaactgtcagaggcaacggtggctgcatttgtgcctgcttggctgtggggaatctaggctggtcctaggtgatcaggggtcgggtgccagcagctgaacaggaaaggaggaagggagcgctcaggagaggctggagatggccttggggccaacattggccgagggcaggacctcacgttccaataaggtggccttcaaggtgaggagggaggcagatgtagccagttctgctcccactttccatcacattccttctattctgtgtgtgtggtgcaatagtgtgcagtgtatctacacatatatggaaacaaaatgaggatggggttacggattatttttttttggagatgggatcttgctttattgcccaggctggagtgcaatggtgtgatcatgactctgtcccaggctcaagccatacttctacctcagcctcccgagtagctaatttctgttttttttttttttttttttttttttttgagagggagtctcgctctgtcgcccaggctagagtgcagtggtgtgatcttggctcactgcaagctccacctcctgggttcataccattctcctgcctcagcctcccaagtagctgggtctacaggtgcccgccaccacgcccggataattttttgtatttttagtggagatggggtttcaccgtgttcgccaggatggtctcgatctcctgaccttgtgatccgcctgcctcaggctcccaaagtgctggtattacaggcatgagccactgtgtctggccttacctggataattttttttaagtttttatagagatgggggggtctcacttacttgcccaggctggtctcgaatgcctgtgctcaagtgatcctccagccttggcctcccaaagtactaggattacaggtgtgaaccattgccctggcccaacttttatttttaagagacagggtctcactctgttgcccaggcttgagtgcagtggtgtgatcacagctcactgcagcctcaaactcctgggctcaagccatcctcctacctcagcctccaaagtaggtagattacaggcgcgcatcaccacgcccagctttttgtagagacagggtttcgcccatgttgctcaggctggtctcaaaactcctggcttcaggtgatccctcccacctcagcctcccaaagtgctgagatcacaggcgtgagccaccatgcctggcctggacttcttttgagtgtagagagcaacacatacacagagatcgctggtttcaggggcagagagcccaagagatcagaagcagccaaagaggcggagcgagggggttgggaagaagccagcagaggtggggacctggaagccaacaggaagaactgcaagagggagtggccagtggtgtcagatacagcaaaattccaggagggtgaagcgtgggagcatctcaggatccaggacgtggccccgggaacagggaaccttgccagagcatgtaaatctccccgggaagcctccttcaaagatcttagggtttgtcacctctttcctctaagccagggtcccccaacctccacactattggcacctgggacaggctgcttgttgtcatgggcggttctccagggcatggcagggtgctaagcaccatcctggctagacgcccaccagatgccagtagcaccctcctctcctgaagttgtgacaattaaaagtgtctccggatactgccaaagggcagaacagctcccctgagaaccagtgccccaggtcataggtgcgctcctggctctgaaagccccatgggctcatcacattgtccccactctgccatccccttttaggaacatagggtgatttcttttcctgtttaatactttgttccttagggaacaagcacagtcaaaaacaaacaaaaaaaaagaagttgctcactgcaagctccgcctcccgggttcaagcaattctcctgcctcagcctcctgagtagctgggactacaggtgcacaccaccatgccaggctaattttttgtatttttagtagagacggggtttcaccatgctggccaggctggtctcgaactcctgacctcatgatctgcccgcctcggcctctcaaagtgctgggataacaagcatgagtgactgcgcccggcaataggccacttatgagttagaacgggattggatgctagaggcaaggagagggtgtaacatgtataaggagggaaaaaacataatggtgctagtctctaacttgagccactgggtggatgatggagccattcattaacatggagaccatcaggattaggttgtgggagaagaggagaggacttacattgaatatgttggatttgcaatggctgggacacctccaaatggagttagattggatatatgggtccaagacttggagataaaatttgacttggctgctcttaaattcacagtcagggtgaaaaggacaacttcagttagcaagcgataaaacagtaatcaacaggccgggcgcggtggctcacgcctgtaatcccagcactttgggaggctgaggtgggcagatcacctcaggttgggagtttgagaccagcctgaccaacatggtgaaaccctgtctctgctaaaaatacaaaattagctgggcatggtggcgcatgcctgtaatcccagctacttcggaggctgaggcaggagaattactcgaacccaggaggcagaggtttcggtgagccgagatcacgccattgtactccagcctgggcaacaagagcgaaactccacctcaaaaacaaacaaacaaacaaaaaacagtaatcaataaacaagtccacatttggttaagagaggaaaaacttccccatggctattggttggagcatgagggacaaatagactgctgagaaagactggattttaagcaagcatttcagaaagtgacaatttagtctttgataattttcagataaacaatttatctgccgggtgcagtggctcacgcctgtaatcccagcactttgggaggccaaggcgggtggatcacgagtcaagagttcgagaccagcctggccaacatggtgaaaccccatcactactaaaaatacaaaaattagccaggcatggtggccggcgcctgtactcccagctactcaggaggttgaggcaggagaatcgcttgaacccaggaggcggaggttgcagtgagccgagatcgcaccactgcactccagcctgggcgacagagcgaaacaccatctcaaaaaaaaaagatgacgtaattacaatgggccctaatgcaatatgaccaatgtccctattttaaaaaaaaggaaaaattttcaagaatccacttttggtgaagaaaaaaagaaaattaaaaaataggccaggcgtggtggctcatgcctgtaatctcagcactttgtgaggctgaggcgggcagatcacttgaggccaggagttcgagaccagcctcgccaacatggaaaaaccccatctctactaaaaatacaaaaattagctgggcatggtggccggtgcctgtaatcccaggtacttgggaggctgagtcacaagaattgcttgcacccaggaggtagaggttgcagtgagtcgagatcacaccactgcactccagcctatgtgactctgtctcaataaataaacaaataaacaaaataatttttttaaagagggatatttggacacagatacagatacaaatatgcagagagatgatgtaccgagagggaggacgaaagccatcaaccagccgatgagaggcccagaacagagccttccagagccctaaggaatccaccctgctaacacctcagttttggacttccggtctccagaaccgggagaaaacacatcgctgctgcttatgccactcagttcgtggtgctttgtcatacggtcttcgcaaacgaccacacctgtcatctcagccaacgcccagctgctccaacttcaaaccagggtgtggggcaacccagttcatgggactcagggcccacagggagcggggaagggagatggccacacttgcctctcatcctgctgcctttgagaactttctcgggggctctgcaaaagcaggggctgccccagtggactccctatgtctgagggagagtagagatctttaggactaggtcctggtggccccagagggagtcctttcctgagaggcagctaccccagggaggagatgcctggggccccacaggctccactggggcacacgaggaggcagcgtaggacccccgggtccccctgtcccagtcaccctcctccccatgccaagccagctgtgtccccaactcaccacccagttcttatggacgatcatggtcatgatgatctggtactggaaatacatggggatgagcagcggcggcccaactgcaggagagagacaggcgcttagaggcatccattccacgctgcctgtgccggaaggtcaggggaacccaggcccagcactgagtgcaggggccagccctgcagacgtgggcagaagcagccagggaccccggggcctgcagagaaggctgggagcccttgaggacgtgtgtcacccctgggactctctgagcctctgtgtccccatcaggcctgtaacacaggctgaggggtctgcacagcaaggctgctgtggcccccgcttctaacaagtttagtgtcactttctggatctgaaaaagatgtcaggtaggagggagagacacgccactctggggggaggggagggtcccagagtgatttcggggcgccgagcactcactcaggaagaagtattcgtgctggtgattgtagggcaggtatttcagcttcttcttgccgtactgaggagagaggagagatcatgagcacccagtagcctcagctcccagcctcccatgttccccaacccatcctgcagccaccatcccttctatctgctcagggcacaccactgtccctttcctgtcaatctgcaccctgggcccaccaagcctggggcccctccagccctctgggctccccatgctacagccagcagcggccaacgcttcctcagccctagccgagcactggcccgatggcatcgatcctctacaaggccggcacttctgaggctgaggctcagcgttaagccatggcccagggccacaggaagtggccctgactgggatcagaacccaaaaagctgactctgagcccatgtgacaggcactaaacaaatgtttgttgaatgaatgtgcaacagagcaactctcggcggagcataagcacccaggggagttcctaggtcaccatggagagctcccggagcccgcagtggcagggagaacctaggtaagggccccagaattgctgccagtcatcaggctgggagcatctgcctccctggagcctccctgtaatttacaagagtgaatcactcctccccagctggagcctaaccttgaggacagaggaggccacagcacagactcctcaggccacatctggctacctgaggtccccatgacggcaccggtttcttccccatcagagcctgcaccttgggcagcctgatgcccagaggctctaatggaggagggctgggctgggtcctgggcatcgtcattgtccaatgccaggcataggaaccacggccccaggggatccctggagcccttaattccatggtccagcccctagggaccagcccaccctgcacttccaggactgagaccaaaagatgccgctcactgagtgacacctgctcctctcccttgcagtgtggggaggctgggcttgcagccagcagatgcgcttgagccgactctgcctctcaccagtgctgagactatgtgagtcgcttagccttgctgagccttgtctggcatttgaatcagtggttggtaagaggagccaatgagaacatgggcataatgccaagtgctgaccccaggacactgcccgtcaccctccctatacccctggatccgaaggccagagatgcctcctcctatagtgtccagtcatacttattgcagtcaggaggtcaaagtgagttacagagggaagggaccttggatgatgcctaggccagtgcccctctcatccaggtgagtaaaatgattgtccaaatcacagggagagcatggattcctgagggaagaggctgtgggtgggaaccaggtccaccctgtccccaaggcttgcatcttggcgccaatggccatggtcacggcacaaccagctgaagaacccccagaaacagtccctttgttctgtgtggcctcctgagccttggcaaggatctcactcattcccagaaaggacggccacttgcaggaagactattattaaggccagggctgaggccggccatggagaggtccgagccagggaggcctcacaggagcctttcatgagtctccagtggacggaggtgctggaggagccagcactgcagacgttgctctcgaggtggccagtctcggggcctgcagtggcccacagaacaggcccctgagtcctgctctaagcttctcccagaggccagggagcaggctcatagccccagccttggcatgcagtgtctccagctctgctcaagagctcctccccaccgcatctctgtcccacagagcatcccatccctctcgggctgggccggctgtactcggaagtgagcacagagggcaacccaggcaggtcagcaggggccagggcatcctatggagggactgagggctggccacgctgttgtgggggcctgggaggcacctggggagtctgtttggagctgcatgtgcacagtaggcaccctgttctcatgggtgatggtggcctgtgggtggacaacacaggttacaggggctgcctctgctggtaagcactgctggctttagtgtgcgtcccttcaatgccccagaatgaccctcgggagccagggggtcctgcttgccaggcagcagcaggcctcagagtgggcctctgtgggacggtgagcaaaatgctcatcacagtcacgcacgtgtatgtacatgcgtatggtgacataccactacacatctgtgcccatctcgatggcctcagctgcagcggctctgctgggggatggccaatactcccctcccaaaccagaaagtacaactgtgggtttgggatacgaagccctgccctgtggctaactctctgctctcatctttcccacgctcagttctttgccagagctttgccgtttaagtcatgggaccagggaagggagggagaggtattttagaatgtagcaagctaggggggtgagtgcctggctgtttaattgatcagaaagctggggctacccaacaaacatatttcacaagggcccccaggactccgaagctgtggtttgcagccagatggtttgggttcggacagtggtgttgccttttccttgctgttaccttgaacaagtcacttcatgtctcttggccttagctgttccatccatgaaatgggtcgatgacagctcccgcctcacgggttaagcaaggattaagtgacgttgtgcacgcacactgcccatcacagtgcccggtccacagactcactcaacaagagtcaggcttcttcccaactgggggctcagagccccaagtgtggggagtggaggaccccacacatctcctcctccagaggagtccccgtcacacacacagagaaagcccaagaggcaaggaagacacatgactttcacctggctgggctgcggccaagggtgtgggtggcacacatggacctccccctgatcagcaacagtgccttcccaggctgcggttgacaggcagagacgcaggccaggggcaagggagggagtgcagccagccctggcggcggggctgactctcctgtcctcggcctctccatgcacctcaaggccaggcttggatgagggcctgggggatgccgggccatgtggaggggacctttcagctttggaacaaaatgtctgaggaatgacaagggccctccttgtccatcgagggttgggggaggggagctgtcgcaaagcccagtctctgcctctgggaacctgcaaactcacacacagagagaaacaggcggcacgacctccccagcaggagcagaatggcaaggtcccagtccaaggtccccgagagggcggcatgtgtgtcccaaggcgggatgggtggcttaagcctgttcatgaaggtctgcctcaagcaggaagcccaggaggttagcttcagacagtcagagcagcagaggtggtttcccggatgggaggaggaggaggatctcaggcaccgcacggcttctgaggcccctttacactgctaccgggataatggtctcaccagccccctcagaaaacggggatatggcaaaagaagaacaaaacaaggctgctgccaatatcaccgctattaaactcagctctgaaatttcccgtcaatgcaataaaacccaaagcagaaaacagagtggagctattagaaagaaagagactacttcaacatccagattagaaagaaagaaggaaaggaaggaaggaaggaaggaaggaaggaaggaaggaaggaaggaagggagggagggagggaagggagggagggagagaaagaaagagagagagaaagaaagaaagagaagaaagaaagagtgactacactttttttctgtttgttttgttttgttttgttgttgttgttgttgttgttgttttgagacggagtctcactctgtcgcccaggctggagtgcagtggtgctatctcagctcactgcaacctccgcctcccaggttcaagcgattctcttgcctcagcctccagagtagccgagactacaggcgtgtgccaccatgcccagctaattttttgtatttttagtagagacggtggtttcattgtgttagccaagatggtctcgatctcctgacctcgtgatccgccagcctcggcctcccaaagtgctgggattacagatgtgagccaccacgctgggccgagagactacgttttcattattttctaggatatgatcatctacccaggaaactcaaaagaatcaaccgaaacacaactagaattacgaagagacgtaagtggacactagcgggacaaaagataactatcccattcattggaaggccatgcaaacaaaaatttagaaaaaaaagaaaattaagataactaccccaatatccactgctttcccgagtactggagaacctccaatcataatgacaaaatataaaacatataaggattgcgttttaaaagaaacatccatgagacatataaagaagtacagaccttggccgggcacagtggctcatgcctgtaatcccagcactttgggaagctgaggtaggcggatcacttgaggtcaggagttcgagaccagcctggccaacatggtgaaaccccatctctactaaaaatacaagaattagccgggcatggtggcgggtgcctgtagtcccagctactcgggaggctgaggcagaacgatggcttgatcccaggaggttgaggctgcagtgaaccgagattgcgccactacgctctagccaaggtgacagagcatgaccttgtctcaaaaacaaaaacaaaaacaaaaagagagagaaagagaaggggaaaggcaccccactacgagcttccaatgagttaagtgccaaggatgaatgagtgtgagtgtggcccccaagtcatccagacggtggcctgggagaggacagacagcccagcccaggccaagcccgggctcaggagcactcactgcctcatatgaagaagcaatgccacctcatgggggtgccgggaaaactggccgactctggagaaaagtgaaggccgaacatcatcctacccatatcccatttggcagaagttaaagattgaaacacaaaaccttaaagaactgaaaataatatgtatgaagaactttctaagcacacaagaaatgaatctctgggtaaagtgaatatactttgctacatatgacaaaaagaatcctcctggacagcatcaataagaccaaaatgcagaaaacgaggaaaagggctttactgcggagcccgcgctattcacagttccacgtgctgggagccgcttggcagggctgctttgcttatctgtccccagagatagaagccctggccggcatccttgctctggagactgggatggtggcttgaggccctgggacctggccgccccacctggccctgctgtggtgtgtgggactggcatgtgacaagtcccatcagacccactgtcacttcagtcaagagaccagggttccttccagggcggccgggtcctgcgagagccagagcacaggtcaaaacaccaggaacccaggaagcaccaatcctttccccatgagtgtgagagcggggatttccacagaacaccgcggcactggctggggacttccaaacgccgctggtaactgaacaaccagatcctcacagcctcccacccctatctcctgccccaaagccagcgttccagaagtgtcgggggtgagaagatgtcgggaaaggagaggcttctctggccaccacgcacaagaaagacgccttcttgccagtgcagctggtgggactagactttctttgttggagacacagagaacatctgtcaggacagccaacggctctacattacaaagcctcgccgagaaaatgaagcctttgtccccacttatcagagggcctcaagttcatcagttctgttttctagacacctctaattaaagctggcaaactgtttcctagaagaataacaatagcctgtactttggcagaaaatggaatccctggcagcttagagaggcttccaaagtacagaactgtggctgatttcctgcgaattggccatgttacagaaaaatccacgttcctgctcagatagtctcacgggtggaaatgaaataagaagagggtgtacaaaccagaactggggagccaggctgtctcctcgccttgttccaagccttaggcgccaaggctgtcgggaatactacttcactcacggtgccactccttagtgagggaaaattggcctcacttggcagatgctgattgaaccctactctatgcatggctttgtggctcctaagatctgcataaaagcaacaaggatcttctaaactttcattttaatcattaatgtatttccaaaaagcagcgcatatatttatttttttcttctaaattaggtcccgacatagaggctctacataaaaaaaaagaatgtattaaataagaacatttttttgtggaacgcattggtggggcttttattcaaaagaaattatgggccaggcgcggtggcttacacccgtaatcccagcactttgggagggcgaggtgggcggatcacgaagtcaggagttcaagaccagcctggccaacatggtgaaaccccgtctctactaaaaatgagaaaattagccaggcgtggtggtgtgcacctgtaatcccatctactcgggaggctgaggcaggagaatcacttgaacctgggaggtggaggttgcagtgagccaagatcgtgccactgcactctagactgggcaagagagtaagactctgtctcaaaaaaaaaagaaaagaaaagaaaagaaagaaattatgaactactgacactcaatttgtctaccatataaaataatgtaggtcctgttatggttcagaagtacaacagaataccatatggctagagggagacgagacctgtctacatgaactgggggggaagggcatccacattcgcagaggtggcaagttgcaggatacaaggtagaatttttttgttttttatttttttatttttgagacagagtctccctcttctgtccccgctggagtgcagtggtgcaatcatagctcattgcagccttgaggctcccaggctcaagtgattcccccacctcagcctcccctgcacctgggaccacagacgcacaccactacacctggctaatcttttgtatttttcgcagagatggggtctcactatgtagcccaggctggtcttgaactcctgggctcaagcacttctcccacttcagcctcccaaagcgctgggattacaggtgtgagccaccacagctggcctaaaatttttgtttgtaaagaaacagatatatgcatgtttatacacatataaaaatatctagaagactgtatagcatcttgttaacagtggttaccctcaagggcataaaatttggggcaaaggggaggtttgagagactcactttttttttcttttttgagacatagctttgctctgttacccaggctggagtgcagtggtgtgatcatagctcactgtagcctcaacctcctgggctcagctcaagggatccacccacctcagcctccccaataactgagactaggcacgtgctaccatgcctggctaactaaaaaaatatgtatttttttagagacagggtcttgctatattgcccaggctgagactcgtgttttaattctggatatttctgtactgtttagaagtttataccaagtgtgttctatatttgtagtaataaaatgaactaatatgaaaataaaatggtatagtaaatggaaggcaatggcctagcagtccaaaggtctggggcctcaccctagactggccactaaattacgtgactctctcggctgggcacgttggctcatgcctgtaataccagcactttgggaagccgaggcaggcagatcatgaggtcaggagtttgagaccagcctggccatggtgaaaccctgtctctactaaaaatacaaaaattagttggcatggtggcacatgcctgtaatcccagctacgtgggaggcggaggcaggagaattgcttgaacccaggaggcggaggttgcagtgagccaagattgtgccactgcactccagctctgggcaacagagcaagactccgtctcagaaaaaaaactaaataaattatgtgaccctgaacgtgttccatcctctcgctgaccttcaatttcttatccactggtgaagcagattggaccaagccacgttgaggctcctcccagtgtacaggatgatgattctccaaataaggttttctcaacatgagctagtcggttggcgaccaagcttgagcccctgaaatcttgccttcctgctgaactggaacaagatttccctctaccctgggaaaaaacaagccagaaaatgcccttcctggcctaagggtaggagggagacatctaccattctaatgaggagctgtgtctgtatttacaggtgaggccattccacatacattccagccagaacaattcagggtacctaggagaggtatctgtgtagcaggagatgtggacctgcctggctgaatgtcagctctctaggcttccttccctgctccctgctcaggccaaacacttcctaggtcaacaccaaccccttagtcgtacctcgatggctgccattcgcccaggccaaacacttcctaggtcaacaccatctccttagttgtacctcgatggtctgccattcgcccaggacaaacacttcctaggtcaacaccatcctcttagtcgtacctcgatgggctgccattcgcccagaacaaacacgtgcagcatgttcacatcgggatccttgtggaagatgttaggcttggcgtggtgctggaagtggcgatgattccaccagttggcagaggcaccctgtggggagagaggggtggggatgagccatgcaagccaccagggaaccgagctcgcttgtaacaggcccttcttaggagcagttcccggaaccttcaaccctcggggatagcacttcaggcccccacaaggccagaatccagccctgccatgactgagctcagagcatgcgccagccccagatggagtgaagtcactttatctctctaggcttcagtttccctgatcataagacgatggtggcagatgaggcgtgctgctgagggaccacacggtgagcgctccagcaggtgtggcagccagtctctgcctctccgtcaccaggtgtggaaccagagctgtgcaaggtaaagccgaggtttcagggacagtgagaagtggtccctactatgtggcccagaaatctccctcctgagcgtatatccaagagaaatgaaaacatgtccacacaccaactcatagagcagtgttcacagcagcattcttcaaaagaaccagaagagcaaaagcaacacaaatgttcatcaacagatgagtgggtgaatgaaatgcagattatccacacagtggaatatcatttggctgtgccgtaaaacagaacgaatcactgacccttgctacaacacggatgagcctggagaacatgctaagggaaggaaggagccacaaaagaccacatatcacatgattccaccgacatgaaacgcccagaatagggaaatctatagagacagaaagctgagcagttgtgtagggctaggattggggtaggggagggagtgagggggttgggatgtgatggctaagaaacgtggggtttcttttgagcatcatgaagatgctctaaaatcgactatgatgatggttgcataaatctgtgaatataccaaaagtcattgatttgtctactttaaatgggaaaactggctgggcgtggtggctcacacctgtaattccagcactttgggagacagaagcgggtggatcacttgaggtcaggagtttgagaccagcctgggcaacatggtgaaaccccgcctctactaaaaatacaaaaattagccgggcgtggttgtgggcgcctgtaatcccagctactcgggaggctgaggcaggaaaatcacttgaacccgggaggcagagatcacaccactgcactccagcctgggagacagagcaagactctgtttaaaaaaaaaaaaaagtgagaactgtatctcaataaacgatttggagagcgcagttgtgctgctatgctgagggtgggtcctgagattcgtgtcacaccaggaaggctggagggagggctcaacaaacaactgctaacatgaacaagaagaactttcctgtttctaacactcaaataggatcccatgagacaagacacataacatggatatttcttttgaggccacaggtgtccgtctcctcagctcagagttatggccctcgacagttgcccagcgacagatgaaagaaaacacactttcctgaccctttggcatcacgactatcctggtgaactgttgccggatcaatgctttggctaagggtttgcaaaaaatgcctatttgctaaacaaacattttacttgggagatgcttttggcacacacagtctatggacactaatagccatgggtgggaacagcaacggacagctgtggcctttgcagtaacctcagggccctggaaactggcaggcctcaaaacccatgagagagagagagagagagaaaaaaaaaaaaaaagtcagagagtgaaagctcagaggcttcactttgggaggctgaagcgtgtggatcacttgaggtcaggcgttcaaggccagcctggccaacacggagaaaccccgtctctactaaaactacaaaaattatctgggcgtggtggcgggcacctgtaatcccaactactcaggagtctgaggcaggagaatcctgtgaacccaggaggccaagatcataccaacttcactttagcctgagcaacagagcaagagtctgtctcaaaaaaaaaaaaaaaaaagaaaagaaagaaagaaagcttagaggctcgaggaatcaaatgacacatttgcgtttgttgtcaaaaggaacaaaattcctgggaagaatcaaatggaaaaatctctggcacaaagaaactgaggagcaaggcatgaaacaagtaagcgtgatgtttggaggataccaacccagagatgtttattgaacaaacagatggaggaaagcaagacgggctgacaacaaggaggcagtgaggtgggcagtcccggttctccctggactcgggatgagatgtaatgaaagcattttttgttcatgctacttcctctgctgtgattctcttccattttttttttttttttttttgagacagagttttgctcttgtcgcccaggctggagtgcagtggtgcaatctcagctcactgcaacctccgcctcccaggttctcctacctcagccttccgagtagctgagattataggcgcccgccaccatgcccggctaatttttatattttcagtagagatggggtttcaccatgttggccaggctggtctcaaactcctgaacccaggtgatccgcccacctccgcctcccaaagtgctgggattacaggcataacccaccgcaccgggcctctcttccattcttctttgccaggtgaagccctgcttgtccttcaagagcccctccttccgggcaccgggaagcccgccttgcccaggaacaatggccagctccgtgttcccagaatgtggtgcagatgttgcctaccctaagccagctgccgtgctctgcctgggaggtgaaccaagagacaaagcccttgtcctcacggagctgcgagggagggtctggcctcatcacaccaaacccaaactgagctggggccaggaaagctaagtgtccacgcagctggagaagttggccaggcagagtgaggggtgctttcctgacagaggcaagagcctacgggaggccctgggagaggaagggggagtgtagagtgctccagaagccagaggaaagctcctcggtataactgtgaccagcagtgctgggtggcgccatatcagagcctgaggcaaaaaaaaaaaaaaaaaaaaaaaaaaaaaagtgcacttctggctttaatggaaacaaactcatcgataacattttcaaagcctactttttgcctcatttcattttctttcttttttcttttttcttttttttttttgagacggagtcttcctctgtcgcccaggctggagggcagtgatgcagtctcggctcactgcaacctctacctcccgggttcaagtgattctcctgtctcagcctcccgagcagctgggactgcaggcgtgtgccaccacgcccggctaattttttgtatttttagtggagatggggtttcaccgtgttagccaggatggtctcgatcttctgaccttgtgatctgccctcctcaacctcccaaagtgctgggattacaggcgtgagccaccgcgcctggcctcatttcattttcaatggaaagaattgctgagtttgatggtttctgtcaaccaagcgattagcttaaataatttttatgtttattttttatttttgagatggagcctcactctgtcacccaggctggagggctgtggcacgatctcggctcactgcaacctccacctccctggttcaagtgattctcctgtcttagcctcccgagcaccctcgcctggctaatttttgtttttttagtagagacagggtttcaccatgttggccaggctggtcttgaactcctgaccttaagtgatctacctgcgtcaccctcccaaagtgctgggattacaggcatgagccaccacacccggccaagccacctcgcccggtcttaactaatttctaattacattcaactgaagcaaaagtataataagttctgttttggtataaataaagcatttacacttagaatgttatgacttttaatacatcaacttcttcattgttaaatatttttttaactactttaatcctctggaaaaaaaatcaaccattaaaaaatgacacacgaacatgtttagagggttgcatgtttttccatttccctcagttcatcctgatctttatttaaaattttgatattttgttcattgtggatttttttgcattaattttgatttttttaaaaacatattgcaggccgggcgtggtggctcatgcctgtaatctcagcactttgggaggccaaggcaggtggatcaccttaggtcaggagttcaagaccagcctggacaacatggagaaaccccatctctactaaaaatacaaaaaaattagctgggcatagtggcgcacacctgtaatcccagctactcgggaggctgaggcaggagaatcgcttgaacccgggagacggaggtttcagtgagttgagatcacgccattgcactccagcctgggcgacaagagtgaaactccatctcaaaaaacaaaacaaaaccacattgcattaaaacatcatttatcttgataactgaatttgtctggtgtccccttagaatttgtctggtgtccccttagattttataccctaagcgagtgccttacttgtttcaccctaatcccagccctggtggcctgagatgaggctgcagaaagtctggtgatgtccatttccagatgcagcgcccagatggcactgggcctttcagcttgcatttatttatttagagacagtgtctcactctgtcacccatgctggaatgtagtggcaccatcacagctcaccgcagccttcaaatcccaggctcaagccatcctccggcctcagcctccccagtagctgggactacaagcatgcaccaccatccccggctaattcttttatttttagtagagacagggtcttgctatgtggcccaggctggtctcaaactcttggcttcaagcaatcctcctgccttgacctcccaaagcgctgaggttataggcgtgagccactgtgcctggctgaagtttgcatttcatcctaagtacagtgctgaactacgaaagagttttaacctcagaatcgtctttgtaaaagatcacactttggaagaaatgtccactgggcatgacacgggctgaaggcaaacaggtcaggatgtgaagaactcccattaaatcccattagcagtgcagccaacaggaagaagggggtcccagcctctcacagcacctggtaacctactcacaggtctttccagcctgtgctaagacatctgagttggcgaggcccttgaggacctccctgtagccagtcccctttttcccagtgatgggaagagacacagacctacaagatttgtccccatggctgtgcacctgccgagtgctagagccaatttcaggcaagcttgacctccgtgctctggggcacccctgagtgagccacatgtccatgtccttggcctgtctctgtgacacagcaccaaggacacagccagtgggggctggtgggccatgagtggagcccacatccccaagcccaaggaccctgtttgctgtcatccacgttctacatggagaccagtcctctgtcctggccccgtctcccgcctgacgcaacagccgtgctctggggcccctcaaagactgagggcaattggacaggaacaatcccccctgcccggcccctgcccagaatctggaagcaggacacagcccatctttgttaagtgtgtgggggctaacatgggtcaggagttaaatgttactttgccatactgaggagggtttgatccaacagagaagagtataaaatgaaacaaagcactccactatgtgcaccctctccctttgcccctgagattctggacagagaccaggttctcaggccgcttcaggctcagggccaggcaagctgctcgctgcgaaactggtgaccagctcaggggtggttggccaccagtgagatctgcagccggcaagccaagggccccgttgcggtctgggtggaagaggggataagctacaccccacatgtagctcgtcccttgccagggtgtggagggatggattctttaggacccagcttttctcaggaagcaggtactgttgggtcaggctgggatggggatagtctatttcagagagcaagttggcaaagactcattttcaaaactgaggagataacgcctgtcagatcagaacaaggcagttggcaattccagcttgtctttctacaaacatgctgagactctgtggtctgcttccttatctagggggaggtgagagtggaacttccttaactcctgcacttctaatgacttttgtcctttgggccagctgatcattccgtagtttggtgtcccctatctgaggccttataggatgacttttactttttgtaccccgcttatttccaaagagtatttgaagtggcttgagataaaagactcatatataacggaaggctaaaataaagataaaagcataaatgccagatgaggaaggagagaatgggggcaccaaaaacacagactaaagatagttgctgtttcaaatgctgctttgtacctcttggcttctgaggggaagagaggagcacaatgtgtttctttttcttttttttttttgagagatgggggggggtctcactatgttgcccaggctggtctcgaactcctgggctcaagcaattctcctgcctcagcctcccaggtggctgggattacaggtgcatgccaccacacccagcacaacgtattaaagagctcacatccccagtgaaaggaagcataccaactcatcaaaaaagatgctacaggccggatgcggtggctcacacctgtaatcccagcactttgggaggccaaggcaggtagatcacaaggtcagaagtttgataccggcctgaccaacatagcaaaaccccatctctactaaaaatacaaaaattagtcaggcatggtggcgagtgcctgtaatcccagctactcgggaggctgaggcaggagaattgcttgaacccggaggtggaggttgcagtgacccaagatcacaccattgcttccagcttgggtgacaagagcaggactctgtctcaaaaaaaaaaaaaaatactgctactttactgtccccaaacaaaaacagatttgttagatgagtccttagctaaggaacatcaaaaaatacaatccgctgagccaaaagacaagaaaggtgtgtgcctgtcttcataatgagtagtacaccatggctttgtggttcggacctgatccagagacagggctcaggaagtcagcagaatggagagtcaccatggccctcagcataggcacacctgccttgtcaccctgtagcctcagagcactgagcagagaggaatcctggtccctctgtctcaactgctgtccaacaggacagatgcccagggctgctgacacttacctttaagtggccaatgacgaatttgtggacaaggtggttccacttgggttttctgtagacagacaggtggccataatcatgttgcagccatccagcttgggcctggggagagagggtcacacgtgctgtcacagcctcagcaaacaggcaccaggcctctgtcagctaggggaagtgagggtgtcacgcctcacctgagaggtagcaaggacaaaggccgtgatgagggtaggaatccagccattgccaaagtaaaagacagtgaaccatgcaatgctctccagggcgatgatgtgggccaggaggaggaggaagaacacgtggttggtcttgaacaggttcatgtcctcagccgtcttcctcagggcccggaagtcctcagtgatctttgactgttgaccaagagcacagggaaaggagtcagccaccagccactctggagggaacatatgtctcgagctgccatttcaacagccaatgcacaacccagagaagctgtggcaagagggggccaagccacaagcctcgaccctccaggagtccctacaatagctgctgttaccacatgccccacacagccctggggcctgtatatttgtcacagctaggtaagagtgacagagaaaggctttgactcaaaagcttgcattttatacaccctgtgttcatagctctattcacatcaggaaaaaggtagaaacaacacaaagatctcgtgatggatgaatggatcagcaacacgtggtctatccatgcaatggaatattactcagccttgaaaagggaggaaattctgacacatgctacaatgtgagtgaactttgaagacatcatgctaagggaaacaggccagtcaccaaaggacaaatattgtatgattccatatacaggaggtccttggagaggccaaattcagagacagaaagtagaatggtgcctgccaggggctgagaggtgggagaatgaggagtgagtgcttaatggatgtggaatttcaatttggggaagatgagaactggatggtggtgatggttacataacaatgtaaatgtgcttatttgatgccactgaactgtacacgtcaaatgaccaaaatggttgaccacacttttttaaaaaagaaaactttaatcccagcactttgggtggccgaggcaggcagatcacctgaggtcaggagttcgagaccagcctggccaacatagtgaaactccatctctactaaaaatacaaaaattagccaggcatgatgatgggcacctgtaatcccagctacatgggaggctgaggcaggagaactgcttgaacctggaggcggaggttgcagtgagccgagatggtgtcactgcactccagcctgggtaacaagagcaaaactccatctcaaaaaaaaaaagaaagaaagaaaagaaaagaaaaataaaacttgcattttccaccaccaaacagagcaccacttgctctgcgcacactgttgggtcttgaggggttgagttgggggcgacacaaactagcgcaggagggcgagctgaggcaggcaggagggggctgtgagtcccgggcacatggagccagggaggcaaagcggagtcaaggagggccctgggaacacaatggcattgcgaggaagaaggaacttgggacaagaggcaggggcagggccggacggggaggagagtggatacaaggagaggagcggtacccacagggcatgaccaaggtgctatgaagggtggttctggtggtgcctggtgggagcttggatgctaaatggtgcaggatctgcagcagaaagggagagcagtggagagagccaaggagcaaggccatggacaagggagctacagggcaggacgagcagagctggggaagccgcaggccaggaggtgctggaggtgagagtgggagatggacccacttgcgaaggaggcaggaggggacaagcatgggctggcatgggtacagggcaggtgatctcatgtgccatggagggcaaggtgagaggaggggcattggcctttgaaggacctgcagggtggcccgcagctcatcaggaaagccagaggcaatgggggtggtgggggactggccaagagtccaggccgggagagaccctggtcctgccctggctctgctaaacagaggggtctggcccaggctggcaacaagaggaggaagagcttgctgaggccagggtgggacttccatgaccaccctggtcacagcctgtgggtaccactcctctccttgtaacaactctcctccccgtcctgccctgcccctgcctcctgtcccaactttcttctataaacggctccgccatttacatggagacttcattgttgaacaaaacaacagcccatgagacctcaggggttgctattttcacacatggctgtcctggaagcccagcacccaggggggcgtctgacctgcagacaatgaacagatgaccagggaatggtcattctttctcaaagaggtgccccggaccacacaccccaaagccactcttgtcatcaaatgacatttttcggtgtttctgtcctgtctttcccctagattgtcatctggcaccttcctggaaagggatggaggagaaggaaaatgaaactggccaggagagaggagacgccactagttgttgtcaaaccccggctcccagggaggctctgaggccctccctgaacacaggtgaaccacagtggctcctccaggacaaaagcacccctgcctcagccccagttactggtcatggggcaaggggagcctctctcagactcccagccacccccagcctcgtctccacccccacccaggttgcaagccagacttacgttcttgccgtggtcctggctgggctcctccggggccagttcaccaatcagcaggggtttcaagaacttgcccacgaattccaggtcagggtggaaggcgcggaaggcatcctggagagcagagggcagtgatgaggctaagacctgaactctgtctgctcttgggccccaaggaggacagtgctcaccagcaacagctccatgtgtgcacccagacaccaaacggggtctcctgtgatctggccccaaatgccgtctccagcatttttccaggacagagccctcagtgcccaacgccaatggcaacagccacctgggcttctgtgctggtgcaggcatgctacactccccaggggtttgtgaatagatgcataggctgcctttgggcaggtcgggaaatggtgaccctccaggaaggcgcaccaggcagacacggggctcagggaggacttgagcctcgactgctcgtgagctgagtgccttgcatggtgcacaaaccacaccacccaccatctcttactagttcctcacctacatgtccagggtggtcaatgaaaaggacaagaccgaatactaccttggcactggaaatgtgctgtgatgaagtaaataaaaaaataaacacagaattatgtaaaaagcgttcctgaaaaaaagcctaggaggatctaggctattattgcacatgttaaggtagctggattatgccttgctttattttcattactttccaaactctaacactgctataatgatacacattttaatctttttttcccaattataaagtaaaaacgtgctgagttttggccaagttagaaaaggcacagcagaataaagaggaaaataaatatcacccagaaagtggtcattattgctaatattttagcatttttccttccagcttttttctatacatattatgcatattacatgaattatctcataaaaaatctagtatttctattagagatgagccagcaccaggctcccctgaggggatgcaatagaatgtcccagtggtgaacactgtgtaatctgcatcaaatcaagcttccagacattggtaggattggcaaaccagtcaaactccaccatgagaaacaatcagaaaaatcaatatagctggggaaaaacatacaagtttgtggaaaaaacaaaagtacggaagcatggtctagattaaaagagactaaaatgatataaaaactgcaactcttgactggtcgcaggggctcatgcctgtaatcccagcactttgggaggcagaggcaggaggatcacttgaggccaggagttcaagaccagcctgagtaacatagcaagacccctgtctctactaagaataaacaaaattagccaggcatggtggcctgcaccaataactccagttactcgggaggctgaggcaggaagatacaataagcaatgatggtgccactgcactccagcctgggcaagagagtgagaccctgtctcaaaaaacaaacaggccgggcacagtggctcatgcctgtaatcccagcactttgggaagccgaggcagggcgatcacctgaagttaggagtttgagatcggcctgggcaacatggtgaaatcccacctctactgaaaatacaaaaattagccaggtgtagcggcgcacgcctgtaatcccagctgctcaggaggctgaggcatgagaatcctttgaaaccaggaggtggaggttgcagtgagccaagattgcaccactgcactccagcctgggcgacagagtgagactttgactcaaaaaacaaacaaacaaacaaacaaaacaacatcctgcaattctttaatgtgacaggctctcacttgaaggaaaaaagaagttataccaggtttttcgggagttgaatgagaaaaaatgaatatggaccagatatttgatcatatcaaggaattactattaattttcttaaatgtgacaaaggtactgtgatgatgttagagcatctcttccttttttctccggaaatgttgaagaccttagggatgtgatcacacaatgacgcagcttattttcaaaaggcaactgcacacatataaagaggaaaaacgcaaatgtggcaaaatgttaagactagtgaatcttggttgaggatacacaggtgtttgcttgttccttcaacatttaaggatgttgggaaaatttcaaaattaaaaagaagagggggccgggtgcggtaatcccagcactttgggaggccgaggcggcggattgcctgaggccagaagtttgagatcagactggccaacatggtgaaaccccgtctctactaaaaatacaaaaaaaaaaaaaaaaattagccaggtgtggtggcacacgcccgtaatcccagctacttgggaggttgaggcagggaattgctttagccagggaggtggaaggttgcagtgagctgagatcgtgccactgcattccagcctggcgacagagcgagactccatctcaaaaaaaaaaaaaaagggtcgggggaaggtggagaaagtgctaaccactcctggaaatcttttcagccccacacgtaaggatctcccaagggtaactgccagtctcccatcatctccttactgcattgctggcatcaagtcctttgcttggtctttgttctatttgtgtctagaacagactgacaaagcaacacttcgtgcaggagaaaactgggcccacggtttcttaaaaaatgcctgtgacccactagccgagccgaaaagggatggtagcagaggatcaggtcaagagtattttcagggaaaagagacgtgctattccagggccctggggaggcagggagaagtccctggggaggcagggaggaggccctgggggcaggcagggaggagggctggggtgggggggcaggcagggaggaggcccagggtgcgggcagggaggagcccagggttgcagtggtgaccagctttgctggctctgggtggggtgatcagtccccaccagagcctcagccgcctatgcaaaatgagcaaggccctgggagaggcccggaggagctgccaaagtcagggcccagggctgggcctgaaaaagccccttcattggtcctcctcacatcacaccacggcctttgagaaatgaacaggaagtccctggtaaggcagtttcctgagaagcagctgcagtggctgataactaatggattcctcttgtctcattgaaaggcaagactcaatggcttgcaaatagactcatctccactcctgctgcctccccaacacccgaaccctgcagtcgaggttccaactccaagggagcagacagatgacgagccctgccttgaccttggttgctgctcagccatttccagagggctctcgggcagcctcacctccctgagcccaggggtaatgggcatgcgccaggcagggagccaggagtgttgctcatgttactcccttaggcctcaagccccaacttctgaggtgaagatgcaggagctcaggaagcaaagtcctgggctccaggtggcagagccaggatcaaatccaggtccatctgcctctaaggactcttttctcacgtgccacacgcttcctgccgttttagaaaaccgagcagtctgttggatcagctccttgcccatggtcagtgtggcagctttccgagcaggcctggtgcggaccgcccttgaacataccacgctcctttccacaccagggctgcctccattcgggactcagcctcaacatcacctccaagaggcttttcccaacatcacatccaaaagagctctcccagccctgggccttccctgggtcattgccctgttagatcttcatagcagtcatcaaggttcgtcatcagactgcgtgacgtacccacttgtttatggcctgcgtcccccgctggagcataaaccccagttgggaaggcctgcacctgtcttgttcgctgcaataaacacagtgcctgtaacggggcctaataagatggctcacgagggaataaatggacccaggaccccacagctgcacacactctgatctcatactttcccactgtgcagtcatgaccagacacttgtcctcttccgcgtttcacacaacttggcttctgcctctggaacaccaaaagccttctccggcatccccacgctggtggttgctacagctgccacctgctgaggtgacgcaggcgagccacggggccatgggagtggcttgcatacatcagccaggcatctttaccaaacttcgtgaggcaggtccttttttagagataagaaatcaggcgtaggttggcagagccacctgcccactatcacactcgggaatgagctgagtagagtttgagtcacatgtggctaccttgagcattgcccgctgttcatacaaaggcttccctcaacatgagtgtcctcctccctgagagttgattatattttgtgtctctcccttcacattgccataaatgtgtctcaaacgctggcagaaggtttccagcacctgccgggttacagaaatatctggcaggtataaggcagaccaggattcaaggcaagggagggccaacccaaactttgtctttggaccaagaattggaaccaggctctatcctagtgtaacgggagagaagccagagactttccaggaagaggacccgggacatggggaagagaaaggattggtaaacaggtggagaaagcagagatgcacccgcctcggcagggcaggtgtgtgaggtggggaggtcagaacaccctgattctgaagcgcttgtcacacttcgctctttgccagttcctgcttctgccatcacccaggtctgatgccagtcaacttctccacagggacattttccctgcccctgccccactctgggtacaactcacagttgctcgccatccactgagcacctggtgccaggatttgtttatggccgtgcccatgtcctctggggagcaaggctaatctctgatcgaatgctgcacaactgggcactttgcctaggatgtgggaagtgcagcacgggcaagcacagggcacacagtgcagtaggtggcagccctgcggaccagaactttatggaacaagtgatctaagagtgtggagatgcacaggagggatcctcgcattctccagtggaaatgaagagcaagacagggatgctgacttcctttctgcagcagagagaggcaggcagggcaggaagcccctatgccatgtcccctccaaggaaagaagcaatggaggctggtggggcagtgctctgtggccaaagagccccgcagtgagagcctcccccataacacagggtccatgcactaccctgagggcagaaaggcagggctgcacaggagacaggcccctacaaaggcaacctgggcatgaagaaattgatgccattctccactttcatctcagaactgcttcctggggatgctgaggctacagccacagaaattggacagctcccacccagatctcagctggggagatggagctgccctccaggcctgggaattcataaagctggggctggaacccaggtctcctgcctctaaatactacaaccctcctgccccgtgcaaaggaggccagagttccactttcgatctgttgcgttttcacaagaataacataggagcaggttgaaaggtggaacaaacctctggtctcttctcaccttcccttgattctaagaggtcaccaatgcagaccgggcaggaacagttgctgagacaagggctaggggtagggggctgatgtctagaggcagagggtccagatccaagccccagcttgagagagagcagggggagcacatcccacagcttcaggtctctgtctgtgaataattcatctctgtgtctgggcccagctcagagccatggagacactcaattaatgtttgatgaattgtcgctgaagatgaacagttctgcagtggtgggactgctgtgaaaagagcagacacgctcttagggcgcgggtgagggttccttttgcccacagcaaggaaaaggcgagagaagcaccgcagtaccaaagggaagagatcagaggtagcaacaggaagggaaggaagctgggaggggaggacttgaggtcagattctgagtttaagtctgagcactgccacttaagccaggtttgatacctcagagcagtgagagatgcctacggggctgatccgagtatgaaatgaagtgatacatatgaatgtgttttgtaagttgcaaaaatcaagcaacttgcattattataggcaaggtcagggtttagcttctgtggaaggaccacgtaacagttgccccatccttctagggagatggatcttgactacctggatcttttgctcttcaaaaaaaagaaaatgccctattgaggcccctgattgtcccgagaatggcttccctgacttcgaggattgtcccaagaatggctaccttgacttccgacctgtttccagccttgtgttaggaatgactgcactgtgatgggctcagaacattgcctgggaatgttgcagggaatccaaactgtcttctgatcagtccctccccagactgtgcctggtccataaattgtcactccccatgctctgggggacaaaccatcaccccaaggggcaaagccacttgctcaacagcctaggcaagggtctctggatttcagtagcctgttcctgcttctctctttaggtcccctttccacatgccccacccaccccacgctgctcaaggcctttttccaacctggtcctggacagtttaaaaaaacaaaacaaaacaaagagaacccagctgctcactccatcatcaccatcattcaaatctgtatccccagttcgtgtatttcatgccccaaaagtcttattttagaagacaggaagctctggggacagggattgcttttacgtgttgctacaccaaataaagctagcatagatttaaattttttcttcaaattcctctttgcatactttccattctagctgtttcataatacttgttcttattcccgtttgcctgataacaccccattgcattcatctagtggttacagttgctgggtgctttgccacaaatcagtctcattgaaacaggtacaggtgtaccttatagatgaggagatggggctcagtcaagtgacaacacttagtggatgagcccagtaatgacatctttcttcaattctagatctgtttgcagccccggttggctcccaccctagcttatgaaagtaacaaagcaaccaacatccaagataccagatttatagtccatgaaagttatacagaaagcgctggagcaggaccagaaatgacgagactattacatttttatgagacagagaaaaggtcagggaagagtaggtcattctagtcctctgttaggagagatgtgagcactgatttttggagggaactcagtgttaaggtcaggtaagcactgagaacatccagaacaaggaagaaataaatcaatctgatatggtaattaaaccagaaaggtcaaggcaattgccagactaagcgttcacataagaaaatatgtttaacaatgtggaataatcagaccaaattcatcgtatttgacttttccttctggaaactttttggtgagggcctggacaggacaggaaccttctacaatttacctatgaaatcagaaacagaccagcccaagtccagcaacatatagtggaaagatcccagccaggatccagaaggtcctttacttaggagttacattaacccaacctcctcactgggccgcgtaaaggtccaggtgagatagcactgaaggtatgtgaaacatacccacctaagttctaaatagcatcacaaacccactgggcttaagcaatgtccacaagcaagtaaaacaggatgggactgaaagctgtagggaatttcagtatcgctgaccttcccaatcttagataagccctggccctgctggcccacaccacctgtccattgtccagcttgggttatggtggcctggtctggccttcccctaggcctgtctccatgagatgcaagaggtggggaagttaagggtcgggcctacacagcttagagagcaaaagcccaccaacagttgggcatcctagacctccaggtggaatgatctacgtcaagttcatccctcctttctgcctctctcctattcactttccccaatttctgtatcccatcagaccttttttctctgcatccaattcactaccaccaccaaaagccgccctttcttccctccttgcctctgttcttttccttctggcccattcgaatccatgggataccagctgcatccttaaataaatgccaggatttcagactggggtccccggtgcgggtagctggtgcggggtaatcactgagccacgcatttggtgggggtaaggtgggcagcaatggctccagagaggcccacaacctttaggagtgcaagatgagggaagggtgttcttggcaggatttaaaaagagagagccattgagttgaacgcccgagagtaacctcgagtgcagacggacctgttgccaagccagtctagtgctgctaaatccaccggctcaaggcctcactcgacctgggctttgcaaaccccaggccgttctccttccaccaatcccggacgccggtccccaagaaggccggctcgagcttggggtgagtctagataatccctggagcgtgggaacccgagctgctgggcggtttttcccaggtggccattgaggaacttcttagacaagagtcccagcaggagcgatctccggccggggacgagctttccttctcgccacccagtctggatggagagtgcgggacaagcgcggagtcccacacctggctgcctgcgctcccgctcctttcagcggcgcgcaggggcggccatcttccccgctgggggcgccaaagccgtctggcccgagcgcccctcttggggagtccctgcctccagacaaaccccgaggaaggggaggacgcgtgggtcccggcgcgcgcggtagatgcttgccctgttctccaccgctgggactttcaccgcagcgccgcctccccgggtcccagatccggtctccaccccagtcggcccagaggaggaggaggattggggagggggtacgagtgcaatagatgcactttccttccctacaggacgtcccaagctccattcagcgccggaggtctgtttggcccacggggagccagggatcctgactccgcctgcagcagagaagggtggctggggcgcccccagacccttaccgttgcatcttctccagcgtagtgcccgatgacccgctggccccccgggtgctggatggaccatttggtgatgttgtaaaccttgcggtcaatgaccagccacctgtcggtgcgcaggttatgcttctgaatctcctcccagctgaaggtgggcaccgacacctcgcgctcggcggccccctcgccctggttccctcccttccccatgctgcctgccgactgtgacgccccgtgcactgcggcctccccgcgccggctgctcgctgcacagacggctgcctcccagccggtgtgtgcagcccgggccctcttcgctttcggcttttgtcttctcctactcctcccaccgcgccccctcccccagccttctcgcctgcgctcgggagtgtccctgccttcctggcggaggatccctggcttcccagtgcccccaagcggtccccttcctccgcccctccctcagccctcccgctatggacttttgcctccagtaaaaactccccgggagctcagggcctcgacacctcctctgcccgcccctccggctccccccgcctcgggttccacatcctcccgcgttccccgccgcccgagtttccacagcgatcagcagagcgcctgcaccaatccggtcgcgtcgccccgcctgccattggcccaggaggatctttcgaaggccagcgggctggagcggcgggtccccggctcccccgccctcccgcgtggagtcgagccctgctgcgaggcaggctacgtgtccgacctcctccctcccccactctccggccccgggcgccggaggagatcctagaggagatcccggtgggggcaacgaatgggctccgcgcgctccggggcgcgtgcgcgcacgcccggcgctctgggggtttgcacctgatgccgacacaaagccggcgcggccaccagggtgccagcaagcggccgggcgggtggaccggcgggctgcggggcactcaactccagggccggcttggctaggtgacgcccttccttggcgcgcggcagtcgagactccagtatcccacattgtccgcgccatccacattctggcgcctttctgcaacctccctagagacacaagccggccttggattagagggctttgaaccctctagtcagacaatcttagaaaagaattgcggaacctctgctctgctttcttggtctgggcgccatggctgcggtgagggggaagggaggggaaggcagaggaagggggcgatgaggaactggcgcggtccttgccctggtctcagtaagctcagtctctttgggaatcgtggaagcagacacatcattgggcagtgatgttgtgcagactccagcaaataaagactgccgtatcgaagggataggaggagggttaggtcttttaggcgtggggcaagagacaggcccctcagaccccagctggatggggcggcttagtgccgggcgtcctgggggaaatgggcctgactgcatccggagggctaacgggacacgtgggaagtaaggatgaacagagagggtggggtgcacgaggcttgggaatcactagaggagttatagggccctcagatttcaatgggatttacaggtgcctgtgtgctagcacaccctaatcattagattctcatcacaggctgagaggtaaacaggacgcatattattacatctcacttgaaaatggagagcctgagattgagagagatggtcaaacgggccctgcccaatctaaatttcacagcaatgcaggggtggtggggggatcactctgcccaactggtggggttgtacttgggggggcagatgggctccctttcctcacattcacacagtccccaacctctcccatcacatttcatgctggtgtcagccctgagcatccttcattcactccacagactgcagacataaagacagtaaggcctctctgtctttgagtgtgagcagacatcccaaacaaaagccttctgtacaaaataagaggatgaagcaagacctccagagagtatggtggccttgaggactgtcaaacgttgacggaaatggaaccaagaaaattattttctcagaaatggattaacataccatatagataactttaatgaacatttgtaaagggtgtggagctcggagcagggagtgatagctgaaaggcagaaccagggagtatctcacagaggctttgaaggttcaggccctaaaagggagcacgtatgggtggcctgtgtagggtggctgagaagcgtggaccggccagggcctggggtccccagcggctcccagcacagtaccagccagggtaggtcctgaaaaaacataaaaacatgtgttgaagacacaaatgaatgaatgaagttcaaagaatggctccaatgaggccggcggtagatggggctcaaattgagaaaagccccagcagcctcagtaaggggtaggaagggaggactttaccatggaggaggcttggacatccgtaaagcaggtgtactgtgatcagatccatggtgtagaaagataactccagaggctggggctggactgggatgtacgggagaaactggggaacagtgatgagttcaaagatgagggcagtgctcgaggagaggggaggggaggcctgaattaagagagaactttagggggctgaccccacactggacactgccatgtgcctccctgccctctaatttttttttgagatgcagtctcactctgttgcccaggctagagtgcagtggtgcgatctctactcactgcaagctccacctcccaggttcacgccattctcctgcctcagcctcccgagtagctgggactacaggcgcctgccaccacacccggctaatttttttgtatttttagtagagacggggtttcaccgtgttagccaggatggtctcgatctcctgacctcgtgatccacctgcctcggcctcccaaagggctttttctttcttttttttttttttttgagacagggtctcactctgtcgcccaggctggagtgcagtggtgcgatctcagctcactgcaacctccacctcatgggttcaaatggttctactgcctcagcctcctgagtagctgggattacaagcacccgccaccatgcccggctaatttttatatttttagtagagacagggtttcaccatgttggccaggctggtctcaaactcctgacctcaggtgatctgcccacctcagcctcccagagtgctgggattacaggcgtgagccaccctgcccagcctagaatatcctttggaggtagaatcaagaccgcattagttggaggtacaggggcaggggtgatggtagagatgaaggaataagagaaataagtctgattctagcatttgagttgagcaaatgaatagataatgggaccatttaccaagatgagggaacagagttagtacaggggtgaaaaattaaaaattctattttaacgttatgtttgaaacacctaggctgggagcagtggcttatgcctataatcccagcactttaggaggccgtggtgggtggcaccatgcccagataatttttgtatttttagtagagatggggtttcaccatgttggccatgatggtctcgatcttctgacctcgtgatctgcccacctcagcctcccaaagtgctgggattacaggcgtgagccactgcacccggccaacacctgattctctcttactgcagaagggtctcctccatgtgacaaaaaaatatggctgtatttgctaagctacgctagcagaaataattctcccccattccctgctcccaaggattaattccagtttaatgggctctgcatcagatgctaaccattgggccactgttatcagacggctgagttactctattaggtgtaggtcataagccaagcagcagacctgggctttggggaacagggtctgttcctttttgtgggaagtcacaaaccaaaagcaattacagaccgctacagtattcctttcccatacctaccatgtgatgttagacctctgtctctgaccttcagtttcctcatgataaaaaggagacagtgatttttctttctttctttctttctttctttctttctttctttctttctttctttctttctttctttctctctctctctctctctctctctctctctctctctctctctctttttttttcccccaagatggagtctcactctatcccccaggctggagtgcagtggtgcaatcttggctcactgcaacctctgcctcccgggttcaagcgattctcctgcctcagcctcccgagtagctgggattacatggcatgtgccaccacacccagctaattttgtatttttagtagagacagggtttctccatgttggtgaggttggtctcgaactcccgacctcaggtgatctgcccacctcggcctcccaaagtgctgggattacaggcataagccaccgcacccagcggagatagtgatttctaacctatctcatctattttaataacgaggctcaaaggacacaaggtatgtgaaagtgccatacatgtattttcttaactagcaatattggtgaggtcaaactttaaccaagctcactagataatgatttattaatatgtggtgaaagtcataactatttttaaaaaatgaataattttcaacaacaaaaatggcatcaacttagtaagtgcatcaaatttagatgccttaaatgacaggctggggaccctatctaagaaactgggttaggccaggcgtggtggctcacacctgtaatcccaacactttgggaggccaaggtgggaggatcacttgagcccaggagtttgagaccagcctgggcaacacagtgagaccctgtctgtacaaaaatataaaaaattagttggatgtggtggtgcatgcctatagtcccagctactcgggaggctgaggtgggaggaatgcttgaaccgcagaggtggagacttcagtgatccatgatcgtgccactgcactccagctggagtgcaagacagagcaagaccctgtctcaaaactcaaataaaataagctgggttattatctctaggtggacattgataaaaggtatggtatgttaggtaaaactttaaagcacagattgctagtgctggaaagcatctggacaatctcttcactttacagataagggatccgaaacccatagaggtggacataatgtccaagattacacagcagtaggtggactagcaggtccaggttgcaggtgtctcaactacaatccttattctttccattctaccacattgcctcccttccttggtacattctactgaaacttgatggatccttctccaactctgaagtgcacagagaatagaatttgagatcttcacatcccagagtctagtgcttcgttgctgcatctttagtgctcatagtattggtggagaggtacttggtcaaggagctgtaggacaccattcctttcctgttctggtgataagaagtgcagtaaaactaaggaatgcatactaagtgctcgaggaatacctgtgaaataattcagcagtaaattggtaatttggcaacaaatgacaagagactaaaaatgttattacctgatccactaattacacatgtagaatttatcctaagaaaatgttcagaaatagaaaccaatatctatatacaaaaatatccatcgcaacatttatacaagcgaaacttctacacaaatgtccaacaatagggaaaaagttaagtatattgggagtatatatatgtgtgtttatagatatatgatgacttactatagtgaagtaaatattctcattataaaattttaagcttagcttttttgttttattttaaagagagatcatttgtactggaaagttacattaaaggcccagcaaaatgcttacaacaacgcctagaggactccagacccattccccgggcaatctgaagatctgggacctacctacccaggcctcccttctcccacttaatagaggcaggtctgagggcctgggaggaagaaggcaccgcagagaagcaaggacaacagccttctcctctttgaaccagggtggccttataccaaaacatttattgaactcactgctaaggaactcatgtagagaggaactaaaagttataaataagttctggggtaaattctagccccaaatatactaaatttcatgtgtggcttcagctctttggatctgtcaccttgtctataaaacagtgggtttaatatatctgtccctaaggcatctatattctatacaatgataagaagactgggccgggcgcggtggctcacgcctgtaatcccagcactttgggagtctgaggcgggtggatcaccaagtcaggagatggagaccatcctggctaacatggtgaaactttgtctctactgaaaatacaaaaaattagccaggcgtggtggcagacgcctgtagtcccagctactcaggaggctgaggcaggagaatggcgtgagccctggaggcggaggttgcagtgagccaagacagcaccactgcactccagcctgggtgacagagcgagactctgtctcaaaaaaaaaaaaaagactgcattaaggaaatcccgtgaattcctccatgagcctgcctctgccccatcccaatctcccacactcttagaatgcagcaaaatgagagtcctgtttctagctctcgctctgcctctaatagaggtatgattgggattctccctttagtttaagcactatatgtcataaattatttttaatattacttaacattaatctgcagaattattacagatgacttttcttaaaacaaagactgattctgtcaactttattagtgcctactgtgttgtagtcactgcacccccataagttatccaatttcacagaaatccagatttttcaaaaatggttttggtctttaatggcctgaagggctgctactgaggggaggctgcagcagaggctgagcacaaccggtattgcttctcctatatgtgttgactttgtaaaggatccaggctattggccaactattatgtttaggatcttttgttaaaatggatcaaaatttgaactcacaattcaggttattccaacagccactggcagttaggttattcaattatggcttcattacaatcggcattaaggtctttttttttcttttctttagagagaaaatggtgggacagttaggaaggggtctcactatgttgtctaggctggtctccaactcctgagctcaagtaatcctcccacctcagcctcccaaagcactgggattataggcacgagtcactgtgcctggcctggcattagggtcttaagctcatttcgttctgttccttgaggattaatttggccagaacagttagtattcacaagtggcaacctaaaattaagtatgtgattcatatccaggatgaggcaagttcccttaggatcaacagggcctgcaaggcaaaggtttcctttagttgacctggatatgggtttattgcagtctgtgtgaccacctgtgtaggtgggtaaggagatgagagggcaacacgacatttgcctagtggcctataggcttactcacctgtattttttcaggttgaaatcatcagttgattcagcaaattttttatttatttatttatttagagacagagtctggctctgtcacccaggctggagtgcagtggtgcaatctcggctcactgcaacctttgcctcctgggttcaagcgattctcctgcctcacccccacaaagtagctgggattacaggcaccccccaccacacccggctaatttttgtattttagtagagacagggtttcaccgtgttggccaagtgggtctggagctcctgacctcaggtgatccgccctcctcaccctcccaaagtgcagggattacaggcatgagctgccacgcccggccaattcagcaaatttatgtgggattccacctagaactccaaaccaaggtgctctgaatatgtattggtagtataaacagaatccacagccctatcctggattataagctcgttagggaggtagcaaaatacatgacactgacctaagaacacatgaaaagcaaagaaacatgaatgcaaagtcatgtcatataagctgtttaaatcctgagtaagatgaatttaatttgcatctatcctactgacctataatccgtgactcacttgtctctctcctccagtagacatgactaggcatgacccatatagtactgaactttgtattcccagcaccttaccaaagtaggtgctgggaatacaaagaggagacaccccacaaatgttaaataaaacacttaatgaatggttctaggtaggtggggttgatcaaggaattatcttacaagtggtatgggttttttggttttttctgaggtgcagtctcaccatgttgcccaggtgattctcctgactcagcctcccaagtagctgggattacaggcactaatttttgtattttagtagagacagagtttcaccatgttggccaggtgggtctcgagctcctggcctcaggtggtccacctgcctctgcctcccaaagtgctgggattacaggtgtgagccaccgcgcccaacctagtctttttatagaacagttatctctgtagccaaacttacatcatattatttaattttccttgattcgggggaggggggagggatagcattaggagatatacctaatgctaaatgacgagttaatgggtgcagcacaccaacatggcacatgtatacatatgtaacaaacctccatgttgtgcatatgtaccttaaaacttaaagtataataaaataaaagatttacataaaacatttttccttgattctgtattaaaggaaagatgacattattttcaatgtctgcaaaatatttcactgatgggcatttagagtgtttccatttcccgctatcatagatactgctttaatgaatattttttgtttataaatagttttctttttttgtgtgtggatatagaatcttgctttgttgcccaggctggagtgcagtggcacaatctcggctcactgcaacctctgcctcccggattcaagcaattctcctgcctcagcctcccgagtagctgggactacaggcgcacgccgccacgcccagccgatttcttttgttcaggctggtcttgaactcctgagctcaggcaatccgcctgcctcgacctcccaaagtgctaggattataggcgtgaggcaccccgcctgacctataaatatttttctaagaacatttccttaggctatattcctaaacatggaattattgggaacatttttatttttctattttttttcatctcttcagtattcaaaacattcctaaattctggccgggtgcggtggctcacgcctgtaatcccagcactttgggaggccgaggcgggcagatcacgaggtcaggagatcaaagccatcctggctaacatggtgaaaccccaactctactaaaaatacaaaaacaaaattagctgggcgtggtggcgggcacctgtagtcccagctacttgggaggctaaggcaggagaatgccatgaacctgggaggtggagcttgcagcaagctgagatcaggccactgcactccagcctgggcgacagagcgagactccatctcaaaaaaaaaaaaaatcttaaatttctatataagttgtcaaactattttttccagtttaatcaacttacacttctaccagcagtatgagagcttttatcccactgcacagtcacataggaaaaatggtttatgtaaaggacctctcttctgttatttaatacccatgaatttcttatatagttgtaatcagcgaacccatactactttgggttctgcttatttcacggggaaggattctatatctatcaatatagttcacattctagccatttaaaatcattctttaattcttcattgtgttaacagatcccaataagcttggcgattttcttattgtcaggactcgggtttatttccagtttttgctattaaattggctatttctgcatctttgcacagtctcccctactttaccaagagtgaaactgcttgatcaaagaatagaaaatgttttgtagctcgcattagacactgccaagttgttgggcaaggtttttaaaaaaggaatattggctgtacagaggtgcagctgtgtggaccatcattcctgagcagggtccaatagcctggcatcttacctggaagtcaggacatctaaacttccctatgggaacttggtaagccccttccccatttcgaacctcaattttcttatctataaaatgaagaatttggatggaatgaattaatccttttctaccagaaatctagccatatttcacctagtctattctgtatcaccctctcctgactcctacgtgctcagaatctagctcagtgcttgggacagttatgtttcctttccctttgaagtgcccaaataccagtgtaatgagaaatatggcagagcctgagagttcagagcacaggccagggtcaaatctcagccctccacttacaagctgtgtgacaaaataacctcccccgggctcagtttcttcactgtaaattaggttaattgttccaacctcatagggttgttaggagaattaaatgagttaaggtttgcaaaacgctaagaacagtgcctggcacacagtaagtgctttataaagtgtttgttgaataaataaaattttggacctaaactctgggtctcttcaggactgcaacagctttgtaactggcaaccccacttttaggtgcgttcccactcctctaaaacccagagatctaaatgccaaatctctctgcttaaaaagtctcccagggctcctaggcgcctccaggctagaacagaaatgcctcagcttgaagacccaggcttttcaggtgaaacacctaagggtcaggagacgctaggatcatcactcaaggatcccagtgaatttttccaaaatacaataaaaataaaaacaaaaagaggcaaacagggttataaaaattgtggggcattttaaatgtttcattgaacaaattaaagcattaacagccctcccccaaccaccaccaagcccaagagaccgtaaatatgctgttcacaagataactgcaactttcaagggctctcaggctgctacttcgggcagcacaattggcggcacgacgtggcaagcaggcagtagtttccaaccctggagggtcagcgtctggagaccccggccaaggcatccacagcctaaagatgatgtccgcgaccgcccgggcagcctcgtgcacggaaaaacctcaaccccggccccgcccacccttcctgcggccaccccgcagccctggcccctcagtccatccactcctgcagcgcggccccgcacccagggcctgcactagaaccgctgttcctaccgcggcgccccctgggagccaacgccgcgatgcccgcctgacgtcaggaagtcgaatccggcggcgacgcctttagggagcccgcgagggggcgcgtgttggcagcccagctgtgagttgcccaagacccaccgggggacgggatctcgctccccgcgccacgaggctcggccaatgggaacgcgcgctgcgaggcccgccggtctgccctgcggtgctgaaaacccggcgcgcaggcggctggctctgggcgcgcgccagcaaatccactcctggagcccgcggaccccgagcacgcgcctgacagcccctgctggcccggcgcgcggcgtcgccaggccagctatggcccccgacccggtggccgccgagaccgcggctcagggacctaccccgcgctacttcacctgggacgaggtggcccagcgctcagggtgcgaggagcggtggctagtgatcgaccgtaaggtgtacaacatcagcgagttcacccgccggcatccagggggctcccgggtcatcagccactacgccgggcaggatgccacggtgagcgcagccaggcgggggcacaggagagggcgggaccggaggctgagtgcaggggagacagagttacgcactccgagccaaacaccgactaattcggaggaaagcccggaggcgcctgatcatacctgttgcccggtgattgggtgtcctgcggatgcgggatgaaaaggcgggagagaggcctggagaagtggagtctggggagtggggatggaggccaacaacacgcacacacaaacaaagggtcccgcctccctgccgtgcattccatctgcagccccgagcctcaggtctctgggcggggacagaaccccgagctgggtaggctaggagggaggagagcaaggatgcaggccgcctggggagggagggggtcagtggccaggggagggagtcacatcctgtctcgatggctaggagaggcagcgcagccgcgtctggacctaggtgccggtctccactcgccagcaggagcggagagggagcaggaaaggagcccattctcgaggatggggctgaaacgggaagcttggggagaccgctgccttggggacccctgcgtcgtgtgaagactggaggacgcggaagggacagcgctggccggggagggcaagcggccgctggcgtacataagggattgggaatggcatacacttagcgaggacccccagagctgttctcgaatcgccggggaggccactgagccgcaggccagcgaggtcttcagctattccgcggagcggaccgctgtttacgctctggggcggtaggcccttcgcggggtcctgtcccttcttcccttggtctcactgcggggtcggcgcgcgccccagccccaggcctgctgcttccctttctagaccacagccctcagagctaaggccccggcgcctctctgctgggttggagtcctggggactcagtcctagggactcgaaagtcggggcgttcccttcaccgcgtttcccccttggcggccagaatggcgtcccctccccttgcatccccctctgatcccgtgccctgcagcgtgatgccctccactgtccctatccactaccctggcgtcccagagtgtgccgcgggtcaccaggttcccataacgtcgcagcagagcttagacgctgcggggcgaagacccgccccaccctctgacgcgaccagcctagtgggcgaggccagagcttgcgcgggtcaaccagagtgaccactcgggagccctgactgcggccaagggcgcaggcgtgtcccggcgcatgcgcagacgaaacaggcaccaacgctggagcttcccgcagtgtgatttggggccgggaatgccgcggcggggacggcgattggtccgtatgtgtggtgccaccggccgccggctccgccccggcccccgccccacacgccgcatcacttacagggcccggggctgccggacctgccaacgtgaatcttatcgccatggaccttaccttgcacaacccaaagtagctgccttggggcagggggtggccagagtgcttagggaaatgtggagccctacccagaacaacggtggagggaaagggaagaaacgcagaagtgccccagttcggacgtagggaagtcttcctcttcgtggtttttggagaaccctagctaagagaggaaagggacttattgaaagacccgcaagaagggacggaagtctcatagccctgagaggtgaagccagctggagttgatgggtcgaatggggacctagagaacttttctgtatctagaggtttgtaaaatgcaccaatcagtgctctgtaaaaacgcaccaattggcgctctgtagctagctagaggtttgtaaaatgagccaatcagcaggacgtgggcagggacaactaagacaataaaagctggccaccccagccagctgctgcaacccgctccagttcccttacaggctgtggaagcattgttcttttgctcgtcacactaaaccttgctgctgctcattctttgggtctgcaaagagtgttattcctttaagagctataacagcgggaaggtccacggctccattcttgaagtcagtgagaccatacccgccggaaggaaccaacgcccgacacagccccacccatctctcctgtttctcacctatactgaaattcttgggcaaaagctgtctgtggacacacccaggggaaaggccagcccaggcaggtgtttcttagtggttcccctcagccaatgcttcccattccttgatgcatccttctaactagagcagatactcggtgatcttaaactgtggacacctgggagcaccctcaaaaggcagctgggcctagggagatggcctgtgcttctgtgtcaggagttggttccttcaggtgggctcgtggtctcgctgacgtcaagaatgaagccatgaaccttcgcggtgagtgttacagctcttacaggtggcgtggacccaaagagtgagcagcagcaagatttattgtgaagagcaaagaacaaagcttccacagcgtggaagggtacccgagcaggttgccgctgctggacgttggggggtgtgagggggagcagccttttttttttttttttttttttgagacggagtctccctgtcgcccaggctggagtgcagtggcgcgatctcggctcactgcaggctccgccctcccccggggttcacgccattctcctgcctcagcctcccgagtagctgggactacaggcgcccgctacctcgcccggctaattttttgtatttttagtagagacggggtttcactgtgttagccaggatggtctcgatctcctgacctcgtgatccacccgccttggcctcccaaagtgctgggattacaggcgtgagccaccgcgcccggccgggagcagcttttattcccttatttgtccctgcccatgtcctgctgatttgtccattttatagagcactgattggtccattttacagggtgctgattggtccattttacctctagctagctaaagagcacggattggtgcattttacaaacctctagctacagaaaagttctccaagtctgcactcgacccaggaagtccatctggcttcacctctcacttcaacttgggtacagccttctggcgggcaggaggatggcctttggtgcgaacactgccggagtccagggggctggctccctcacctttcatcttctcccggcacttgcaggatccctttgtggccttccacatcaacaagggccttgtgaagaagtatatgaactctctcctgattggagaactgtctccagagcagcccagctttgagcccaccaagaatgtaagaccctgtgtttgctatgtcgcaactattggttgttgagggggacagagagggggtggaaggagagtctagatgggatcacagtcatagtaatcacagtcagtagtagctctggggagtcttgaggtccctgcttctcttgcatagtcatgaggtcacaggcccaagggagcatggctttgcaacctatggctcccccaaggctgccactaccatggctgccatcattgttatcatcattgttatcatatgagcacttactatgcaccaagcataaactcataactcttacacatttacagatgagataacaggctcagggaggttaagcaacacagccaaggatcacacagttagtaaatggcagagcaaggacttagtcccctgaactcttaggcactatcccatggcacctcctcctgtcatcctcattgtcgtggtatctttgcctaggactgtggacttcccacagctacctcagtgggaggtccttgagcctgagagggcccttgtctccagtagcattggggtgcagatgagaagaataacagctcctcttcctcttctgcagaaagagctgacagatgagttccgggagctgcgggccacagtggagcggatggggctcatgaaggccaaccatgtcttcttcctgctgtacctgctgcacatcttgctgctggatggtgcagcctggctcaccctttgggtctttgggacgtcctttttgcccttcctcctctgtgcggtgctgctcagtgcagttcaggtgagagcctttggcttgtcaagtgcacagcaatgctcagcatccctggggaaagctccttgggtgtttgaggaaggccaagagtgcctgccctccaagcagggcagatctgaaggtatgcaggagtgagtgcaggaacatgcattctgctgtcttgacctgtctgctctttagccacatggacatcttcatttctctcactgcctttttagctgcttctccaagggttctcttcttcctatgcggtttgttctctgccacagcccacctgtgccaggagccaagtttctggtttcttagcaaagcttggctccctccccaccactgacattgcccaatatgttaataatgattgagcgctaattcttgactgtcaggacccatttggcaagccttctgctcatgtttcagtcctttctgtattctagatgtcagtccatcataagtcatgagcttcaggccaggtgtggtgactcatgtctgtaatcctagcactttgggaggccaaggtggccggatcacttgatctcagttcaagaccagcctggccaacgtggtgaaacctctactaaaaatacaaaaaggccaggcacagtggctcacgcctgtaataccagtaccttgggaggccaagatgggcagatcatttgaggtgaggagttcaagaccacctggccaacatggtgaaaccccgtctctattaaaatacaacagttagctgggagtggtggtgggtgcctgtaatcccagctacatgggaggctgaggcaggagaattgcttgaacctgggaagcgaaggttgcagtgagccgagttggcaccattgcactccagcctgggcaacagagcgacactctcaaaacaggccaggtatggtggctcacgcctgttatcccagcagtttgggaggccaaggtgggcagatcacctgaggtcaggagttcgagaccagcctggctaacatggtgaaacctcgactcttactaaaaatacaaaaaaatcagccaggcttggtggcgggcacctgtaatcccagctacttgggaggctgaggcaggagaattacttgaacccaggaggcggaggttgcagtgatctgaaaccgcaccattgcactccagcctgggcaacaagaacaaaactgtctcaaaaaaaaaaagtcatgagcttcggagctggcgaaacagaagaacagagaagggatggtgatttgccccaactcacgtgtgagtcagtggcagaggcagaactaggacccatgtttcctgactcctgaggtgcatcacaggccttggcagatgaaggaagtgggagaggctgaaggaggcatcgaggtcagtgaaggcgacactggggctggtgggctgctctcagtgttgactcttctcacctaggcccaggctggctggctgcagcatgactttgggcacctgtcggtcttcagcacctcaaagtggaaccatctgctacatcattttgtgattggccacctgaaggtcagtgggatggggaggagctctctaaaactccaggcaatgaagggctgccttgggggaagcttttcatactcgtgtccctgcttttctgtagggggcccccgccagttggtggaaccacatgcacttccagcaccatgccaagcccaactgcttccgcaaagacccagacatcaacatgcatcccttcttctttgccttggggaagatcctctctgtggaggtgcgtggaggtatcagtggaaaggtcttggggaataggaggcagccaacataggggagttggggaagatgcccacgatgttgtcagtgtgggcaagacactggggctgggctggctggggcttttgccattttggaagttctggaaggcaacaggcaatagatgggggctgcccaggagggagtcaccatcctccctagagagttcagtcagcaaaccgttactgcataaaaggcacctcattttgcaaaggatccagcggatgaccagaaggatccaaatgatgagatagcctatccttgaaggtgctgatggcacctcctggaggtgcttttttgacactcttgccccaggcaagtattccccttgcactttgtatttctctcccacacttaggtatccttcttgtcacagtcttctctgtccagggctggactgtcttactcttctttcatgtccaatatctggaacattcattcactgagtacttcttcccaccctgctgatccccagcctgatttcctgggtggtcagcgttgggtttgagatgtcgtctgaagttgtaagcagaaataatgtagctgctgaaggaataatgcctgggggtggagatctggtgagcttttagtgagcattaggcaatggaaggttctaaaaggccagcagaattctttgaaaagttcatttaaagccctttgtcccaaggctgtaggctgcagagttcttccaggtccacctcctccactttgtgacatttcagcttgcgaggaattaaattgtcgttaaaacacatttcagttctaggcatgagttcaaggtagcctggcgttcctctcgcccctggccatgagaactttgaaagggctttggcagcactggttggcctggcatgaggagctcatagcttgaggctcatgccccacctgtccataatgttcttattttcccatcatgagcatggacttgggtttgttacatgtccgataccattatggtcagtactatgcagatgacgaagcagccctgtcccccgtctgactcccatggctgcttcaagggcagtgtggttatttgctgggcagtggcatggggcttgtgcatttctactgtcactacagagggtttaaaaaaaagacatgggcaggttaagtggaagggaacagtctcacaccactacctttattgcttcttggtacttgggttttcaggaaattcctatcagcagacatcaaaaacagagaatgaagggacgcagttggcatgtgcctgtggtcccagctacttgggaggctgaggtgggagcatcgcttgagcccaggaggtgaaggctgcagtgagtatgatcacgccactgcactccagcctgggtaacagcgcaaccctgtgtgtaaaaataataattttttaaaaagattaaaaccaaaaaaaaattgtaaacagagttcaacgtaacttacagattaaaaacagtaaaatatgacagaaactgagaggtagtcatgatcagatatggcctccttcgggtgccgacatctgaactgagacctgaatgatgaaaagggccaacactgcaaaaattcagggaaggaacatttggaacagagagaacagtcaagtacagaggctcccggatgttcagggacagtaagcaatgagagaatgagaagaccagaaaactagggaggggccagatcatgtagggccttagaaagccatggtaagggtgtggtaagaagtttgggttttattccaatagcaatggggagtcacaggagggtttctggtgggtacagcaatctgctttgcactttaaaaggcttgctctggctggaggtggagaggatgaattatagagggtaggtataatcacagatataacctcagtgaggcggctggagcgagtccagaccagaccacggaggagcaggtgaagccaatggatttgggatatgttttggaggcagtgtaagcaacgcttgctgaggacctggatgtggtggtgagaatcaccccatctcgagcaacattaactgaggaaaaaattgaaaaaggggcgcccttgcttgggggcttcctattgtggaactgttatggaaaggagccccatccattgcttcctccttgaatggcaaatgcctttatgatccctataacttgtcccattatgtttagacccttggtggtcagaagggttctatttagggcagtgtcccctgcccctccttgtcctccaaaaattttgggaggcactgacgtggatgtcatggggtcagcacaggcatcaacatccccagagggatggaaccaagcagcctattgcccaggcattcactaacaggcagcccatcctcagcctcatagctggccggggagaagaaaggctattttgggtcccagatctttttttttttttttgagacagagtctcgctctgtcacccaggctgaagtgcaatggtgcggtctcagctcactacaacctccgcctcccgagttcaagagattctcctgcctcagcctcctgagtagctgggactacaggtgcgtaccaccaagcctggctaatttttgtgcttttagtagggacgtggtttcaccatgttgcccaggttggtctcaaactcctgggctcatgcagtccgcctacctcagcctcccaaagtgctgggattacaggcatgagccactgcacccggtctctgtttacaaatttatcaccagcttcatcccctaaggttataagctccatgagggtgggaagtctgtattgttcacctctgtatcctaagcatctagaacatagcccggcacacagtaggtgctgaagaacttgaatctgttaatgtagaaaggatgtttcatctagctgaagtgtcttgtacagaataaactctcaataaatgaactgtggacacatggaagggtgagctagagctctgctcaggggttgagtgctcctcttgtgcccttgtggttgtctggttacctgaactaattggagtgcgatgcagacatagtcatggagtgagacagcagaactttgctgtcttgtttgtgagcccacatcaggggttctagactggctggttgacatggtggccccagcctgtctcttcagcagctcggcttataaaaaataaccaccacctactggggaaaactgctggaaccttcagattgccaaattgttcttggtgtcttttccagaaatatttgccaaactcgaattagccttcaggagatttgataaagctcatgtttaagtcaagagaccaaaagattttgatggggagaattaggggctggatatagagggaatacttaacctgtataggggcagatatggttgtccatggagattctggtgtgaaaaagtacgatggcggccgggcgcactgcctcacacctgtaatcccagcactctgggaggctgaggtgggtggatcacctgaggttgggagttcaagaccagcctgaacaacatggagaaaccccatctctactaaaaatacaaaattagctgggcgtggaggcacatgcctgtaatcctagctacttgggaggctgaggcaggagaatcgcttgaacccagggaggcagaagttgtggtaagccaagatcgtgccattgcactccagcctgggcaacaagagcgagactccgtctaaaaaataaacaaaaaagtacgatgggagaaaggggagagggcagtggggcctggaaacctcatgacaaagagaatgaacacaagagggcctgtggtcctgtagactctgtgctgtgcacatccctcatgtgagcatgggccatccagctgcaggccatggtgtgacacactctgcagattacagtctagggcttcatgttccatgtgctggaggtaaggctgggcctcttggagctttccaatagcaccaacaagctgtcagccctggaggaggcctaaacctccaagcaaggaaaggtcaagtcacagagggaggaatcactggtctccgaatgctcatgtgtttgcttttcttcacagcttgggaaacagaagaaaaaatatatgccgtacaaccaccagcacaaatacttcttcctaagtgagtgtccccatccaacacaggggagctgcctcaggagggaatgctgagggaatgaggaggatgtggctgtccaagggattatggtattttaaggaaaggggctagaggaagtaccccactcccacccccagttactccctgcatgacagcagtttgccatctcagctgagcgaagtgaagttaggctgatgattggttgaaggcaaactagttcttcccatccaaccccagtttccactgggaagctgggtgtttggggtgtagaggggcctcttgctttatcctcaaccttatctttttttttttttttttgagacggagtcttgctctgtcgcccaggccggactgcggactgcagtggcgcaatctcggctcactgcaagctctccgcttcccgggttcacgccattctcctgcctcagcctcccgagtagctgggattacaggcacccgccaccgcgcccggctaattttttgtatttttagtagagacggggtttcaccttgttagccaggatggtctcgatctcctgacctcatgatccacccgcctcggcctcccaaagtgctgggattacaggcgtgagccaccgcgcccggcccctcaaccttatcttaaactttgtcaagatgggccaaggtaacctggtagagcccagtccaacccccagaggaacaaaggtacagatagttctggaaggatgggtcctgaggagagaatggaagagctgttagaacgaagaagatctttctgatgactgccacatattcccagctttaaaagtctgtcccagctactaaggaaactgaggtgggaccatcctttgagcccaggaatttggggctgcagtaagctccgattgtgccactgcactccagcctgggcaacagagtgagatcttgtttcttaaaacaacaacaactctgctccataatgcctaaaatgagctttaaacgcctttaaattttcaaattttttaaagaaggaagggaaggagtccactgatcttattttagtttgaaggaattcatcctaactgcctatcaccaactatcacgaatagagaaaggcgatggggcagaagggtagagcagagacctctggaagaaatagttttagaatccatggcacatcaagatggaggagccatgggtgagcattgtcatgctaggagttatgggtagcatcaggtgccacagagaagggctacagaaaaggaaatgaggaagcatgtagaatgcaacacttcttcaactcccagttttctttcaagagaggcccctctgttccgtcccacagctgacctccagggcttcagattggggtggcacaagcccatctccctagtttaaggaagtgagcttcacagcctgtgaaggatccacagggtccctcccaacacacacacactttcctgctcctgccccttcacctgcatggtggagctgccaggaacaaagggcagatgactgtagggacagggctgtggccaaggtaagtaagagagtattagcacccttttaaaagtgtgggatccttggagtgtgtatgtagaaaagagaagaaaaatgaaaaataataaaggtgtgggagcagagcaagtcccatgcgtggggcctgagttcccaagcacctgtcactgaagagtgccactcgcacccctcaccttccctggcatcctcttgggagtttttgccttccccagacttggatttatgcccaccttcagtgcctgctggttccagtggattgcagagcactcaagcacctggaggggagacagaagggatggttggaagaggcagccccctgctagaggccatctctcccaacatcaactggccctttcatgaccttcctgtgctcatgcctcctctttgtctcggtttcctccccagttgggcccccagccttgctgcctctctacttccagtggtatattttctattttgttatccagcgaaagaagtgggtggtgagtatccatggcccaagaagcccacatccttgtctccagcacccagagtgggggataggggttccccaggggaaacttgagactgactctaggcctaatttagaacaaaataatagaaccagacacagatcctccttatctctaagtgggacgaaatgatttgagcttagcaggcagcctgattcccaatgtgtaatttcatgcggtcagtgtctccagaggttcttgtactgggcataatgccagggggctgagttgggaatggggaagatgaatgagagacaatacctactttcaaggaaacttctgatgaagcagaatgtggttattaatcagaaaagaggtacaggcaataggttctggggactccaaaaggggcctgactgcacctggctttgtgaagtcacttttctagctggccttgaggctgggcagggtttctgacaggcagaggtggagcaggggggatgaactctgagcagagaagctggaaatgaggggtaagtttgaccaccagacatattgtggaggactagtgtcaggggaagagtatggtgcttggttcagtgatgagagatttgatcagggcactggcatggactgagccatggtcctggcagattcatttggcggcatgctgaaggatttagattggctaggaagagctagaggcaaagagaccttgtaggccttggtacttttgaaggggacatgcaagaagggctggggggtgccaatgggaatggaagaaaggagcagtggcactagatactgcaggattggacccctgagaagctgaagatgagtgagtctggataaccaggagaatggctgcaccatgcaaacaaagagctgctgagaggaagaggaagagttgttcgtgactgttatgctcgctgcttttctcactataggacttggcctggatgattaccttctacgtccgcttcttcctcacttatgtgccactattggggctgaaagccttcctgggccttttcttcatagtcaggtagtattcggtgggggcggatagggactggtgaaggaaatgttggggagtgaccagtctggtctaggggccgtgctggggctttgggtaacagtgggtgtttcaggagttggcttgggaaagtagacaggctggagcagttatctgaggggggaatcagaattctgggctctgtgtgtactgtttttgtctgtgtaatacatctaacaggttcctggaaagcaactggtttgtgtgggtgacacagatgaaccatattcccatgcacattgatcatgaccggaacatggactgggtttccacccaggtaagggacagtcactcagaagactggagcataacacaactattgaaaaggatgcgtaggtgaaaacagcaaaaacaaaaagtcccccaaacagcattttctcattagcctgaggctcttgttctgcaaccatgtgaagggagtgaccaagacagtctcatgtcccttcctcagccagctttacctggagaatgctgggctggcctttccatctgatattcaacatgctctcccctgaccttttccgccagctccaggccacatgcaatgtccacaagtctgccttcaatgactggttcagtggacacctcaacttccagattgagcaccagtgagtagggagcctggggaagcagggtcctggggagggtgtaagtgttgggtacaggtgggagcagagaagcaggaaccactgactcccccgttctccctaaagtctttttcccacgatgcctcgacacaattaccacaaagtggctcccctggtgcagtccttgtgtgccaagcatggcatagagtaccagtccaagcccctgctgtcagccttcgccgacatcatccagtgagtatctgagaccaggaagatggctagtagggagggaagagggcagggcaatggaaatgatgacatgtagggtggggagtgaacagaaggtgttcccagtcgtgtgggatggagttcaccatggcaaaggcaggattctttattggacctgtggccaggtcaggcctttgccctcattggggttcccctcagtaccatggcccaagctagctttctctaaagtagaggggaggaaaacctccagatggaagaaggccttaacctcactgctccatctccggtgggttcaactctgcttgtctccctcactgtctgcccccattttgtccctgcagctcactaaaggagtcagggcagctctggctagatgcctatcttcaccaataacaacagccaccctgcccagtctggaagaagaggaggaagactctggagccaaggcagaggggagcttgagggacaatgccactatagtttaatactcagagggggttgggtttggggacataaagcctctgactcaaactcctcccttttatcttctagccacagttctaagacccaaagtggggggtggacacagaagtccctaggagggaaggagctgttggggcaggggtgtaaattatttcctttttctagtttggcacatgcaggtagttggtgaacagagagaaccaggagggtaacagaagaggagggacctactgaacccagagtcaggaagagatttaacactaaaattccactcatgccgggcgtggtggcacgcgcctgtaatcccagctacccaggaggctgaggcaggagaatcgcttgaaccggggaggtggaggttgcagtgagctgagatcacgccattgtactccagcctgggcgacagagcaagactccatttcaaaaaaaaaaaaaaaatccactcatataaaaggtgagctcagctcactggtccatttctcagtggcttctccatcctcatttgcaaacctcagagggataaggcagttgaacctgatgagcaagaattataacagcaaggaaacattaatgcttagaattctgagatccagcacaactcagtctgtgggagctcagctcgctgcccagggataggtatgacctatgtctgccttaggctgctgggagatgccattctccagtttcagaagcaggcagggcaaaggtcaagactgtggtattggggtcttttggctctgaaggatcctggaaccactgattttggtttattccctccagggtctaaagagaacaagaggtgctagctcttaccaaaacagatggtagagagagttgctggctatttaaaaagctctttcatcttttaattcacctcttcttttcacctctttaaccactcctcaggaacagaacacttctaggactgggggtcttttagctccataagcaagtgagcagatgggacaagttagtcttttctccctagaaacaaaggggatgcccagtggtttccctttgcttcccaacctaaaatttcaagtttaataaaatagcaattagcagaagtgaccaaattgggagataattatcagtcatgaggaaagacacagatttcggtcataaagaatgtaagggctataagtagaaactttctataacctaaatgatgttatagaattatttttgagcaggagcagaaagattaaatatgatcacttcatacttctaaatcagaaataggaagattaaaaccacagaacagtttgtgatttctattgctgtagctaggtatcttactctgtccactcttgttcaagtatctaactcttctggaaaccaaataggctttagaagagattatcctatattcctatcagtataatactaaaatgtaactttttaatcatctggtttttaaaagataaacagtttagcccatctctccagagagcaaacataggaatatgactcaggagcctcctagggcttatcatcagccctcacacccgcttccccctccaacccacagcctttgcttccaggtggcaggattactactttgcctcttcagcagcatctactctaggcatattgatcattttagacactgggagaagagaacctcaaactaggaggaaaagacagagcctccacttagttttgggaggggatggcagacagtcaaggagatgagcgtcctaaggcatgttgggatagggtcagatgcaccacccatggagaggtttgtcaacacaaagacatggaaggttagaggtttgtcaacaaaaagacatggaaggttaggtttgtcaacacaaagacatggaagattagaggtttgtcaacacaaagacacaggaagaatgggctgcagaagatttagatgttttccatttgggcacattttacttagctggagaactaggtttaaaacagcctgggtaggaaaattagaagcaagctggatgcagtggctcatgcctgtaatcccaacacttttgggaggtccaggcaggaggatcacttgggcccaggaggtcaagcctgcagcgagctgagatcacaccactgcactccagcctggggtgatagaacaagaccctgtctcaaaaaaaaaaaaaacaacaaaaacttagaattgaggagttgtacctccattggcttcctcactccaaaataggtgctgatccttcctattcctattctttgccaccttttgggtgtggtgtcaccagcctgtttagccaagtagctttgggcataggctgcccaatctgagcaaacaccagtgaggctctattgagccaagaccaagtcctcaaagcacctgaaccactgtggccttctcagcctacagcagtgtggtctcttacatggccacaaagggacacacagtgacaaaaggctcggaatgttacaatggtaaaatgagtgatctcaaatccactgacagatataaaataggcttagagaggaaaagctgcctctggtcaagtagatcatggcagcatgaattccaactcacttttttacaactccaacttctatgtttatctttgttactttcacttttttacaacctggccagaggcattttttaaatcaggcccaatatcagtattctttttgtgtgtgccaattttgttatcacatccctatgaagttgaaaaataaagttaattttgaccaaaagacttcatttgtaacccatgatgttcatctgtgtgtgcacaggattcctgagtgcctctgctacgagttactgttcacctctctgtgctcttaagttcttgaatcactagactcccctttgtattgggcagaggaagaaacatcaggaccctccagaaaacaccaaggcaagggtgaagtatggcaaggaagagcaaggcaaagtccttctgatgactcccgtgttcaaatgtgagattgtcaataatctcaccaagtttcacacgtatcacttcctcctattcatgaggcaatgcccttgcccttttgtccttcagctttccattttgaattattttctctttatttttacacttacttgttttgagacaaggtctggctctatggcccaggctggagtgcagtggtgctgccatcttagttcactgcattctctgcctcccggcctcaagccatcttcccacctcaggctaattttttttttttttttttttttttttttttttttttttgagaccagagtttcactcttgctgctcaggctggagtgtagtggcgtgatctcagctgattgcagcctccgcctcctgggtccaagcaattctcctgcttcagcctcccgggtagctaggattataagcatacaccaccgcgcccagctaattttttatttttagtagagacagggtttcaccatggtggccaggctggtcttgaactcctggcctcaggtgatccacccgccttggcctcccaaagtgctgggattacaggcgtgagccactgcgcctggcctctctttacttttaaactcatttctagtttccaaatagtctccctaagtcctatctgcctaaatcttcctctgcaagtgtgatccctcagagcttgactgcagagcagtgcctcttaaccatccaactagaacagctctgagcaaaaacatttgtaggcatcattaatcttccctgcagtgtgcacacagaaagtcagattaacaaaattctataggagacaaacttaccttcaaaagacaaaagaaaaccactacattcttgaccaccacagggtataagcccttaattattaagagctactgcactgaggcaataactcctaagaaatcttaacatttcgccaggcaaggtggctcatcctgtaatcccagcactgggagagaatggcacacgtaatcctagcctttaggaggccaaggcgggaggattgcttgagcccaggagtttaagaccagcctgggcaacagtgagatcccatctttacaaaaaattgaaaaatcatccaggcatggtggcctgtgcctgtaatcccagctgcttgggaggctgaggtgggagaatcacttgagcccaggaggctgaggctgcagtgagccaagatcgcactactgaactccagcctgggtgacagagcaagagactctgtctcaaaaaaaaaaaaaaaaaagaaatcttaccgtctttagttcctatcaccattactgcagatttagaagcaatctacctgaatcagaaaatagagctcaaataagttgtgtggcttggtataatctgggaaaatcagtttcaaaagttacctgcccttgggatagaactttttgtcaacaccagttttcaaaaagtaccctagttatgaggccgttgctgggtaaactttatcccattccagcttcaaccagaggaacctgtacatcctaaagtttcacataagattacacttgaagaataggtttctccattaaaagacttgaaaactactggtcttcaggctccctacctgtttaatctgtcaagacattgccagcttaaatttcggacagttacataagtgtccctgttaacttcaaatggccctgacaggaatgctaaaacgtcagacattcaaatgggccaagctttatcaggattataaaactttcaaagctcaaaaacatgccatctctatgggaaacagtatcttggatttgatgttacaaaaggaacaagaaaatggtttctgaatggcagctttcagtttacaagtagtggcaaagtaaatgcttggatgttatgaggtagttgatctaaattgtgaggctttcttaaaggcactcctttgatctcatggagtgagagactagaaatctattcaacgtattaaaactcctctcccagcaaaataaaataaacaaaacatcctcctcctaatggctgaagttccatctagctgctatggccattttatggagcatggtgccatcttgtggccactctcaaaccacccattgttaatcaagtgcaattacagcatgttaagagtgaaaaggaaagctatttggagccatggtcacttgggatattttcaaatgttctcaaagaacatgacattttggttacttttagaattttattgacttttttcttcataactttaaaacaaaaacagcgcatgaaaaccagtgtcttattccaaagtctcaactcagctgattgccaggtgaacatcaccatcttactcctctgaataactagacacaaattacatagcaagttcgagtttctgcccacccaagacacagccagtaatcagtcacaaacacagacacagccaactccaggggctccagctttctgcccatcttctctcagcagttcctcccatctgctaagatgcgccttcctggtggctctctctcaaggtgggtcaaggctgaacaagacagaaaagcacagtctaggtccaccatcacctcccactggccaccagttggccagccaggaaatcatttctgtacatcttttgtctcccccttttatctccctctctcttctccaaaacttgttgctatctatcactttcatgtaacaatggacttagtgtccattaaactgcctgagaagtggtttgagcctgacatattttcctgagctaaaaaaggaaaagtacctctgtggccttcttgccattaagatcaagtaaaaaagggactagcactactgaaaagggtcacgctagaaaagccttagaatcctctctccaccccgtgaaggtttctctagctgtagctcttaagggtacaagacggcaaatattctggggtgaaggaggtataatggggaaacacatttattttccccttttaaacttccctgctgccccagtctttgccttcttcttagtggatcccttgggttctggctccttgcgcttagctgaagagagtgagccggtcaccttgaagaaatcatccaggcggccctgggtgctgccttggcggctcttactcagcctcttgaccccactgcggattcgctcctcagagaactgcttttcaccacacatgaacttgatcagctcttcttcatttggctcgctccacttcagctccacagactctgggtccagcacctcaggttccaagaagagctggtgagcctccttgtggagccaattttctggcacagggtacttgttggggtcaagtcgccgcacgatctcctcgatgctcttgtgcttctggatgaggtccacagcccgcttgggcccaataccccggatactctcacagtagtcactgcctagcaggatgcacagatccacaaactgttcctggttcaggcccagctcctgcagaatccggctcaggtggaattcctggattggcagctttttggcttcactggcagtcaggtgtcgcattagcacagggctgccgaaggtgaggcagtccatgtcctcggtagccgcagcatagactttgccagccttcaccagggcagcacagctggcctctgcctcactgggtgcatcaagataagggatgcccatgaggctcagcagatgtttgcactcatcattgtgctgcttagtgaccttcaccagccgcttagtgaatttttccacctcctgctcggccccagcagcctgagcctgctgcagctgcttctctgcctcagcccgccgctcactgcgtttggccagctcgcctgacttgagctgtggcggcttgccatcaaagacatacacgggcttgatgccgttctccatcatgcgaatggtgcggtagaacatgcccatcaggtggctggtggtctcaccctcctcattctgcagcacatccccaccctggcgaacagcaatcaggaactgataaatgctcatagaggcatcaatggccaccttacggccaaagtagctcttgatgtcattctcccggatggcactgggggccacatcagcaattagtttggccaggccttgaattcccatggcaacacagaggagggatgactaaaaaagaaaggcaagtcagagacggaggaaaggagaaaggttataactggtgttatctcaccaacttcatgccttcaactaaattccacacaacaaaaaggacaccatgtcagcactgctaaagataaaaagatgaacaaggtccccattctcaaaaaactcagtctagcaggagaatttactcaatagtaaggctcaacgagtaccagaaattgaaccacgtgcttagagaaataagatactgttgatattctaaggtagcagcattatttattacacaaaaaaaacctgcaacataggtctccatcaaggaccacagaaggccaggatgcttggcctggcttgaggagtccagggaccataatggcagacctgaaagacaggcaaatacaccagctaaacaaacagatctgatttgttttgagtctctggagaaccctgactaataaggcagccttgaaaaaggattgcaaacatatctgaatggaggtgatgtggctttctcacaagcttctctaaactctcttcatcatcgcctcagcacataagagtttctacttttattataatgttgctagagtttcaagtctttccctttgcgttttctcgccaccactcagtctgaaatgttaactccatggctcctccccaggtcctgatttaggggtctggcatgctgtagtcactgggctcaaaagagtattgcacttcagagttcagtgtttcccagatagcagtgtttcccaaatcaccctcacgatttttgctacttccaactaaaacccgtactttcattcacttagaattttttttaaaaaactaaactggaaaactcataagcaataatatttgtgttctattagttatattttaatatgtattaaatgtataactattaaaaaggatttttagggggtgcaatttaaaatcatcttgccatcctggccaacacggtgaaaccctgtctctactaaaaatacaaaaaaaaaaaaaattagctgggtgtggtggtgtgcacctgtaatcccagctactcgggaggctgaggcaggagaatcgcttgaacccaggaggcagagaatgcagtgagccgagattgtgccgctgcactccagcctagcaagagagtgagactccgtctcaaaaaaataaaaaactcatcttgtgcccactgttggtatgtgtccaatactccaagaaatattctactggggccaggcacagaggctctgggcagtaatcccagcactttgggaggccgtggtgggaggatcacatgagcccaggagttccaggctacagtgagctatgattgtgccaccacactccagcctgggcaacagagcaagaccctgtcaagaaaagaaaagaagacaaaagaaaagagaaagaagaaacgaaagactccatcaggccttttcattgttcccactctttcttcacagggttctttctagagcatcaatgactgttcaattcttccttctaattcagtccaaacacttcagcatggcatcacgatctttcatgttctggttcccaacctaaccctacattctgggatctcaacagaaagctggaataaggcccgccttttcccacttttccttagctgtgccctcctctcgccatcctctcacgcgtccttccaggtccatccctggattattaatcaattaataattaattgacaatgaattattcatttgattaatatgaataattcccctgtgaactgcagcggcaaaagctctggccttgaatctaggcgcggcatttaccatccgtgtgacattaccaagccactgaggtttattttctcgtctacagaagaagaacgattaccatgcctgtctctcagggctgctgccagggttaactgagacaacagacagaaacctctaatgtcccctctccaggcctgttcaacccttcggctcttgcctcaagccggccgcgctgctggagtgtggactgaggaccagaccatgtagcccttgatcccctcacggcgtcccacagacaggtaggcaggaaaggggcctaaacaactcaagtgtcagaaatgtttctcgtccaaggtcttaggaaaaatacaacacgaccccataaggtggaacttattaccgcttttctacaatggaggaaagagaggctcggagcttacgcgactggcccaaggctcacagggggaaaagtggcgggacctcttgactgcgaatcccgcgcactccagaccccggctccccacggcccccagcgccaagcggaccccgtcgctcccggaggcgcttcccatggggtctcacctggcctttgggacacgcggcctcggcggctaaagcttggttcggggttgccccgggcaggcggtcctaagctcgctctcccttctcagcttagcggcgggtggcctgacgttcagccgccttccaaagcccgcgctcccgtcacgtgacctgctcgccacgcacagcctcttggggcgcgtagtgcaggctgcgtcccctcagacggctgctctcatggcaaccagtccctccagggagaacagagtctctcagcgaccctggcgtacccttctccaccgcttgtccccactccacccacaccaggtccccgcaggcccctgctccctctacacccgaaatcgcaggactacaagtccctcaatgccacttgcgccggaggcacttccttttccggttgtgctaggcgcctgctcctgccgacgtgttcttccggtggcggagcggcggattagccttcgcggggcaaaatggtgagagcgttgaggggagttccagacggagatgcgaggacccctcggggtctgacccacaccgcgcttatctcctcagacgccggagatccagagggctagacgctcctggaacctccggcttgggctgaagggtggggaagggggaagccccttgccatgaactccttaggtttctcagctcgcgatttctaagggcgagaggcgtggggcgaattttgaataccttccagtttgtatatctctgttatcggtggtgtgttatctttatttggaaagttcttctgccgaacccgtgcccatcctacaatgccctgggcaaatgtttattggtgaagcacttccaactctcaggcacttggccagactttcctaggagcgcccacagcctctgtacagatctctggccacgttccatggacttctttgttttcggccacgcctcctagtgaccaccgtctgacgcgcatctagctctgggatgatgtctattcatctttgtattctcagtgccaaacagagggcccgtaattggaagctcaataaatggcagtgattgtctttatcattttgggggaagggggccgtgattgtttactgaattgaattccagtgtctcagaacaatgggggcagtttacttctctagagttgttatgttctggattttagaagcattggctgaccggtgacaatgaagttaacatttgtacagatctttacgtttacagccctctttcataaaagacattatctcatcatcttccctacagccttaggaaggaagcaaatacctgttgagcaaaatactccctgctaggcactagatgctttgattcatcatctttcttatttttcagttctgtgaaatagatattacagtcgctttactcagactcagattactcagaaccagaacttgaatgtcttgaccatagctcacaagattccataatagcataggtagtgaggaaaatactgaattagaaattgagggccaggcgcggtggttcactcctgtaatcccagcactttgggaggctgaggcgagcggatcaggaggtcagaagttcaagaccagcctggccagcaaggtgaaaccctgtctctcctaaaaatacaaaaaattagccgggcatggtggttcacgcctgtaatcccagctgctcgggaggctgaggcaggataatcacttgaacccagaaggcggagcttgcagtgagccgagttggcaccactgcactccaggcactccagcctgggcgatagagcaagactgtctggaaaaaaaaaaaaattgagcctgggcgcggcaactcacacctgtaatctcagtactttgggaggccgaggcaggcagatcacctgaggtcaggaattcaagaccatcctggccagcatggcaaaaccccatctctactaaaaatacaaaaattagatgtggtggtgcgcacctgtaatcctatagtcccagctactcgagaggctgaggtatgagaatctctagaacccgggaggcagaggttgcagtgagccgagatcgtgccactgccctccagcccgggcgacagagtgagacgccgtccaaaaaatgagactccgtcaaaaaaaaaagatattgagatctgggtaccaccagtcagtgacttatagcgggggttctcagcttggtgtctatagacactggtccacaaagctccggaaattgtaggcaaactttttcttgtatgtggtttttctcaggcagagagttcgtacctttagtcacgttttcatagtggtcagattattggcctcagaaaatgctaataagggccattgatctgcagctacatttccgggctaaaatcagcctctgtttcacggcagcaccaggctccttgataaccgcatgttctctccaggctgaaatcgtgggattctttgatagctctgatctctttccctcctctaggagctcgaggccatgagcagatataccagcccagtgaacccagctgtcttcccccatctgaccgtggtgcttttggccattggcatgttcttcaccgcctggttcttcgtgtatcctttcactgagcagccagaggaccagcattagtgatgtgggaagctcagggagaaaccacgctaggtacatggaccccgccggttttgtacattggattggggctgagagaaggtaaggaggagaggagggctagtgatgcccaggggcaggttatagccttatttcccaagttcaggtgagctcagtttgttctttggatttccaggacagtgagcaggggacctggctggagtggaggtggggaataggggtgctacagttggaaaggtggtataaggaagggtgcactcaggtgtcaggaggtctgagggctagtcccagctccggccctcatgagctgtgtgacctggggcaagtgacctaactcctctgggtctcattttcttcatggcagtggagcaccagagtccaaggcatctcttaggcccctctgcctggctgctctgagccagataggcctcccagaaggcattgagccaatgcttttctcctcagattgccgtgggctgggctctctgcactccacagtccaccccttcgctttgccttaactgctgtgcccagttacgaggtcacctctaccaagtacactcgtgatatctataaagagctcctcatctccttagtggcctcactcttcatgggctttggagtcctcttcctgctgctctgggttggcatctacgtgtgagcacccaagggtaagagctgcaatgggatggatgcgtgagcctccaaggcacagcccagggaagcctccccagagtcaggtcagcagggtccttaaagctcttaccagcatgaccccttggttgatggagacagactcagtggaatgggtagggacactagacatttgtgcctctttccctgcccctcatacggatttgagccaaatgtgactctcagttctgagctcacatggcccaaggcctcgatctgcctttgggatgtaccacctagaagtgtggacgcaggcatcccatggctgtacatttacattcttagaagtcagaccccagtgacttggagaggctgctgggaagtcagctggctgaaagggggtcaagatccagggcttaaaacttgctgcagacaatccaccaaacaggccactaggaatcagctctggtggctcatcctcagaggtgtgtgctcaatagcccttgccccaggagcacaggggtgcagggagagaaggaggaaagaagggccattggtcttattttgatacccctctcctcttttaggtaacaaccagatggcttcactgaaacctgcttttgtaaattacttttttttactgttgctggaagtgtcccacctgctgctcataataaatgcagatgtatagcagtcctgtctggggcccattctgcaggggtggtgggtgctgggacctacattgcttccccaatctcttccctttcccatttctcatctgcctttcacagttcctgctgctgatctacttaagggggatgagatttgtgtagcaccggtgttttgtcattggaatttaaggcttacctgtggatagggtctgggcctacccttttctattgtttctaggacaaacttctctgggaacccacatcggtccattctgccctaggccagtccctgccataaacatagccaccattctctgtgctggggcatcctcaccaggctcagcttctccccctaagaaggcttttctcctcagtggctacttttaatgcaggtgggcagcagcgggtgcgcaggaggggaaggtgtggccatgggagaggctgatgagtccactcctagccccaatatgaagctaagaggataaggggtatgaagcatccatttggccctctggttcaggcgctcagagattccaggcttctcaggaagaactttgaattccaattggccctagccttataggtgactcctctcccaccagaccaatcccaagaagagacaaggaggcaagctcagatacaaagcagtatttatacatttatttatatatgtatatttacttcagaagaaacgaacatttcggggacaggaagcaagcaggcccggggctgcttccctcactgcccacctcagagtcagagttggcacatgacaaataccaagctcagggagaagaactgggagttaactgggaagtagggggcgctctatgcacacgcaggcttctaagggtgcacggtatgggcaggaggatttgcactgggaggccctatgtacagcttgaagctagggggagattagcccagtgactacaggaacaaacgccaaaggagagagaagaagggagggatgacctgctggaccccagggcagggacagggccaagacactcacaccattgccagccgggcagctggcagcttccagcaggtggcccacttaccttccctgaagcccttttaccacaggcttaaggcaactttggtccaaggttgaccccctcaagcagcttggatccccagcctgtccccaactcctgcactgaggaacccctccccaggcttggaaacagagccagctgctaacggttttggggctgtgctgtgtccagatgggctccatggggcagtggacggtcactttccagttaaggactgagggcccgcagtccaagaacatgaacccccattgaggaagcccaggaatcctattacatggagtggggctcggcagttttaaggcatagggaggattcccccagtgggagggagaacaaagtcatcataaggaaggctcagcccctgcatggtttgggaatcgtaaaattcctatgtcaacggaaccaaattggggagggggctgggagcaagctatccctgctattcctgcatccccctgctcttccctatcctgaggacaagtgctttgagatcaatggcaaaagggggcctgcagttcataggcttcaaggaaaggcctccactatagaaaggcctcccattcaaagctgagaatgagtggtgggacaggggcaaggcctgcttcccaaagaggtggcagcataccacagggcaaggacagcaattccctttcccatttctggacccatggcagacatggctaaatgaatactacactccttccatgagcctggatgtagcctcggaatgcaccaggcaccactaagaaacttgaaggtggcacttaagatacaacttcttccctaacccagggtcttggtggttgggagtgggatgggtgtcggaggctccctgggagggatcagagtcagagccctgtctttgcaagtgtcacacccctgctctggcccactctgagctttctagctccatccttccattccttcctgccctggtttaagtgcatttagtaattacttcattaataacagcaaaagctatttgcatctgcccaccagccaagaccaggctgctgcttgagggattcctgctcctctgctcagagagaatgatgtggtcactgatcactgtgagctccagacgctcccaggaacgcaggcagtgaagctgcaataccatctgggggctcaaagggaatttcctcttcctggatattcctggttcaaggctctagggcttacctggcccactggcccctactggttcaggcctgtgaagggctgagggtggcttcaccaggcactgagtagacttaaggcacaaagtcagtttctccaacccaggcagggctggcctcggctgccctgggacttcttgggagccaagccctcccagggagaagaaacctcctgggccacacttaaagcttagaagtccgagtctggcgtaacaggcaaaccccagaaagtccactaccaagccatcccccagggaacagctttaagggggagagccgtctgccctccattgactcatgggggtccacccaagtctcttagggctggatccgagccccctgctgatctcaaaggtgggcaggtcctctctccaaaagggttggctccagtctcaaaaggggaggcaagggagaatgggctctgaacaaatcagggccacaggcttccccttccctccagggcacctgaaccagccctccaaccaccatatctggaaagaggtaaactggtcctgtcctggcccctagggggtggcaggcaggaaggcccaagaagtctctggctctcaggttccctctgtgccgtgaggggcgaccagctggaacagcaactccagtgtgaagacttccagtttcaccagtctcgggtagggccagtgaacagcagagctggcctgcagcgggctccagtgtaacaccattgcatccagtgttggggggtgcctgggcacccctggtccctggtgtggtgctgcctcaggagggcagctcagtcacacaggcggtagaagtggaagtggtagtctgtggctggctgggcgagagcctctgaactgcagttggcctgaccctgggtggaagggcagtgggaaggtgaggtggctctgggggtgcggggcagatggcactccctgctgacattgcttgacactgtgcccccagccctaccacatactgtgcaaaccccccattcctcaagccccacgtcgcagacaggggtgcccagacctccagggtaggtgggatgcccctgctcaccagcagtgccacccggaagtggtaggtgaattcacggaaggacaggatggttattggccaccggtgagaggtgccctggagagaagggagagaggggtcaggacagactgctgcccttatcccaaccagcatctctcaccacggccgtcgcagtcctggggtctgtggggagttttatgaaggaaaaaagcagagaactttgaagagataggaaggagcatgttctgctttggcagaaggagcaatggcagctactccatgcagaccgtgcccgggactggcaggtccacagccacctccacctggcccctgcctccttcccagtcctgttgtgctgggttccctcacccactatgctctgggcacatcaaagtatttcattagccccatcctcagtacaatccagtgacacagtgctgctactagccccatcttctggatgaggaaactgagccacttcctaaaaatcacacagtgtggcaaaatcacacagctgggattcaaacccaggtctgtctggctgtctccctcacagggtggcatgcagcctggctgcaggcagcttgcccatctacctgaggctttggctgtgcgtctgtgatgtggtttcaggcccgagcaccatgtctgctgtgtgtctagctgggctctccctctgtcttggaccctgtctcttctgcagggcgacagggctcgggcctccctcagaagcacccccacctctgttgcaggtgctttctgcacgtcttttctccctcactatagagtacgttcttggaagtcaaaacctgtgtctactccacctctctcccctgcagctaggcccacccagcacagggcctgggacagatggggccccaatcaatattttctgagtaaacacatgaatgggcaagaaaaaataatcactacttcccttcatttgtcctgagcgtcttctcccatggcctcttaggctcaagaagaaactgggggtccatcagccccagggacagtcataacttccggttacctggccagggaggagctcaccatccagttctcccagaagaggtggccaaacatggaacctgaggggccctctgatgctgtacatctagctgtgccacttccccaacctgagcatgaggtcggctccttcctgcttctgcagacacctccagtgagccacagccctccccgccatgggctcccagacacctgcctgtttccatcattgcactcatccacattagcacctgtgatctgctgtcttccccacgtctccagcacggcagggctgggagatgctcagcagagtgcaatgaacaaacacgggcacgcgtgcccctccctgggacacagaggcccaggccccagagtgtcccttgtggagaaggctttactctataactcccagcttctgctccttgcccattttggggcccagttgtgccaggagagaagcagctcgggcctggccggcccgcagcttcccagtcccacctacctgggtgtcctggtgggtgtggagactctgtggaaggctcccctcctcacatggttcctcctttgacctcaggctgcacagcaccacagacacgggggaggaggagctgtagacaggcccagttagcagagaaatgaggttctagagtccctcaaccccagccccctcccagccagcctgccacacgcctctgaatctccacccagcctgaaacaccgcataataaccagggccctcgaacaaaacctttcccatcgaccatcccatgtggtcctcagcccatgaggccaggtcatttagccagttaaccacgaagtaggcaatgaagtcagcacttatcccaccatgcaggaaataccagagactctccggctgtcctcagactcggctgttctgaggctctgcgggagattctccctggctcccctcctgcctcccacttccccacaccggcactcacttcatctgcagagtcaggctgaggtgcagtggggtgccactactgacagggatgtggtaggtgaagttcccaggcctgcaggggcaaaactggcaccttagcctgagggtaccctgccaccccccacccccaccagggactcctcagcccccaatctgtactggagccctccagaagagacagtgtccaagggtagcctggaaaggggctacccttccttatgggggaggctcctccctgaaagggcaagttccgggtgatctgtaccacctgggctcatgtcacctgaggacctccctgggtgaggggagggagcccagcccacctgcaggcatcccctggagcacagtactgggaggtgatggacatcgaattctccagcacctggatggaggtcagggagggcactggctctgcaaggagagaggctgttggggcaggagtaaggtgacaaggcaggacacaaatgagaagctggcaagtctttccttgccagacttgaagcagtcactcacaccttagtatgaataagttccaggttatttttttccagacctccacaatggccagcatcacactacaccctttcctcagcagccctaggactacccagttcccatgagcctgacgtctgcctcctcaaaagaactggaacacccagaagtagggatgggtcttcacatcccctgccaggtgtgcaggagcccgctcgaggcctgtgttcctgactgcgggcatctctcccagttctgggttcagaaacatcagttacactggtagcttgaaatcagcagtgttgacagcatcacacaaatcaggctcccctctgccccgaggccgatgattacaccgctaccagcacgctgctcctcgcagcctccctgaacaaaccgactgcaggctggctggctgggtaggggtgggactgaagtgtgacaagtcagatgggggagacaggacttcttgctcatctagttcacatacagtcttgctgctgcctgactatccacccaggaagggggaagctggggccgctgaacatttgctggacctggtacgttttcagctctgaggcatgacccagggacccaaggaccccaacaggatccaggacaccctgtgtggtcaggacaggtatcagatacagacgagatggaaggtgcccttcccacatcccttctgggcaaattccaaaggtcctttaaagagtcagctcaaatgtcaccaactccagagaagttttccctgatcctccccaccttcgtccggattaagtgtcctccccagtcccaaagctacctgcatgtcccctcagagcctcatcacactgctgtgttttcatctctgtgaggtctttggggacaggggcgtgtccatcttcatcacccccagtcccctgtacagagccagccacagagtggcaggcagctcagtaaacaggtgcctggcaaacatctcccccatggggttcccccatcacattgaatttccatctctgtaagccacattttccaggctttctttttcttgaagccacaaaatccatcagatgaaagttggtgagagcagagctgcctggttgaagccaggaagcctcccagcctccccttcaacccccagggcagcccccagcgcagcccccagggtacctcagaggaacccagtttgaaaactacaataaaaggttctgtagctttgttaaaaccaaagatccaaggtttgggaaatagtaggggagacccagtatagcaccctcctggtgctggcatggcgaaggaggagccaggctcgggatcaaatacaagccctgcctcggaggggctgtataaccctgggcaggtcacttcaccttagtctccatcccatttcttcagctgaacaataggaacaacaattcctttcttgcaggagtgctgtgaggactaaatgggatgatctatgtaaggctgcaggcctgattcctgatccttattctgtgctcagcaaacgtctattgactgacaagtctgaacccagacagtcacatgactgggctgaggtgggccctggccagtgagccttgccaggctgggctgggtagtgtcaggggtgcagcaagtacctgactggccctgggcccaggtgggctcagcagggcccacgctggactggagggcccctcggcgggcccggccatggaaaccaaggctgggactgttcttggctttgccctgccccccagggaaggggactgcagggctggccagaggctccagactcttgtgatgcttggagtggccaatgccattgactgaaagaccccaggacttggctctgatgttggtgactggcagaagggccatctggctggggcctgtggatagaaccaggcacaggctaagaagctggaagctggctgcttcctgtccagctgtctctagggccccacaagactgagtgaaccccatgtgtctcttggtcctctcaggggaacttcccagtcattgtccagagcctcgttctaggctccaggagaccctcccatcaatgagtatttgggcctttctctctacgcaggtagcccccgccccaagccccagcccacagaaagccttacctgagcggttggtgctggggctgggacttgggctgagaacatggccagggttaaagctggggccaagactaggaccagtggtagggttggtagtgggtgaggaacagcagatgacagggcaggggtggctggaacacatgtccaaggtgcggacagcagaacctggggccgagctggtgaggctggtggtcactgaggaggccagaggctgtatgagccagagaagccccaaagacagaacacagcaacctccctgtcctacccagacctgcccagacacgcacccagcagcaaagagggctgtatgcctggtagccccgtggtcaagggggactgtcggagctgcgtggtcccaaagctctggctggacctgctggggaaggatgggctgagctcagaggggctgggagagcttgaggggagagggcctgacagtcctggagaggcaggagggcaggaagaggcagagagggaggggagggaggcaggaagaggggcagcaggagccagaggagaggggcgctggtcagcacgtaccatgggcacaaggcctcactccccccagggggctggggccggagcagggccaggagacaggaagtggacacggcaaaagagctaaggggcagcaaaaaggcaaagggtgagacaggcaaaggggaagagaagagaagacacagtcagaggtggccccaggagctgggggtgacagtgggctcacagagcccaaggccctgccctggccctccttcctcctaccccatgttccaaccccagcccctcagacagccctgactcgcaggcccagctacctggaggggcactaaacaggccagacagaaacatcagcgtcagcagggactgggaaaggctgcccaccctccaaggaggccctccctggatccccacagcaccccagcaggctaagaggctaaggatgaactcctttagagaagacagtctcatggctctctgacctgggactgcccaccaaagccccacctggcctggcagcttggcttggcctccaggaacctacccatcagtgtctaccaggtcctcctctgtgcgcaggctcagcacgtacagtgtggacatggacaccacgctggagccacagaaaagggtgaccgttagagctggagccaccatccagtgccctctctctaggacaaggctgtggtccttgctcctgaggctgggctcccaggtgatgcctacaaaatgggtcaccccagaggggaagaggcagaaaggcccacctcaccgagacctcagctgcctgatctcccaagctacatcctcctcttcccccaggcctgagcccatgggcagctgactccactgggcagctccactcccctagtcagccaccatgagagcccaggggacaagtcacctgaaggccatgaccaccaccagggcaatgatggttccctgcaggaagcgctggctgatgcaggcctggtccggaaccacggacgatgactgaggaccaagaggaaaagtgcaaatgcaaagagggccaggctgaggctgtccccagtgggctctgctggaggtcggaggagcggttaagggggtgccccatttccccgggggcaaagggagaagaaagagaaacggggctgggagggctacagagtcacaaggagagggaagcaccagaggcagtgaggctggagaactgcaagccagaaagggaggccacaagggaggccccctttccaacccgcctgccatccctgctcacccctaccttgctggccaccttggggggcctcttcttgtgggggacgctgcccgcccgactgaactggctccctgcatggctgcagcaagagggccaggatcaggggtgtccctgggaagaagggtctcaccttcccccaccccgcacccctacctgaaggcgcccgagctgccggtggacttgaggctgtcgagccgccgcagcttggccagcttgtggctccagcgctccagctcatcaatgcgcgtctccaggttgtctgtcagcttgcacagctccttcacggcccctacgttctccatgaagatgcgctcctgccatgggccatgggccatgggccatgggccaacacagagggcccagtcagccccgggagccccaggctgccagacatcagggggcaggaggggcggccactgtccttggccactgggaggccctcaaagtctccctacctgggcgggcccctccaatccagcctcggctcccacagctcctgtgcctgtctccgagcaacacctccacctctgcaccttcacctgggctgtcccacctgcctgaatggccctccccactccctgccagagctctcctctcctaagcctgaaggctgcagccccgggatctgcccctcggatgactggtgtctcagatgtcagcacttcactattcagctggggtggagacctattacatgcctccttggcgcccagactcaggacaggtaagtgacaaacgtcgtcctcacaataaaccacgtatttcagcctggaggtaaccatacgaggatgtctgtgcagttctattaccgccctcattttaccgggggtggaaggccatggccctccacagggtttctcttgcccttgatcacacaggctccaggggccaaatccctacccactcatctccttgaacactcaccccttccctgtggggtgcagagggcgctctggaggcagcatgagagccgagggtgctcctgcctctgctttgcagtgcccccagtatctatggaggtgatgagtgttccccagctggctccccacttgcctctgggctccctcccattcccccacccacagaccttgttcaccaccaggaagttctctatggttttcccattggcaaagaccatgtctccggtgtctttcacagcctcaggcaagatctccttcacctcctgagcgatgacacctgggggcaggggacaagccaaagatgggtgggggggtggtaaagggctactcacagctttgtaatgtacagtgggagcaagactggagagggtgaagttctggaacccagagatttggattccaaggagccctggagcagggagatcccacgaaccagtgttcacaggattgcaattccagggctcaggtgtgaggttcctgggctggggtggggcggattcctgggggtaaggatcccagggcaagtgggtagtattctggcaggttaaaggtaggattcatctagcgcgaagggcgagggtccctgggccgtgattctcagatttccactgacaatggggcgaggttccggggacctggagaggtgcgattttccaaggtccgaggggcgggacttctagaaggcatgattcccaggggcgcagttccgggagtcaagaggagtaggatttccaggtgacagggggcaaggtcactgaggcccgaggtttctgggtttccggaccccagtccgcaccagcccggtccctacctgtctctggcgcggtggcctcgatgcccgcgctggcggcgaactcgggcttgtatctgtagtgcaccagccgcatgcgcgagatcctcttcaattgctcggtggtgtccacctgcggggagccaggcccgggaatgaacccctcctgcggccgtcccggagcaggccccggagcccaggagggcggcagcctggaggctgcagtgtggagaggagaccccaccactggagtggttagatcgggattcgaggccagcctccctcccttccttcccccgcagctccgcctttccgcgtagtcacgccccctccccaggagccccgcccccgcggcccgctccagcgtctggacccgcccggcccccacagccctgtccccacctcctgcacgtgttccttggcgcgcaggtcggaggggtgcataagcgagcccatgaccttgacattcccgtgcacaaccagcgcctcatccggccggtctgtgttgatgcccacgcggccgtggtggaagacggtgtcgggcacctgtgcccgctgccacaacacatcgctgtcgctctcgaactggcctgggttggaggcctaccgcgagttggggctggatcagtcctgggggatagggaggggacctgcagggccctgggagcagggggaaactccacagcagcccctccccttccagccagggtttctcactgcaccaagcccaacttgaactgtccctcccactgtgacaactttttgtcacttgtgggatcccagaagctaccaggcttcgtccacctccctgctttactgtggagaccctgcagcccagagagggtgggagctttgcccaaggccacacagccagtgcctagcaggatgagcatgcccactcctgactctcagtacccgggtacttctgcttgctgtttctcccagtcctggggagggctgtctacgccctgggaggaggtggccctcacccgcacaatgatgcgctctgagatctgggcggccagcgtgtagttctggttctgtgcatgagcctggagggccaccaccagcatgaagtacctgggacacacaggggtctcagaagtactcatggcctgcccccgcccccagggccaccctttccctggccagatgcatgttcatctcaccccctcctacagaggaggaacccgagcctccaccagggggcagaaattccccagggcccacagcaagaagccagggctgtttctcaacccagaagccaggcttctgctcttcccatccttaagtcaatgaagggctctaaatctcaggtctctcatctgtgaaatggctcagcctgtaggactctgtgcctggtgtgccacccagggcagtgtcttcctgcctcagaaatggaggggctccggggcagggcccccacctgctcacctctggtccgggttgggcttgcccttcttacgcatgttgttagcggtggtctcgctgaagtgcagccgccccacagtcaccttcgtgacctgctcagggggcagattgaccctgcagaggagaggcagggtgctcagggggcagggagggaggctgcaagagccacgccactgaggggcacccaggccagcaacgtacatgaggcggacaccctgggtacctccctggcccctccattcccaagccagctttagttgtggacccttctaggtaccacccccaacagggtcagacactcacgtgaccgggttgaagggccgcttgctccggtctgactgggactgctcgatgttaatggactggttcagggcctccagctgtggggagtgaagccagtggcacctcaggatggggctacccggctggtcctgccctcctgccccctctcagccaggcctggcccaactagagctcaccaggaaacagggcagcacccagccctcagccgcgattcccacaagctcagatgccttctgcatggtcacacccccccacaccctacttcacacccacaccctcctcacccctcacagcataccactcccccaacttctgcacagctacgcatgcagtcactccccaaacacccacacccccattccacacccacacgctccccccacctctgcatgtatgcactcacacacagacacacacacacactcacagccccaccctccctcatgtccatacccacacacctcacagcagcctccaagcccatccacttgcacctaggcccactcactccccagatcctctccatacccacgtctcctctactcctccacgtgcactggcagagccatgccaaggtaccatgcctggctcactcatcacaccgaagccgacagacccagccatgcccacagggagctcatagactcaaaatcagccactactggggttgtgctgtggtgcctcccaatgggtcttaggggaggggcccctggggaggggaccagcatggagtctgcctggagaggagggatgggtgttgggaagggcatccaaggcaaagggagccacagggtggagggcgggggctgcgatggtaccacaagtggcagagctggagcggagggcagggcccccaaggcccccgtggtgcagcttggaagccggggctttgctgggaggacactgggggccttggaaggatagggagtgctgtggccccctgagtctcaagtggggcaggagttgggggtcccagctgctgtggacattccgacaaggaagggaggtaacccagaccaggggatggacaggaaagaggcgaggaccggaccaggtagagggatcttccagggcaatagcaaggccagatgcatgatgaggttggggaaagagggccctgacccagatttgcggctcaggtaaccaaggccctgcgccccattccctgagaggggagcccagggtgggaggcaagtgtgcagggagtttagtttgggacctggagctgaggcacctggtagagggcccaggagatgggtcttgactggggttgcagacttgggaatcacaggctggagcaggaaacggggcgagagggaggcagggaggcaaggaggcacagagtcagggtaaggtgcccaacgagagggaagcaggctgaggagtctaacgtttaaggggcaggcacagggcgaaagggaggcagggaggcaggttgatgagcccaacaagagggaggcaggcgcagggcgagggggaggcaggctgaggggcaggcacagggataaaaggcgggagggcggggtggcagtagcagtgggggagtttacacacacatacacacacacacgcacacagatgcttgcttttttttttttcttttttttttttgagatgaagtcccgctctgttgccaggctggagtgcagtggcgtgatctcagccccctacaacctccgcctcccgggttcaaaggattttcctgcctgcctcagcctcccaagtagctgagattacaggcccgtactaccacgcctggctaatttttgtatttttagtatagatagggtttcaccatgttggccaggctggtcttgaactcctgacctcaagtgatctgcctgactcccaaagtgctgggattacaggcgtgagccacagcatccagccaacgcttgctttttctggggtctttcagtgcccccaaagggccctcctgccctcccttccttgctgagccccaaacttgccttcactccgtgcagcttcagatagaagcagtcgaggggcttgaggccctcgggcgtcttgacgtacttgggctcgcccagcatgccgatgtacactgtcacctggaagtggttcttcttctggcacacaaaggcgtcgtcgcccaccgaaaagttgaagcccttgtccgcatccacgcggtaggtgagcatgggcctgggggggcgggtgagggcactcccctgaggccccagagccgggcctggaacatcggttcctcctacctgctgggttccaaaaccatttcccacaccacacccctgcatcctcaaaccaccaatgcggctgcccccactcctgagaaatggaaactgagtcccggagaggattctagtacagggctgcaaactcctcagacaacattctctcctataccccatgccttaggccaccgccccgccctggtgatgggggaagcagggccagaccctgaggcccaccagactggagggaactcctgagtgggggagggcttgactgccctccccacactcggctccttcccagaaggctgcctgaagccccctcactcacccgagagggactgtgtctgcagagcctcacagcgcctgacagctagttgccctggaaacggtggaaccaggcgcctgctctgctgcagacccagcccctgcccaccggcttgctcaagcccccagatgccctcattcccactccctcctcattcctactccctccgtctgcccggggagggaaggggcactcctggactctccctcagactcagcctcagtttgcccatctgttgctgggtttagtgtcccatgtttggcccctttgagacacctctagttgacagtaaaaagagcaactgggccaggtgcggtggctcacgcctgtaatcccagcactttgggaggccaaggcaggcagatcatgaggtcaagagtttgagaccagcctggccaacatggtgaaaccccgcctctactaaaaatacaaaaatcagccgcctgtagtcccagctacttgggaggctgaggcaggagaattgcttgaacccaggaggcggaggttgcagtgagcagagatcatgccattgcactccagcctgggcaacagagcaagaccctgtctcaaaaaaaaaaaaaaaaagagcaactgttggcctgtggcttagcgcaccctcactcaggtccccaggcacaagagtggtcacaggagtgcccagtgctggcctggcggaagctgggcagggagaatgcttccaaacttgtgggaagaggcctctgggcctggccagtgttgccaaaggcctgggctcaccacctcttccctcctggagctccacccacctgcctgacctagcaaagcacccaggaagtgcctgggccacttccggggctgcagctgccaagcttcctggccttggggcctggggtggcaagggtggcccaaagagtatggcagtaagagtaaggggtttcctccccatgccagagaggctggagtgccatacgactgcacccccacctggcaggacttcatgggacccttcagccaccccagcagccagatgcccccaggcctgggactgctggctaagaattcccccaaagcctggagcacccaactccatgcagctggtctaatccactggcccaggcctggcaatatccacagttaccctgtcacctgcccactggccttctgggtgagccaggggagtggtccccacagggctcccggcctgcggcctggaaagatggagccatctgggtgttgagggggtgctaggaatgctcaggcagcctctgaccggatcctccccagcccctcctccctccctctagggagggggctgccgggagggcccagcttgggctcagcttccggctaccttcctggaatgcagagggaggaggtggggaaggaggaaccgggggaaaaaacacccatctgcccacttctccctgacttggttcccagctgcccctccctggcagtcatcaccttctcagggaggcctggggctggcctaggagtcaggagccctgactgccagtcctggctcttccctgagcctgtttgctcttctgtgaaatgagtgctcccaggccctgctccaggaccttgatggggtcctgggctggggcgtcccaaggtgggggggcctggaggagtggggagtgttgtagggcactcacagctccttgtagttagcatcgtacagggtcgcccacttgttctgctgatgaggctgccacttgatggactggtagttggggtccaggtaggagccactgaggctgtcactgtcctgcaggaggcctggagggagggaacgcccatgtgggccctgcaccttgggtcccacaccccaccttgaagagttggccagccatgtacctggggagggggcacctggcgggtgccaaggcggtgtctggacacgggcaatgctgagaggcaaggaaccagggcccggggagagcggaccctggggaggccagggtggcgatggggctcgagtggggtgcagaggcagggctgtcacggtcccaggctcctgtttgatcattccattcagcatctgggcattgagggtgctcgggggggattcagagtgcttcctcttcttggaggggtgtgtagggagcctggggaaacagaagtgtgcgccgtgggggctggctctccccgagcccctcccactgggtagtatccacctctctcccctctctagcctgtttgggccaggatgtgccccgcccagaggacacctccttcaggaagccctcaggctttgcctcctcctactccccattgctctgtgctgtcattttctgcttctgtcactcttcgcttcccccagactgtggacaggagccacacctgacttggtgtctccatcatgcccagcaacagggctggcttacagaatcacagcaatcgcttgaggaatgaatgagtttgtccctgcctgcagtgtcacactcaaggtcaccctttatagtgggggctccatggagagcaggccctgtgatcagaaacaagccacagagggcctgggccacaaaaaccagggaaggggagcttccgcacggcactccttccccttctggtttacaaaatgttttgacagcagaaccttcctttgaactaaacctttcatggaatctccacatgtaaaacagatgaaaagacaatcgtgcaggttgagtcagagtcgggggcttgggtctaggaagaagactcctcagaaacctgagggttccatgagacagctgcaaaatcactggggtctgggtaagagcacagccccgggcccagtcctggctctgcccctggctcatgatctggacgggacatttcccccatcagagcctcagtttacctacctgtgcccaccagataaggtagttgtgagcaattagccatggctgtaaacccctcaaggtattgctgggtaaacatgtataaatatgttacccccatctgccctgcagagccttctgccctccctgggtgcatcccggtccctacctccctctctggcctgcccgccgccctgcccaccctggtccctgtaccccaccttcccaccccatggagccagccacccacgtcttactcagctccgtgctgctgcaggagctggtgcagcatctgggactgctgggtgtggtgaagatcagtgggcaccagcccctgccccatggcagcgtagtgggggatcgggggctcggccttcatgtacagatcccgctgcaggacagggtagtgaggtgggggtggtgggggtggcggggggcctggcaagtgggctggaggtgggggcggatgctccaggcgggagggcactcccacgtggcacagtgtctcaggggttatcgtgcgcaggaggtggggctctgcaggagagatgggggagcgggcatctgagaccaacctcactcaggctcctgggcactgtcctcccaaggcagagtctcctgcttccaccccgtcctgagccaagcccgggggctgccccccacctaccctaggtgggagggccgttggtcagccacctactagaggcctgggcagggaggcacaaacctgcccaaggaggggcagcctttcacctcatcctagccacctcctgcccccaggctggaccaggagaatccaacccaaatctaaaggtccccctccgtccccatctcctctgaggcctgctcctcctctgggcctcaggaaggcgtctccggagacccccagcccaggcctgcccagtgttcccctctccggcaggcagtccctcttctgggctctcaggggccagccccccagcctgagcggggaggccccagctccctttgttccccaggaggcattccagggatgtttttggtaagataaacagaactcttgaccccaatccggactgcggggagcctgctcccgcggtggttctgctcttggccacctgggggccagggcacccctgagcaccctctaaggtgaggtgggcccggcctgggaagcctgcacccaggctgcacccacggccttccccagccacccacttaccgccgaagggtgcgtccatgatggcgcaggcgggcaggcgggtggcatcaccgcggggatacttgctcagaggcagggccaggctccccacccgcccgtggggaaacaatagccaagcgccagggagtatttgaccagcgataatctcagcccgttgggcagccgctggccccctccctcctcccctacctccctgataaggccgccccaactacttgcccaaaccctggagcaggagggcggtgcccgctggactcaccattcacctgctggggggagtaggcctcggagcccgagtctgggggagagtccggcagtgtgctgcgagagccaggggaaggggccggggggtgagcagctgagcttctgccttccagctgggcagcttctctgcgtggtagggtcccacagccccccagaagctggcgacactgaggtttcgtcacatccacccttaggggcatttctccgcaccacccacattggggtgcctggcagggcctggggccgaattgtgggtaggggaccgcccaggatcccctcagacctacagggcacttggggggcagttactagtgtccttgatgatggcacagggactcaaagactcccgccccagaccaaaggccaggacttcttctctcttcctgcacccactgaagccccacagcttcctggaaacacagggccctagggggctgggcctcagggcattcagcaggtcatggggggctgccccaccagaggcaggtgtggactgggaagggagccagcaccaccgggcctgggtttatttttttcttgcaggtttcacttttatcagtgttcaggaaaaagaacaaactcaacccaagaggtcaacacgtcctgcgtgaaccctgtgctcacccagcaagtggaaggctgtggccatatgggatccagctctttggccatccctggtccccacatctggagcaactccccattcccatgcccagggaactgccagagaggccatggccctgttgtggacacagccctggggctggctccagagtccccctgcatccctgtgccagccacccacccaccttcggggcctcatgtagaaacctatacaacgattcaagaacacagaccctgcaggttttgtgtgaatgatacaaaaacgtgtatggggactcaaacccatactcctcgccacagcctcaggccccctgggctgccactccgtcctgtacttccctgacaatggccaggccttctgtaatgtgttaaggtctttcacaccctgcagtccctgcagtcccatgccccaagtccacagcaccttgtgttctctcctcttaagttcctctggcacctgattattcctctacttggagatgtactggtgaatacctctccccagttaggcttcaggagccactgcagagccgtgtgtctgttttttttcttttctttcttttttttttttttttgagacagagtctcgctctgtcacccaggctggagtccagtggcacaatcaccactcactgtaacctccacctcccaggttcaaacgattcttgtgcctcagcctcccaagtagctgggattacaggcatgcgccaccacacccaactaatttttgtatttttagtacagacagggtttcaccatattgcccaggccggtctcaaactccaggcctcaagtgatctgcccacttcagcctgccaaagtgctgggattacaggcatgagccaccgcacctggccttttttttttttttttttttttgagacagggtcttactctgtccctagcagtggcatgatcacagctcactgtagcctcgacctccctggctcaaactattctctcacctcagcctctcgagtagctgggactataggcacacgccaccacacccagctaagttttgtattttttgtagagatggggtttcatcatgttgcagactggtcttgaactcctgggctcaagcaatatgcctaccttggccttccaaagtgctgggattacaggtgtgtgccaccacacccagcctcatgtctgtcttgtttatcacctagactcaggtctggccctgggtcccttcctggagtggccctgcccacagagtccctgtgtggctctggacaagcccctttccctctctgagcctcagtgtgccattaaaatcctgacggtagcagtggccagggctccttgtggggtctcccaggagctggatacccaggaaggctgatgagctcacgcaatcataggcacatgatacagcagtgggcaccagcaggcgcttaccaaatgttagttctcctccctctgcccccaggggcctgtagtttaggaacagcctcacagcctcaagcaaacagtttgccttctgcagcaaaggttcacccctggcaccccaagcctggcctccactcccttctccccaaaagccagggagctcaggaagcacggccggccatgtgtccatggccaccatgcacccagggcatcctctgtgcccttgttgcttcccacgataatcttgaggggtaagcatttgagggctcacttcacagaagaaactgaggccatgggttaccgaggcagacggctgataaatggggaagctgaagttggagccaggctgtctgaacacagagttcatgcacctagtgttttaatgctcttccacccagagacaggggcccctacatttgccctgagctcccctgcagacccatgctcccagcctcccgctgtgagcatgtgccccgggagctgccctggagtctggctggccgggtggctgcctggaacctttggtcaaagccaggcctaaggttcagccctgggtcaggcccttggtgtggactcctcagaaagatggggggaagggcctgggttctgggccccatgaggcttgcttgggtaggggggaactgaggtgccacatctgagccatgggccagctcctgtggccacagtacacgtcagctggatgcgtaagtgggtgggcttggcgcgcgtgcacgggtatgcaggtgttcccatgaaggtaaacagtcacagcctccagtcccgccgcttcctgtccactctccacacagcatcgagatttttctagcacttacgtcagccctcatcactcccatgcttggaagctttgtggctgcccactgcctcagaacaaagcccaggagtccccccttgacctggactcatcctcccttccctcacctgcccacgcacagccagtcacccagcccaacccatgccaggccagtgtctagcacctcccaggtcacggccacagccctgctccctgcctgcccctatgccgctgtatccccctactccctgcccttactcaccctggggcatagggagccttgggctcagccttgatggggggcccggtgccccccgggaagggcttgggggcagcgcccatgccgttgttgttgttgcagttcagcggggtgccgtagcccgggggtgggaggggaccatggcgccccggggagggtccacccccaggggggctcaggtggtggaccccgctggagccaggcatcgcaggctgcccgtgggagtaggaggccgagctggctggagcagagatgtcagggaagcagctgcggggaaggggggcggctcagctccagccaggaccccagccccagcagggaagtagccgccccctccctgcagggaactatggagatttcggaggagtcagtggctgggaagggacgaggagcagctttcagaggtgggaccacagcagaccccaggtccggccctcagacctccctggtgacagaagggaggcgaagggctggggctgggcgggtgcaggccgggcgagggggccactcacaggtcggaggcatcctccttgctgatgtactcctccaggatgctggtgtctatgttggagggctccagggcaccgttgatgtcgtggcctgcagggcaggagagatgggctagggaagaggcccagctccctgcagaccctgggcttcagggcccagccctccatccctgcccaggctggccctccaaaacagatgcccctgctccttcccacccaggtatccatgtgggggccggctctcaccctccactgcctggcacccctccaggaagcactgataatgcccccccgccccaccacaaggccaccttgagtctcagaggaggagaggggcccagggcatggatctgggtacagagaggccgatcctgccatgcctctttctagctgtgtgacagggaacaagtcctttccactaatctgtcaaatggggtcactgtgcctctgtcttatggggtgctgtgaggcacaaatgaggtgcttactgagtcgagagccccgtgggtgcccactgccctcgatgggatggctcggacccaacaggcactgtcctgccgtgtcctccaggggtcagtccagatggcccagctccaggaacgcaggagcacgaggcctggctgagtgggaccatatatcctgggggcccacagggctgtgggagtctcctgcacccaggccctggccgcaggcgggagtggggatcagaatcaggagagctccctgcaccctcattggatatgcccatcaccctgttgggcacaggcgggggaacttagccccctttttccagaggaggcagaagcctagagaaggaagggcttgccccggcctcccagcagggaatgatggccgccagagctccactcctctgcctgccgccctctcctgggccctctgcgctggccccggccccaccaaggggaggggcccctagaggaaaggcagccagggctcttgggcatcatgagggaggacgggggaggtgccggcctttcccctcccagggtcaccttgcagggggagccagagggcggggtgataagggggctgacgtgggagatgcgtcaaccccgataatggaggacagccccacccacacggctgacccgggctggccagccccactgaggcaggagggcccctcccacaggcctctggagcctgagtctggggtctgccctctcctgttgagctcagacaggtccaggaacaaatcctggctcagccactccctgctgagtgaccttgggcaggtcacatgcactctctgcgcctcagtctcctcattcgtgcaatggggacatgtacagctatggcttcaaggggctgttttgagtatgaaacgagatgaggtgtgtgaagtgccagccactttagtgggtgctcatcggtcggaacagccgtcctcacttcccagccccagagccctggggtccccgggagccccccgcccaggcccctccctggcctcagccggcatttcaagaatgctgagccccgcttaggtgattaatgagcggctaagccctcctaggagtcacgcgctgcctgcgacaggccagggccctcctgctgacccccacccccagctcgcccagctaggaacaagggacacccaccacgcaccaccaatggccgtccagggcggtgtggccggggcaagagcagcttctcgagctgggcgtggccagtctgtgtgcctgggttccaggaccctgcctctgctcaagccccaccctgctgtaaccacgggtcccatttactgagtgcctactgtgtgccaggcattttgtgaatcaaatacattaataatcacaggagtttctttactttatttcttttttttttgagactgagtcttgctcggtctcccaggctggagtgcagtggtgcaatcttggttcactgcaacctccacctcccaggttccagcgattctcccacctcagcctcccgagtagctgagattacaggcgcccgccaccacacacggctaattttttgtatttttagtagagacagagtttcaccatgttggccaggctggtcttgaactcctgacctcaggtgatctgcccgcctcagcctcccaaagtgctgggattacaggcgtgagccaccacgcccagcctaatcacagaagtttcttatgcgcaaggcatcctgcaggctcttcacctgcggtgtgttactcaatcctcccagcccagaatgctgaccatgacagagacagtgacttgacagtggctcatagtgagtatctcccagtgcttctcaactcatcatggcgatgatgacaaagacagtggtggtgacagtgactgcagctcacactgactgcctaccacgccagggacgattctaagtgctttatgcattttccctctctaaacagtggggatgttcagataggtaacataatcaccatcccctgttcagagaggtcaagtctcttacccaaggcaacacggcaaggaggattccaaccaggtgcaggggtctgactccacgagggagagtgtgactggcggttgctgtgccttccccaccccacctggagcgtcgcccccaccctggccgctgaagctgcaagtttttgagcctgaacttggaatctacggtgaatgatgggctgatgcagtcatggtgttgctatttataacagacccagccccctcctctcctggccaggagcactcctaatcgcccctaatcctcctgcccacctccctcgggatagggggcctcaggcagaggcatcctgggagaccctaacgagaaccagatgtgctttgggggaggagggaccctcccgtgccagggtccgggcggacggaggatggaggaaggaggcgggaggagggaactgatggggcagcgttgcggggaggccagtgggtggggaagaagtttgagggttgggggctcggagggcctcctgaggaacgctgaccccacaccttctcctggaagccctggaggccgcgtcgtctctttcccacgccgctcggcccccagcccgcccgtgaaccacactggagatttctaacagactttccaggtggacaagacaagggtgggggcttgccgaagctgggatagagcccccaagaacccaggacaggggcagggtcccatgggcacactctcgggagcgcccctccccactgctcccaaaagagccccagaacatcactggagcccaagcaggggtacctgccaggcaggaagcggaacatgggccatatggctcgttctgatcctcaagacctctctgagagaagggaagccgggcccgccagaggctgcccgaggctgcccagggcccaataacccgaaaacagcaccatgagctcacaaaccagcatctctgtccttcccttctcaaacccttcaacaacttcccactgctggggagacacccggagccctctggcagtccaaggcctgacatggtcccctgcctgcccccgacagccttttctccttccccaggtcccctgcctcccctcctctccgtggtcagcccttgcctcctttccatcctccatcccacatcaaggccttcacacatgccattccatgctgttccctaagcctgagaaagccaggtcctattcaggctttaggttttgtcttaaatgtaaattcccccaagaggccatctctgactctcccattctgtttagcaagggatgggcaggggcgttgtaattcctcatcagttctttaccttcccgcctacacacaccccgctgggcaggatgagtgtctgtccaccacccgcccaccacccacagctcactcgcccagtggccactctgtgcccagccctgtgccatgcactttacatggctcatattgaattctcatcccaacctacaaggtaggtgattttctttttcttcattttatagatgaggaaactgaggctcagaaaggatgggcatgtgcccatagcttacaggggcaggcactgggctatgagcgctgccctgttctgtctctctgggatatagtatcccagcacacagcaggcacccaggaaatgttcacggagtggatgagccaagtggccagtgagggacctcggccaggccatgctgtggccagggccggggctacctggggcccctccaggtcctgcccctgccctgctgagctgtgtgcctcagctgctcctcattaattaggccctttattacctgcctggaacaggaaccagacactgccccttcccaggcaggctgcgatccagactatgggaaggcagccccctcccctccgctccgctcttctctcctcgtctccttaaggccaccccagctggccaggaaaggaacggagggcacccaagccaggtgcaggatgagagcaggcaggggcccaggtggtccctccacccaggacccctcccttccgcccctccttgtgcttatgtgcccccccccccaccagctgtggccgttggctgagtctcggccattgtcccggggaacgggggagggtggggacacggcacagtgggaggcttgtgccctgcccaccccctcccctgccccgtcaatgaggcacttgtcaattcatgccccaaacatggcggaaatcccgtcagccacgtggctgtgggtagggtgggccggggcccgaggatgctggccaggcttggtggatctgaacctggggtgcagaggacaccagggcccaggcctatttccgacaaccccagttgctctgagtgtcctctcagagcatctgaacctgaaggatgccctagcttcaggcagcagctgagggccagggtggtagcagtcaagggacagcccacctgggcataaccacgatgcccagagagacctccagagtcaaagaggcctgttttctaatgtggacttcccacttgatggctatgaccctcagcaagtgacctgagccctggcttccttctccatcagatggagcacgaatccctgccatggagtgaaccttaaacgaggtgacccccaggaggccattccgcagtcagggtgaaccgccctgtttccatctctcttaggactcccatctcctttcctgcctgcacgcctccgcccaggctgtcccctctcccccaggcccctccgccttgctgcacacgtgctccagagcctccgagggacatcctcaccttctcctaagtccctctgaggcatggtcagcactctgctgctattcttacacatgcacagcacagtccagcctccgggcctcggccccagccatcccttccagtgggtcagccttctgcgactgcctccctgcctgccctggcagcccctccccatcgccccagtcacagagggcccccagtgctgtggctcatctcccaaccagtttacatgggggcaaggcacagtggcctcacctcctttggtttgggctttctctctttattaatatgatctatggccaggcgcggtggctcacacctgtaatcccagcactttgggaggccgaggtgggcagatcacaaggtcaggagttcgagaccagcttgatcaacatggtgaaacgctgtctctcctaaaaatacaaaaattagccaggcatggtggcacgtgcctgtaatcccagctactcaggaggctgaggcaggagaatcacttgaaaccgggaggcggaggttgcagtgagccgagatcgtgccaccacactccagcctgggcgacagagtgagactctgtctcaaaaaaaaaaaatctataactgctagctgccctgcttcaggcttcaacttgtgaccagagccgtcttagtcaaaatgccttcaggtcagatgtttgcttgtgcaagcaaccctttgcctctccgcatcaaatctcagttagcttgggcccagcagccacacctgacaaagatggggctcttgagccgtttttttatcaggttcttcgatctgagtcacagtagtctttgttctctcccagcttcttaccaaaaatgcagaagagcccccacaggctgcctacagagacccctctcttttttttttacctttctttttgagacaaagtttcactctgttgcccaggctggagtgcagtggcacaatcttggctcactgcaacttccgcctcctgagttcaagtgattctcccacctcagcctcccaaggagctgggactacaggcgcctgccaccacgcctggctaattgttgtattttttgtagagacgggatttcactatgttggccaggctggtctcgaactcctgacctcaggtgatccacctgcctcggcctcccaaagtgctgggattacaggcatgagccactggcccagccggagaaccctctcttctaggagacccagaatctttagccacccttgggctatggctacatccactccaagtccccatgaagctgccgccctgtcctcaggtcaacataaggctgaactcacagccccaagatgctccaaagccaggtccaacagcaccgaggccagcagctgcgacctgttcctactctctcccacagggaccagggcaggcaggccaccaggtgccaggtagagaccctgcagcttggggtggacacaggtctccaccagggtcacctgtgcccatctgtgcctacacaccggtgtggccccacgcaggcacactgccaacacacacacatatatgtaagggcacaccctgcagtcaggtatccactgacatgcgcatgatcacgtaccacctgccccctactcacacatacacagtactgacacacagtggcatgccccacacatatacccacacacatgcgcacaccagcgttcatccgtgtgccttcattcattcagcagttatttactgagcacctgttatgtgccaggcaagcatagtgcccagctttggggctacagcagtgagcaaaagggacaaaagccttgcccacatggagctgacattctagggagcagagtcagatgacgagagcagcaaaatgcctagcattctagaaggttccagatggcggggacagccggtgcaaaagccctgaggtacgagcatgcctgtgcatgttcacacctcagcacacttcacaggtgtatatgccaggacacgcatgtacacaaacgctcactgacccgacgacaggcccaggcccacaggcacagcgtcacatgcatgggttaggttagtggccacccaggaagagctcccacctcctcttcttccctccaagccccctccccgcctgctgtcagaccctccctaagcagctccggctggagccaggccccactgagtgaactcagtgtcacaggcacaacttccctcctccaagctagcagggcaggggatggggatccccttgccccagccatggagggagaagagaggggagtgagggaggccggagggagataggatcctcaaactccacaaaggagagacagaggctgtggttgtgcactctggcggctgcacggaccccggtcagctggagggagaacttccctcactgatgcgacctggggcacagggaggacagaatgtccgggagccccctccatactctaggccggcagggggctccggacccaactgtactccccacccaggggctttgcccctcccccctcactccaggccttggcactcgtgggatctaactgctaacatcacccaaccttgaccatgtgagtgagggctctgaggtctagagaggtcaaggaggctgcacggacatcacctggcgtggccacccgtgctggagccacccctcagcatgtcaggaggagaggccccttccctgcccatcccaggctggcacagagctgggacccaggctccagtcccagctctgttgtggccaccttgagggagcctgacacatcatcgccttcctgtcctgcctcacagtccccctcagaaatgggaggccgtcacccacgcttccactgcaccccaggactccaggaagacaacgtgcaaagagcctgggtgcagcagatgaagtcacaatacagccaagcccctcctccttgctggcagcaagaacagaacccaaatctcagagggggaggtggggcgggccccactggatgtgccagggaccaggaccaggccacgctgggccagagctgtcatggttcaggccttgcacacagaaccacagaacatgttcaacaagccccctaagcttaggggcactgacctaccctggggactagtaatcttcaaggtagggcgcagaacacctgccatggaccaatggagtgttcaccaggccaggcacaatcttacctaatcaccccagaaaccctgggacggaggccctgccattacaactgcactcccgttttacagatgagaaagcggaggcacagcggtgccctgatacggccaagagaagcactgtgggtaagcaggagagctaggaacagaccccagctgccctcgctggcgaatgcacagaaccattacatcatcctaccccgagacccaaccaagaggtacccacaccccgtggcagccggggctgaaggcctggagataggagaggaggccccacatactccagcacccaaggcaatgagagaaactgaggcccaggaaggtgctaggtccgtgaagaggaaggtgggaaggtaaggcaggctgcctgggtagggcggggccacccagttaatgattcagttaataatttctgctcccagttccttatcagggagggcaaagtccaagggtggcagccaatgagcagctctgctgggctgttacccagcagcctctgctgccagggccctccagtctgtaaccccttgggagttggtaagtggggagtcaggcccccagggaaaaggccattctgccctcaaatgccctccttggctctacttaagaccccaaggagcactctgtccagccttccagtctcaggagagtccctgaggccaaagggttggtaactgcctgtttctcacccctgcactgaccccaggccctccagagaggtgctttctggggtgcgtcccccacccccgccgcctctgttcacatacccattgttgtcaccattgacctggagagcacttcctgcccaccccccacccctgccctgcactgggtgctggggacatggggatgagtcagaccccctactaccatttcctcccctgcctgggctcaggaaaccctgtgcctggccacccctcccatctacttactccctgggtgcaccagggacagacagagacaggctgacacgggccacagtgccacccccatcacgaagcccagctcagcccccggattcctgtccaggtgggagtcctctcttccaaatcatcaggtagtctctacctgggacctcctcctgccctctggaggcagagatgttggtccctgacaggtagccccctcaaccccaaggtactggtggcagagtagggagctgggggctaggtgtccactctggctaactctggccaactcccttctctctgagcctcagccagcgccattcccctccccttacccatcccacagccgggaagggtggctttcaaaccagtatcctggtgcttcaggggctgtgaggagcccagcccccattatccactgtatctgtcctatcaggagactatgagtttgtttgatggttaaaaaatcacattggaagcccctgctctggtccaacccacttacttaccctgggaggggaatgaggccagagaaggaagtcaccagtccagccacccatcagcttcagaaggggcgaaatcccaggcctccctcctccagccctggtggggctccagaggccgggcagaggcccactaaactccaagtggtctttccagcacctgctggaaggcgacttccctccatcctccaaggcccctgcacacccacctgctttctgggggacactggttgctcactcgagcctcatgtgcccctagaatctagggccagcaggcaccccttccaggctcggccattcatactctaacatgtctctccttcccagggctgggcagtgagcttcttcagagctgaggttcttctctgccaccccctcctgtcttgcaggtgaggaaaaaggacttaaagagggcaagagctctttgggggttccctgccaggcacagacggtcaccccactctcagtggtccagcctgcaccagaactctgaggtcctggcaggattctcagacactgccctgtcccgtgcctgccctggctctggagtccaaagcccccttataccatggcccggttacctgctggaagccagtgcatcctgcccggtgggtcccctctctgcaggccctgtgcccgccgatctgggctgccttgcctctctctaggggattagccgggcggtcacgggggcccggctgtaccagcctcgagggggccgctctgtcccggcctcccacctgaggtccaaagcgccttagcccccagcccaccaccggcacagggcaggacccagcacctatgcttggtgtgtgcccagggagggggaccacgtcaggtgagggggcgcgctgtgctgcagccccttcggtaaaaccctttcccagtctcccagcccagagccgagagcacagggactgctacccactgtccagagggatgaccaaggccaagtggggaccaggatgagagctcaggtgtccccagccccagccccgagtgtgacagcactcaagagtgacgcagccacggctcaaaagcacaacttcccgctccctcgcacttcacacactcacaagcacaccaggccctgccactcccaggccttctctcacacctacagtgggtcccccacatgggccttcccctcccaagtggcctggagaccctaggcctcaggggccacccacaccttcccccatcgcaggggctgggagctgtttccagcccagccctcctagacgggcagcctcacacccctcccctgctccccacagacattcttgagtctcctcttatctctctggagggagtagcgcagcctccccccgccaggccgctgcatggctaagccgtggcgtcagcccccaccccccaacccatggtcaggagggagccagggagtccaggccagccaggcccacccctctgctctctgtcagggcccagcgtcctggggcaggcagtgtggaggtcaagggagcctggcctgcgggtcctctgggtacctagcaggctcaaggcactccagacagtaacccaagcaagcacgaatgtctggtcccctcttccctgaaggtctcaaaccgcgtcaggcccctcgagagctcctatggatcaacagtgtctggggagagccagagccccgggacagatgcagggctgcctaagaccctcagatggcccacctgatgcagagtcaaccattcaatctagtccaagcctgaactcttgggttctgggtctgtggggtgtccagaatcctggagtgggatgactgaggcttaggggtgcccctgcctgggctgctcagccagcaggtgtgaacaagggttcctgcctcccaagtcacagagggagagaaactgaggcactggaagacctgcttctctcctccacaggactccacaggaatctggggcttgaaacttgggccttggttccctgccctgtagccctgataggttcacacatgaagggaaggttctcaatgcaccaaggagcaggatgtggccttagggactagagggagctcggggcaggggctggtctcgctgcattggtagacaggggcacaaaagggggccagagggtctggctagatgttccagggaggttctgagaagcggagtgggctgggaggcagtcagccagaacttcccctccccctcccactgtggtcccatccctccagaacccagcaccaggaggagtggtggccctgcaggaggggcaggggtcgtccaggaaaagacagggagttggttagatggaggagcagacctccaaaaccaatgtaggggtgggggcagaagaagatattatggggtgtatgtcaattccaccccagagggctcctttcggtcaagtgggggtgaggtcactctttgagggggcgaggtcagagaggcacagctccagggttggggggacatagtgctgaggagcctcagagggctggtgggatgcagttcacagcactagaagggtctcagagagcagaggtgaccggtggcagggatgtcagcttcaagaaggttccagccccaggagagcatgctagggaggggggtcccagccccaaacaggagagcagtcactaggcagcattgtggaaagcaggtggcagtctccaaggggatccaggctcgaaagtggtcctaccctcatggaagcacagtggggaggtcccagctcctagaagtcatgggggatggcgccaaccagaagggcacacagggggtcttggtctctaggcgggggtcacagattctgggaagcaggctggggtccagcctcaagaggtacggaaggtcctagaaggcacgccgggggtctgggccttgaatggggttgtatcccgcttggggttctggggaagcaaagtagagggtccccagactcgggaagtttgctgggggcgagagtgtcacaatttagggaaagttccgggtcctggaaggctcaaaggagtccggacctggaaggggacacagtcccaaggaagctgcgagttgaggagcggggagggggagcccaacttcagcggcggtgggtggtaaccgctgggggactcccagccccgggagcctgtcttggcgggctggtgccagcctgaaggagggtcccagccagaggaggcggaaacacagcgaggagccccagttcccggggagatcagccgggggttcccagcgccagagggtcgccgccgccagcccgcggtctctcaccttcgaagaagcgctgcagcgcctccgtctcgtccaccacctccatgtcccgcctgcccggcgcacactccagccgcggccccgctacagcccggcccgggggcgcggcatcgccggcgcggcccgcgcgacagtcccggctgggctccggctacggtcccgcccggtccgccgccgcgcttgccccccgcgcgtccctggcccggcccctgcccgccccacgcgccccgcccgccgcgcccagcgccccctgccggcccgcgccgcgcccagccccgccgcgggcaccacgctcccgactcctgcaggcggcgctcagcgctgggcagtcctaggcttgcggggcgcggggccgtcccgggtcgggggacgcgagaccgtcccaggcttgaggggcgcggggccttcccgggtcggggtgggggcgaagggccgcttggcctctgtggggtcgggactggaagggtgtgccctcgccgtcctcgccttcgtcttgcacgggacaagatgtcacgattccgaatccaaacctcagagacagcccccatccctctcgttagccacccacacaccccgctcagcaacaataacaacctgcatttagggaacgtgtgttatgtgccaggccacacaggcattatctcatgtactcctcacaggcaccttatcaaggagatgctgttgttacctgcattttacagatggggaaactgaggctcagtgcattaaggactgccaggaagccctgtcctgtggctgtgatgatggaaatgttccctgtgttgttcagtatggtagtcactggccacaagtgagcactggaaatgtgcctattgagactgaggaactgattttttcattttgtttaattgtaattaaacagttacgtgtggctgtggtattggacaatgcaggtctaaaagctccttttttttttgagatggagttctgctctgtcgcccaggctggagtgcaatggcgcgatctcagctcactgcaacatctgcctcctcggttcaagcgattctcctgcctcagcctcccgagtaactgggattacaggcgccaccacgctgggctaacttgtatttttagtagagacggggtttcctcatgttggccaggctggtctcgaactcctgaccttaggtgatcagcccacgttggcctcccaaactgctgggattacaggcatgagccaccgctccccgccctgcctaagagtttcaaggtcattaaagttcagagccaaatcctggctgccccgggaatccgagctctcctttgccgtggccctgtctggtataatgaaacctggaggttctaactcgatataagtccaggataaagcggttgtccttgtgcccctgccttcacccttatgactgactgcctccacatctctgtcctgcccaacttgcacagcctctcgtctcactgatatccccttcagttctcccaaatcaccctttctgaaacatacatccgatcatgtcattcctttgcaaaactaagtttccctttgcactcaaaacaatatctgaatgtcttgctctggtttctcaggccccgcctctaccactggcctcagctcttcccctctctccattgctcactgaataacagccaccaagacctccttgccattgctcaaacatgcaaggcctacacctgccacagggccttggcacatgctattccatctgtttacaatgcttgtctccacatggctacttctttgtagcagttggtctcagctcaaatgtcatgtccccaaccagcctacctaaagcagttctccctacctaggcctttcttgctcaccatgtaaaagattcctatttagtttctgttattatccttcttgctctagaatggaagccctacgagggcaagatatttttctgtatcggtcactgctatagcttcaacaccaagaacatgacctggcacacagtaggtgctcaataaatgtgttgaatgaatgtatggtggcatcttcaaactaccgaatccagtcaggcttcagtggctcacacctgtaatcccagcactttgggaggttgaggcaggaggattgcttgaggccaggagttcgagaccagcctgggcaacatggcaagaccctgtctctacaaaaaattaaaaaattaactaggcacggtggcacatgcctgtgatcccagctactggggaggctgaggaaggagaatcgcttgagcccaggaggttgaggctgcagtgaggctgcagtgagccatgtttgcaccactgcactccagcctgggcgacagagcaaaaccctgtctccaaacacaaacaaacaaacaaacaaaaatctacagaatcctggacctctgaaaccttgggagcggataattctggaatcccagacctagagaatcatcccgcttcagagtggctcaacttgaagcctctcgggacccttcaaggcagcacgtaaaagctggaaaaacctaccccacccaaccactgtttgacaagccactaaacagaggccagaggtgtgggggactgctggcagatcaagatgccaacgtagccagcttcggactctcacctctgccttgcagcatccccagggagggtggggcacaagccaggccaccccgtggggatggggtgagaggcctggaagccgctcccaccccagcctccctgtcagttctcagtggccagccgtgggggaggggcagccaatgcctgagccccagatgtggcccagtcagcaggcccatggtggcccgccgaaaagggtcaatgccacgacagttctggggttgggggagggggtgctgaggccggcgggtgcctcacaatgaggttttgtccctctgggggccgctctcagagctgttgctcttagatatatagaatgggattttgctggaggccccagctgtgtgtgctgaccgcagctccctcaccgcccccgcaggggctgggctgagaggggggagaggggccacactgagactcctattcttttccagctgatacaccccagaggtttttctccctccgcagactcccttaagacaattgttattctccaccctgcccctcctccacccggggtcaggcctgcctgcggacaaagtagacacccgcctacaccacgcgattctgagaaacggatttacattacgagtcgcctgggaccagccacagaaccagcttctctacaagcctccacatacccacggatctttcctccgtatcccacatactgcataactgaccatcatctaagttctcaccaccatccgttgagctacacattgtccctgtcctggtcagcaagggctggaggtagaagggaagactcgtactttgtccctaacgccccaactccattgcattataatcaattaagagtatagattattcaatctctagggtagccttgaagttggaaggggtggaatggagcctcctgttaaccctgtagcagctgacctggctaagggagctcaggccctgccatctcccctgttacactaggtcactgagcaaaggagcaactgtccccagggattttcatctctggactggaggaaagaggtggctgaaatgtcccagactcaagggctcagccaagagttgaggctgccatctgccaactccataatgaagttgggtcccaagcagcgctggggcagaggctggggcaggaaggtggctgggccggtgaaagtagcccaggggacttgcatacaaggacctaggggggcccatcaatggagatgagtcctcatctgtgcccctggcttctctaccgagccacagtgagtgaggggctgagatttcagccctagcccagcagacatggctgtcccctgtagccagctccacctagtccccaaggcctgccctctgtcctcagaggcctcatctataaagcacactcagtatccctgccttacagtggaggtaaagtgccaggtcagtgatcagtaaatggtgccctctccagttccaatcagctctcagcacccatcactgtcccttgagtgggagcagggccaggaggaggtggtagaccgaaggcagcactggggagagggatgctggcacctgagggttaatgggtaatgggcgtagaggccagcccaggagaaggtacagccctgtcctccccaccgtgggactctcctggcctcctgtggacccacacagcactggcatcaggccatttcgcagaggaagaggagggctcaaagtggggtgagtgtcaatccagcaagccagtgaggctggtggtccagcttccccggactagggcccaagggcacacctgagtgtggggtcctgcagggtagaccccttcctgactgcaggggcaccgggacaggagggggctgctgcaggtattgagtggagcgtgaggcagagtgcctctctagcccttcccagcactgccctctcaagaccctccccaatgccacaccctggctgcagccccgggcaagccacagagcctccctggccttcagtttcttctgcctgtgctgtgctcactggacaggataatttgcagaccattgagaccactgagggcaaagaacctctgaaagccatcaggtgtggtggaggccagagtcctaggctgagaggccctgattctggtccccagtctgtccccacctcccatgcgaccttgggcaggtcttcacccttgtttggcccgtttctgcttctgttcagtggctgtgggtgaagacaggctctaaggctgggggcattcttctatcactctccccagcccctcaccaaatagagccactggacactgggggccgagatgggggcagggtcaggggaagggaaaggtccggtcagcttggctgggtcagtgccgaggccagactctgcggccaaggcgggactgactggctgaacagcgccacctgctgtgtagagggggcaggccccaccacctgggccttccagccactccctaggcctcactgcccggaagctatgctggcctggggttcctgggctgcactgggtctggccaggtattttgcgccctctcaggaaagccctcagcaaagacttctagtggcccctgcatttcagtgctgtcccactgggatcttccacccctgcctgccctagctgtctgcattgttggggagggaggtgggcatggtcagactagcctggtcccccagtcgccagcttggcagtcttgggcagctaatcctctcagacccctcagggaggaaggggaggccagcaagctgtatctttccaggctgtagtatgaacgtgcacccgctggtacatctctcacacaggcaggactccgcaagtggctgccctcattcacagggggcttcaagggtcttctactccctccctgcaactcaaagtgtggccccgggccagggcactagccgagcaggagcaggtaagaaatctatacctgggccccaccccggaccactaaacccgcacctgcatttagcaagcgccccagtgagtcatgagcaccgtgaactttgagaaacgaagttctaacccaatacagacaaagggctggacctgaaccacccaaacacaccctgcgtcttgtgggtgaaacgggctctggtcccaaggaatctgtttcccccttaggctttctgttccatccagggaacagtggcagaggcccccccggcccccggccccatgccaaccccctgctctgctgcaacctcgacatcaaatttctacccagtccccacctgatgcaaagacattcgaggcagccagcgtgcttctacatccagtttatacacagctctatacaatatacagaaacctttatatacagatatatttatagaataagctatattaatttgtctctcctttttacagcaatattagtttggatctttcatacattaagtacaaaaaaagtctggggagaatggcacgtaagagagtgcatgagggtctgtggggcccggctgctcgctactgattgcatatggagtcgcccaggcccctgggaggacaggcccgcgcacttgtgctgcaggtctggggatggagtgggggtcggtctgagccgaacggggctgaggggggtggctcagaccccccagtgtggtatggggtggaggagggagacgtgcagcaggcccatccttcaagggcaaggtgggtaggagccaggttaggggtgggctgcccctgggtgcccaggattgagcccaagcctgccccagccccaagcctgaaacatggtgtggctgcagccttgggggtggggggtctgtccctgatggctcgtcctggggtggacgacatgcccacattagaggtcccaggacccaccctggcagaggaggaattaaaaggccagacatcaagtctctccctgtgactggccacggtgcttgtcagatctttcatctgagagtctgtcttgttttctaaactctaagagccactgattttgtcttgcttctgtgctgggctgaagctctgtatgcctcagcagggccagggtgtcctcgagtctggtgaaggcgggagttacagaggatgaggggaggcccagctccctctgtcagggtgggcaggggctcccaggacagccatccaggccagtcccagctgtgtggggagccgggggccagaattcaggcccccaggtaccagtgatcatgagagggaggtctcttggtcgggggagcctaggccacccagggaggctgcaggtggagccagaatgggagggaccatgccgctgcagaatgaaggcacgagcaggcggtcagccgtgcagtcagcgcctcggtacacaccagttttccaaaacgggtcacagcagcaggcgcgatgggaacagatggtgcctaaagctgagcttgtccctgcgaccctgcctcaaaggccccatcatgctcccctaccgttttcttggcaggctgggaggggcagcaggcaggcagggcaggtagggtgggcagccccagaggccccttccttaggaacggtgcacactcatgcacatgcatacgcgccaacactagcatgcacaccctcccaccccgcttctggggaaactccgggtcgctatctccctaactgcttcccaaacccagcaggggaggaagccctatggggacctcaggctaaaccgggactgctcccagccccaggcccctccctgggcagtggacagaggtctccagccaaggcccaccataccccactcttggccccacctcctaccaacaggacattgggggtgggagggaggaaggcctgctcccaggagggtgcccaggccagcgaggagggaaagctgaggggaacaggggtgtgttggttccagatcccagggcccagagctgcctaggcgtggtgggggtgacaccaaggggtgaggtggggccctcagaggaagggggctctcagtgccttccttccacccagggcactgactctgcagctggggtggtcacagcagtgcccaccaccctttgggtggtgaggatccttgggggtagaaggtaagccaggaagtagccagcaggcagggcaggcctgggtgcccaggacccatgggcagaggaggcagcatgagaggcacaaggcagagaaggggcggccctgaccccaccctcctctggcccctccaggcccctggctgccttgggccctgctcagaggacggctactgaacacatgattgggcggggggcttgcaagcccagaacacatcctgagccaagcccagcagcttctgtaaacatgtacagcactgcaggccacctcggcaggggcaccccagggggccggccagcaggcaccagatctggggggtggccaggacgatgccggcctggaccacagatgagaatacatgtgtcggggggcactgctctccacctggcccctgggagagcagccagcaggcagtgatgggaggcagcttgcccatggcctgtcctggagcagggggtgccagaatgcccccatggagggcagtcaggctgagtgtggcccacccagcaggctgcccaggctcctccccactccacacccttccccatctttccccatctgtggggccagatcccagccaccttggctctgggggtcctaagctgaggtagggatgcggacccccagctcagcagcgatgcctgtgcctgaggctaaactgcccctgggggtctgtccttaaagctgcccggcagggggcaggcaccaggtgcccacagggccacctgctcctgcctgggcccggctggccacgcaactggggtgctagcgtgctgagatgaccagctcatcttgcttggcggggctggctccgtggccagtgggggtagaagtccggatcttgtcagccgccaggcattcctggctactgaggcccgtgggcgtcaggtccatgagctcacccgaggagctgagcgggaaggagggcgagagtgagatgcccgaggaggggtcggctgagccggcaaagagccgtgggggcttgggcaccaggttgggctcgaactgggcacggagcaggatctcttgctggctgggggacttggggccctcagcgtagtcactggtggggctctcgggcaccaccatgcagtagaggtcttggaaggagctgctcttgctgtccaggttgaagaggctgtcgatgaactcggcgaattccagcacctgaggactgggcgagtcccccaggcgcccattgtgcagcgccagctccccgcgggaggccggcccgccacccccaccgccaacctcttcctcctcgtcattggccgcagcactggggggccgctcaggagtgacgccgccactgcccagggccgcctccaggggctgcgtgtcctgtgagtgcttggacaggctgtcggccgccagcagctcagtgcgcgagctcagggatgggttttcctcggggatggcagggtcaatgtagaagaggtggccttcatcacgctccagcacagcgtggaggctgggggagccccggatgctgcggaagcctgaggagcggcgcgagtcgaagctgtacagggactcagtgtccgagaggctctccatggtggccagtggtgcccgccgggcctgcagctccgccgccagccgctcctgggtagacagcagcagcagctccaccgggtcctggcgggccgccgccgcaaccactggcgacagcagccgcccctccgagaagccctccaggctcatctcagactgggacttgctcctgcagagggagaggagagcagggggtataagactcagaagggagaggggactgaaccccagctccctggctaaaaggaacttgcagggaataaagggtacagttcatttagcagttgttgatgatgtgcagcagggaatgcttattttctttttttttttttttttttgagacggagtctcgctctgtcgcccaggctggagtgcagtggcacgatcttggctcactgcaagctccgccctgggttcacgccattctcctgcctcagcctcccgagtagctgggactacaggtgcccgccaccatgcctggctaattttttgtattttttagtagagatggggtttcaccatgttagccaggatggtctcaatctgctgacctggtgatccgcctgcctcggcctcccaaagtgctgagattacaggcgtgagccaccgcgcccagccaggaatgattattttttaaaaacaactcacaagaacccaagatagaagacaaaagagttgatgctgggttgagccgcggggtccctgaggggctaaggccctgctggcagcactaggacttcaggagtgctgctggggttctctgcaccagaacccctgtcattgtaccaatgtgagaatgaggctctgatagactggctgccccagatcactcatgagcctgccccaggtcactcatgaggccacagtggaatgagagagacagagggagggaaggagggagggagggaaggaggaagggagggagggagggagggacagagggcagcagggagacagggaagggagagagccctgcacatagctgcccaactggttccaccccaatctcagagccagcaaccctgggtgccactcccagggatctcatcacttccttcctcatccgggtctcctcctgtctcccatgggccgcagccctctgctgggtggggagcctagtgcccctggctccgcagaccagcctgcagggaatgagtgacagggcagggagtgggtggcttgcagcagtcaccgcagccggaaatggacactggcttcttcatcgggttgtgcagctgccacaggaaatgcacaaatggcagggagagacgtccagttgtccctaccaagggccaggaagcagcctcttgaccagatctgtgaccaagcacacagggcctgtgtgggaaggtcctagaaaggcaggacaatcctcccctggaaggactaccacttaagagcctcgcacccctcaaagagtgtgtgaatagcaagggcgctgtggcccccatgtgcgtgcccctgtgagcatgtgtgcacgcctctgttcatgtgtatgagtgtgtagaccagacgtctgtgtatgtcagctggcttgtgtgtctgggtctgtgcacaggtgtattcatgcatttccatgagcacctgcctgtccacatgtgtccttgtatatgtgtctccacctttgtcttggtgtgtgtcttgtacatgtgcatgtctgtagggggtgacctgtgtacttataactaataattgtgtgcacatgtatgtgtgtaagcttcaatacaaatatgtaagtaaatgggtgtccatctgtttgcgtctaagtgtgtaagagtgaatctgtgcaggccggccatggtggttcacccctataatcccagcactttgggaggctgaggcgggcagatcacctgaggtcaggagttcaagaccagcctggccaacatggtgaaatcccatctctactaaaaatacaaaaattagctgggcacggtggcaggcgcctgtaatcccagctacttgggaggctgaggcaggataatcgcttgaacctgggaggtggaggttgcagtgagccaaggtcgcgccattgcactccggcctgggggaaaagagcgagacttcgtctcaaaaaaaaaaaaaaaaaaaaagagtgaatctgtgcttttgtggcccagggtttgtgggtctgtgtgcctcccctggctcatgtaggattcagggacagcaggctgtgggacagctggagcacagcaagagagccctagagcacagagggtgagtttgacccctcctgtgcacgtgtgcagagctgagcccagtgcatgcacaaaatgcatgtgcacacaagtctatgtgctctgaaccacactcaccctggggtggggctgggagtggccaaggctcacctgacgctgctgttgcggtggtctgcagtcggcagctccagggcaaggccagtgggcatgggcggccccgtggggagtggctgctgctggaagatgagctcaggagtcaggtccacctcggtagggctcaccatgaccttggctgcagagagcagagcggtcttccccttgttgtagttctccagcacctgaggacaggacagaggaggctgggggtggtggagggacatcaggccccatcgtggggccgatgtggagccagggcccaggcctctcaggccaagcaaagcctcatggagtcacttgggtcccactctcctcctcctgaggtcaccactccccaaggcctgagacttgcccatctggtcacgactcgccccacagcccggcgagtgctcctgccctacctgccttcagcctttccgcagccaggggatggctgcggctgtcgctgcttgcccattcatctgttaagggccaggtggccttccgggcctctgagctgagcctgcctcagggacaggcccctgggagtctccttatctcctccccaccatggggcaacgtggtgatgtggacagagccaggggtgtgaggttgaagtatttgagtggggctttctggcccagctacctacttctctgagccccagcacccttgtctgtaaaatcgggcagtgatctgatggtgcttacggggttctgatggggtgacagtgccttattccctggtggtaccctgccgggagctgcctcaccttgttgagcccctccatgaccacatagggcaggtgctcatgcagcatggctggcgagatgatcacctcattgaaggccttgttgtcgccccagatggcaaagtatgtgggctcctcctgctcacagcagctgagagggacatggacagaggggagttaagggtggggtggtggcctggccctcggtgccagggcctcctggctctgttctctgccctgctcagcagagctggcatggtttggaggcccctggcctgcctggcagcagggctctgttccctggcctggctcctgccctgccctcagcctgggaaaggctgacctcgagcctcagccatggtccctccacagccttcgacctgcttttggcctgggccacacctgctccacctgctgcacggcccagctcaccagctgtgtcaggggaggaagccgaccctggagggaggagccagggcccagccgtctgaaggagcacagtgggaaaggtctacccacttgcctgctcctattctctctcctggcgcagcccccaccttgctcacagctgtcttcgaggaattcccttggtgaaaccaagtgacaactgaggtgtgagctggccagggcctgaggggtgagccctccagggcacctacttttaaatggaccaccagtggggagagctgccctggggcacaccagggaagggctgacactggaggcaaagccagactatggagagagacgcctggagtcctgctcagggctggccttttgttccatttccagagcccgatgctggggaaacccctccatggaggccctgggccatcttctcccagcctccacccccagccccgagcggtgattgagccaaggccggccctgctctccactgcccctgccctggccactaccccctgcagcagcagaccctggcagaacctaccagcactgctctgcagggtggttgtggaccacgtggatgatgcggccgggcgggtagagtggagtgctggctgagagggctatagttaggtcgctggggtgggtccagagccgcgtgctggccagggtggtcacctctacctcctcaggcagctccgacttggggatgcatttggtggcccccacgatgatccgccactgcgcggggtggagtgggagagatggggacagagctaagtagcactggctggggggcaggggcagggggaccgagaaggggggctcagcaggtgagaggtgggcagtaagatggcaaaggggcaggggaagggcagtggccagagcattaaaggtcggtgcccacctgaagaggcagtggctgaggtgcacggtggccagacggccaataaggtgccaaggacagatgacatggaattgttgaatttcagggctggcaaggggctggaagcccagccaacccctcatctagtagatggggagacaggcctagtgaggggaagggacttattctggatcactccacaagtccgaggccaaacacaccctggagttgagtccagctggacctgccaggcctggcctgacaaaagcccaggactaatctggtgggagcagttccacctccccagaaccaggctcctccaggcaggcaaagtcccacaaagctttgctgccctgctcactgcctggcacctggtacctggcccagggccctgcctgccacagggtctagggcaccaaagctgggaacggtccagacggggctgagatggtgaatgggctgagggctcgcccggggcagggggcggggggcagggggtgaggaggggtgaccacacagaggaccctctcctcctgcgctggcctgcctcagtgtgcctggccaccatgtccccacccccacctggccaccccgtctgccagtgtcctccagagacctgatgcggattaggaagggctgaccctctcctcttggtcacagcagaaaatcagaacaaactgtacccaaatcctctccacaggtcattcccagccctccctgagcctagggaatctcagaggcttcggcagaggcctttcctcaccgctcaaagcctccagatcgctttctcctgactgtgggcagctcccagctctgtgtgatgggagcctctcggttcctgtcctgattctgttctaactttttatgtgagcaaatgcaagtccctcccactctgggtctcagtttccccatctgcacaatgacaggggatggatgggttgagcttggggatgctgagggtctgacttcctgaagttcccacaacaccagccacaccctgccctggccttccatggcagggcctcttgtgctttgtcccaagaaaccggtgggggtcaagggcagggacagatgaggctgcacagaggcagggtgcccaggtgggggctcactttgggcttggtgcttcgctgcaggacatccaggagctgtctgcggaagccttccagctgagagaggccaatcctggggagggaacgagacagggccgtcagccaggcctggtcagcggctatgagaggtatggggccaggggcggaggggcaggcacacgcctagcccctggaacaagaagacacgtcagccagggtcacggggtggagaggtgtccacagagcagctccccagagcagagctgaggagtgagaggacaggcagggcgggcgccagcacgtgcgttcacctgggcttctcaccactgggcaactaagggtggggaggggcgtggggtcccttgagagacaggaatcggactgagagagatgcgggggctgggggtggggagaggcctggaggagggaggaacagcctggcaagggaccatggagcggggccaaggactcacctggggacgaggtctttgcccagaaccacagcagtcacgaactccttggaatactccatcgcatcctcactgcaagggaagccgaagcagaagctaaggccaagggggcggggtggtggtgttccggaatcggggggcccagccacaagcaagccctgctcctgcactcctgggatggctcccggggagctggctggtggcaggctgggttgcctgctccctgctctgtctttcccactggtaaggctttgctaggtagatcctggggggcgcatggcatttcagagcccccaccctccaccctccaggccactcccagacctccatgtgaccagaagtcagactcccagtccagcccctagcaccagccaaccctcagcctccactggtcccaactgccccagccaactctgaagccccagatggctcacctcagcaggccccctggcggggagtaggcaaagcacttgagggtcggatactgtgggcgcagaaggaaggagaggatggcagcagtgcccgcgcccagggagtggcccaccacaatcaggccgtagtgtttggttccgcggccctggagaccgagagaagcctgagagccctgccccaatgcccgccaagcgactgtcttagccaacccaagggaggcagagggtcttcccatcttcccagagtcctgggatcttgtctgtgctgtgtgaatgctagggcacagagaaccaagatagggccccacagagcgactgcttaggcagactgttctaataaactcttatttacgcttccaaaccttgctcagaggttatgtccttggggaagcccttctgattttccaggagtggctcactccctctagtcattgcatctgtacctgggatggagctttttatcactataaacatgtggttacctgaccccatctctctaccctcactactagactgaagtctcctgaggccagagcctgctttgctttggaaagggcagctggtggcacctcaggagctacctgcacagaccgtggccagtgggcaggactcagttatcccctaggtagagcagcaccccttctctctgctctgtattttgagcctctccatgtttccttctgacaaacggttctgcagctatgaggcttaaaagccgtctgccctgaatcatctttgtgcctctagtgtctggcatgaatcaggtgcccaatgactgtaggtggggcggagcaggatgcccacaggacctggcacaaaagaggaggggttgggagccaggctggaagggattgcaggagcctggcttgtgtgggagttgtgaggctccatcacccatccatcctctcctctctgtgctgcgttggaggagggggacccaggtgtgaaaaggcttggtgccatggaaaattcctcaccaggtctcgcccaaaggcctgggacaggaccatctcctgctccagtttcttcttgatgtactcagctgagaggaccataccctgggtgggcaggaacagaagcaggtgttggtgggaggcctcccagtgaccagcaaacccacagtgacctgcagctcaggaaccctgccccatccatttttccctttgggcctcgtgacaacccagctgtgggggctggcagacacgctgatcctgtcacttccatttcacaggtgggaactgaggctcagaggggcagtgtggctaatgaagctggtatgatctctccgcagctgcctctcaggttcttccatggtcaggctctgggctgtgcagggcagtggggtcgcagcagtgggccgcaacgggccttccagactaattcatgcctctctgaccaatctcttccagtgagcccagcgagcagggaggaacccccaaccatacacgcctctgcacactggcagggcaggaaagaagcccaggggccctggggtccatgacgtgggttaccttgtggcccagccaggtgccgtggtgcccctccacggggaggcgctcagcatcacccgtcaggtcagtcagggcatccttggggagagaggagacaggtgagggggcggctaaagaggacaggaagagggaggcaggcacccccgggggctgggagccatgggcagcgtaccttgggggacagggtcccccggatactgatcaccactttcttcttgtcatggtccaccgccacgtagaagggcgtttcatagacctaggaggcgggcagctcgtgagcctgagcggccctggtggggccacactcagggaaagtgacctaggcaggtctccttcctggccaggaactctggctccaccagccacggagcctctgccgccagaaaggctgacgggctcccagggtcactggggatctcctcccgatcccagccacaggcctgccctgccctccccgctccttgctggctctggcagccctgagtgccaccacttgcccctgagtccaggtgatggctgcccctccctgcttctgccctcaattcctttccctaaagggctagggctcggcaacccaaacactgggtgtggggttgatgtctgctttcccagccccagaggtggtacaggcaagccagggtctggggaagagaagggggccacctctggtctgcccagctagggatgcctggaagctgcagccagccagcaccagccaagcaagggctcctgccggcctggaaggatagcctcagcaccctaggccctcagctgcctgctcctgacaccaggccccagccctgcccggcctcaccgcatcatggcaggaggtatagacgatgtccaccgcagtcatgttctcgtccaggaagtggcgccggatggcaatggcattacagccacagcagttgtcttcctcgatggtgactccaggggcgaaccgcggcctcgcaggacacaggcaacacctagggtggggtgacaagagagttcagggccagggagtccccgagggaacaaatgtctcctgccactgtccctggaaccagttccagttgggcattcagccccactgcctctaccaaattgcccttgctaagtcctagtgacccccacgtcaccaaatccactggccactcttagccttcctcttaactgagctcttggcggcacctgaccctgtgggcccttccctctccccacctggctggggccccctcctctctgggatctcccctccgggcagggcctactcagcgatgcacccaacactgaagccctggggtccctctgggggcactggctcctccatgcactcatgcagtcttgtgttttagacaccatctgcatgctcaggaatccaccccaggcctgccccaacacccagatgcttccatccaatggcctagccagcacctctctcggacacctgacaccctgccagctctcaaaccccttccctgcttgtgtaccccaaccctcctgaggtcttcccaaggcccctcggtggcttggcctctggcttgcaactgtctgtggctcctcagccctcacccccacggccatgccactcggtcagtacacgtactcggcttcccttcagactcagagctggactccaggcactccctcacctcccctacccctgccctggcagctctgcctgggactgtcatggtggcctcgactggcctccttgcacttgcccctacgctctcagctcagcaacagagtggcccttttaagataagttgagccacatcattttctttttaagaccctacagcaacgccctgtctaccccacctggctctggtctctctgacctgctgccagcgtgttcagcagcacctgagacagcgtggcctggcccttgctcctctgggcctctgttcaaacgtcctgtcacagtgaggtctctcttgccacctcatctaacagccagggctccccaggcccccagcactccccatcccaggcacctggctttatgtgggtccaaagtgcccatccgctccaccatgtgccctatttgccttgtctatgcgctgtccgcctcctcgctgggcagtgagcaccacagagaggtccacagctgtatccccagcacccaaacagggccaggtacacagtagcctccccacagaaatgaatgaggcagcctgggagctgggcacccagctaggtgcagcggcacctcaggccaccagagggagccagcatccaactgctaaggcaccagacgctggagcccacgtgactgggcctgccagctgtcacgggatgacagctgagattttattaagaagcttggattctggtgatgctaggaggtttgtcttcactcagagcatcacctgagtgactattacacactttccaatggggagagactttgctgagaaagccacagtgcttgctggggggacaaagccgatgtacaatgggagagcatggtcccccacactgcaggtcaagtggtgatgggccagggtctaggggctgagctcctgtgctcggcagctgttccctctccaacctcagctgagcatgaggctgtaacagtgtggcctttggagactggaggcttgagtttgaacccttgctgtatcacttcctgaccgcaagggcctggaggtcactcagccattctaagcctcagtttcctcttctgtaagagcaggtggtgacagctacttcacaaggctggtgtgagatcaagggtccaagatgcagaaatggtctggcctataataggttcttaataacgagtggctcctcgcttctccggtgacagggctgcctctgagtcagtgatgtgtgggccaggaggaccagtcaggggagcagggccagcaccccggatgggagggccctggggctcatccagggcagggctagggccaagccagaagcaggcctggctcgctgtgctctgcatgggctgagaactgctgccaggggagaggcctgggcccgaggcagatgggcagcccttctccctctggccaggctgttatggacaggctggggcactggactctggcctcctcccaacaccctgggctgcaggcctgcctctctctgccccacaggcacctggttcttccaggcaggggcctggctgggccctcatgaggtctagggactctgctctctctgcaacactaaggcacctaatacaaatgccagcacccctcctgtctgcagagcaccagagagccctgcctgccagtgataccctgggttctgaaacaccctatgggcaggcaggacagataccacctgttacagtttaggaaacaaaggctctaagagctgtccccacaccaccagtgagtaatggagcctggtgctcattttgaagagttctctgccacagctgggactcccagggatgcaggcaagaatgccaggcacatgcagctgacaaagatgggaagggggcatgaggtgctctagtcctctctgatcagtcgctggagggatggtgagaataaggccccgagagccacccagctttctgaggacagggagggcgctgcagagtgggtgtggctgctgtgggtcccaagggcaggggtgtcaaggaaagaagctgctgcccagcatgccagcctttccagaacgggagcccagggaactgtcctccttctgcctggcatgagctgagggcggagacacccaggacagggaggggttcctcctggagcaggcgcccttctctggcccacttaggaatgcagagtccacccagcccccaagcggtgggctgagcgcagagctaggctgcaggccaggtctggggctaaggcctttcctagatcctatgaagaaggttggagccttaactaacaggccttcttggtgccttttcaaagacctctatggattgggcctctctactaggaaagtcctttcttctagaaaggcagagcacatgaggggagccgagagaagggaagatgtgggcagaagggaatggctgagggggcagagagagaacgccagaaggggaggggaggcagcagtgtgggtgttatgcaatatctcatctagccctctccaaaaaattccacgaggtatgtatcaacatctccacttcgcagataaagaaactgaggctcagagaggtggacccacttgccccaggctgcaagtgacaacatctggattcgaacccataactgtgtgactccgaagcctacaacttcactgctcagggataacacagaactagaaaggttgaggcccagagaaggtgtagaaaagaagccattcagggcaaagcagtaggcgcagcccggtagcccttcctcacacaccacccgggaggagaggtgcaatcgctgggggatgggacaggggtactcacgagcaggaccgagccagttggcagaggccgcaggcgggcttccgcatcaggtacatgggccacccgtaggcagccagggcaaagagcatgtagtagcagacctctttgtagcggagcatctcttgctagaagagaggaggcagagggcggtcacctcctgcccttcctgcctacagcctcagggcccagcagttccccagggtgggagcctgcggacccaacccctggcagggaggggttgctggtcccctgttgaggtgtggggcccaggccttggaggaaggacactcctccaggtgataattgcatttccctaattatctccatgcaaccaggacacgaatcctcagagacctgtcctgttgctccagtctcagaattaatgatttggggacagaaaatcacttggtccatttccttgcctgttttccagagaagggaagagttgagggatgtgagtagtaatccccccacctcggcaatcagccctgagaagggcccttgatgctgggaaaatgtagccctgagaggccccagccctccagctgggcggcgtgtgtgggccttgggcaacagggcagccacgctaggccaggagaccaatcaccaaatctctggcccttgggttctttgactgcaaatattgggagccttcaacttgactcagccagctgcaggctcccagggctccgggcaggggctgcgttggtgggagactgggatctcttgggagaaaggcaccagtttgaaagccagtgtgtctgaggcccagcagccactgttgatgctgaggaggttattggctgctggggtggagggaggaagaggcaggggtgccccagcaaagtgtctgccagcttccagtctttcccgagtgccccaggcaccgggagagggaattagtcaccttgtaaaagttaaggagggtggttagtcaccttgtgaagtgaaataggtggcaccttgatcagggcccggaggggtggaaacatccctggccagctcagctgctcttcaggaacgagagtggagaggtaattatcctctccctgtcagaagctccctgcagccctgggggcggggtgggccctggcagcctctgccaggtggcaggtgtgaccctggcacctcgatgggagtcacttgatgggagtcacagctgcctgccctccccgctccctgtgaggagtgggagggagaaggtggtgagaacagccagggcagagcctggcaagcagaaatgggctggtttggggcacttactatggatgtggctatttttagagaggatacaaatgcctgctttagtggggagtagggacaggcagggaggactgaggcttttctagaggactgagtgttggttttttttttttcttctttttaagggacagtgcagctggagtgcagtggcaatcatagctcactgcagccctgatctcctgggctcaagcaatcctcctacctcagcctcccaagtagctggggtcacaggcatgtgccaccatgcttggctaattttttttttttttgtagagacagggtctcactatgttgcccaggctggtctcaaactcctggcctcaagcaatcctcccacctcggcctcccaaagtgctgggattgcaggcacaaggcagcacacgtggcctaaaggactgagatttctaagagacggaatcctttccatcagcatcctggctggcaccgaggcttcctggcactgtgatgggaatggctcgtgtcctctcagcacagctctggtagaaggtgtgcctagtgtcatttcacagattcaggatccagctcagaggggatgaggggcctgctggaggtcgcagcgacaggcatcagagcagatgcacgctccagccatttgcttcctgaggcagggcctgtttctcccggctgccagctgtggtttcagcctgggctgtactgggccctgggctgtactgggccctgggctgtgtgctgggccctgggctggggttctcccaccatgttactggcaccacctttccctattacacactggatttctacgaaaggcgattgagaaaaggttccactactaaaaaagcttggaaaccaagtactacgcccattgcgtttcattaacagcagcagcagcagcaaaaatgctagcagctcaccctggtgaagtgctctgtcatctcaagaggccaggaccagacacttctgaacttggtaaaggaattcaggggatttgtctgtcgaaccggtgtgaagtgggtggttctcgtgaggggcatgatctgagcagagaggctctctggagagccggggggagaccgggcaggggcaatgtggctggcactgcaagggcagctgggaggagtttgcttaggtcattgtggcagagtgggagggatggggacggggtggggtgagagttgatgtctgactcactgaattcttgaggtcgaggtacttggtgtttctggtcaccggcatcccagacaggaaggccaagatgtcattgtttgcctgtaagaccggcaggtgaagaaggacaatcactggcccaggcccggctgcatggctgggaaagggggcccaggccctggcgtccgcctgcttcccaaaggccgagaagcccaaacgagcatgcagcttctagttcttccaagattcagccacttttccaaaatctgaggtttccccatatttccagatgctccccttctacccaaaacatcaagcccctgaggacattcctggcccacagcaggcgaaaggtattttgtatgagacactgagaaaccctaactggggttggtgtgctggtggggatgtggggtgggcggagcggccacgcagaagaccgactcgggagctcaccacgtccactaagcctgtggttagaagtcctttgagggccagccccagaggcagccatgcacgacccagaaagtccctagagtagtagtcacggaaagcctggccgaaggacaagctcaggaaggcagggggagccagaggtaaaggtgacctccagggtccaagagagtgcgtggtcactggggagctgcgtgggagccgagccctccgctgcaggggccacagggaaggggcctgaaagaagggtggtgtggagaggtgacctggagaaggggctggtggtgctcacctcgtccagcacggcgttgcgcttggcccgctgccgctgccggagcagcaccaggccagcaatgatgtcggatggcacaatgtcaaggtcccggaagaactccgcaaagaggtaggcgatttctgagtaggcatcctacgaggtccaggaaggcaggaggcagtggcaggggagcaggagagaggacgagaggccaggagtaaatcccccagggctgggaggctgcagaagcaggtgtctgctcggggtcccctggacaggttctccccagcacctccacagcgcccactgagcctgaccccatgtggccctgtgaccctgagggccctgcccagggctcctagacctggcagtagccacccagccctctcctctccttggaattcgcatggtgcccactgtctaccaagagcaggcgccaacttgagccactcctttttgctttcccagacgctagaatcaaggccgggtggctctggctcatttctcctctagccattctctccagcacagaaaccaaactaagctcctggctgcctctgacccaccagctgggaccttggaagtccctcgtaaggcctctgtggagcctgccaggtctcagggcccctcccccagctacccacaggctgctggctcagtgacccccacaatgtgccctagaagggggtgtactctctggcccagtggtcccccatggcttctctccaggcccttggcctgaagacagtgcatgtctgggcctcagggcaggaggcgagccctgctggctggtgccctcttagtcttcccttcctggccccaggctgcagcccagagcctcttccctaacctgttaggagacgctgaggtgggaacaaccacatggcaatgaagtctgtctcactgggtctcgcccctgagtgtttggcacttgtaagtgactaaatcaagggctgcaaattcaaatgccgaatggagccaaacggagccagatactgctcggctccagctgaccggaggccctccagggcccacttcaccagattcagaaatacagaagtttatggaaatacccctgatttttaaatgctggcatccaattaaaatgtgtaagcaacacaacacacgctgatcaaaacatgcttgggaccagacctgccccctgaggccatcagtgtctaacaggacctttgccgtggggctctgctgtgatgtgctatcttttccccagactctgacaacagccccagctctgcccgtgcacccagaggggcaggcgtgccctccacacagcagccccagcctccatccgccaggggccggctctctgccctctgcatggcctgccttgcagcccagacccctcagaccgccccagagagacccaagggggtgctccccgcccaccagggaacctcgggggctttcttacacttgattactcactctacggctcaccaggggacgctggtgggcaggagccactcgaggcttcccggtggcttccgtggaaggcactttgctgtctgcctcagggaggagtggtctcctgacctcactggctctgctactaactagctgtgggacgctgagcaagtcactccacctctctgggcctcagctgcctgatctgtaaaatgaggggtgggactagatgatctctaaggtccctgcccgctgcggggcacccctggatgatcccggggcctgcctcccttccctccccttgggggccgcccccagctggccctgtcttccttctgcagtgccctggcattaagtccggccctctggtcactcctctgagctcccaggtgctgaaggctatgtgtccccatctaggaccgtgctaaacgcctatcggctttgccaggccttcttgattaatttgctgctggtgaaacgctacttttctttgtcttcaggtcaccctgactttgcatatttcttctcctaaactagagtataagttccaagggagttgatgcagtcttcacagctttctgttcccttgacaaagcaagtggacgtggtcctgcgtgctggagcgagtggctcagtgaataacaggccctgtgtgagcaggccatacttgctcacgctggaaacccagctccttcccaccagccctgccccatcctgctttgccaaaggagccaacagccccttaatcacctgaccacaggatgtgagccagaggggagcgacctcccagtacttactgactgggagtccttcgtccgcgtgcagcagaggaacactttgagccggcgcgaccagctggtggcttgaccctcctctaagcggtgcctgcaaagcaggagaggcggtatgtgtgaggtcagagggctggaccagaagagctgggacccagacgttatggaaacagggcaggctgttcccaggaccctaccaaagggttcccgcagtgggttctgggggagaacagggcccaggccctgccagagctggtggccagtggcctggctgctggccagcaggggccctccctgacagactcctgctagcctaagatggtgtgtgccgttggccaagggtgggtgggtggaagagagaggtggggagcagttgagaggctccttggcttttggaagactgaacacaggcaggctctggggcttcagagctgggagccctaagtgggggctaccctgcagctcaggtgtccaaaggctcaaaccctgggaggtcagcagggtgttgggcctccctgtcgtctcattctaaggcctggaacagaccttccagaaagacctgcttttccccagaaaggatttcagacacttacatacttacatactctacttacaggaaatctatggggctgagtaaggctctgcatttcccaattccttggatctgatacctaggtagggagagggctctacccctcacccacatggttgcccttgtctattctcaccccccaaccccatccccagtgggtctggctgctcagatggagaatcagggtctccaggagtctgtacccaaaggcagagcaatgggccagttattcacagaggttcctcctaggctggatgtctgcagtcagtgtgttgagcataaagataacagatccaacattaaaagtgcagacctccaaaccgagcaagaaggggctagcttgcttttgtgccatgtgcggccccttaaaagcctgatgctgggtggtcaggagaggaaggcaagggtggccctcatatgcattcaaggcacttaacatcaatctgtagtgacaggccaggccctttttgagcctcttggctcctccgtgtgtctaaggaccgcttcccgctctccaaccctggcttcataaggcaaatggccacaaggagaaggagggcaacagggtcttccagggctacgggaggcaggtagggaagggtgcagggaattgctactctggggacctgctggctcttagggacttggacagctgtacatcctaaaccaatgtcccaccttctggggcatgaagggacagtgtgctggccaagcagggttcccagagcactgtgggatgggtggtggtggccagctgggctgggagggaatatgggctttggggccttggctcccagacctgacattttgggctgggacgtggccacagcaggcacgggtgtggctctggctgcagtgctgagctgacgtggaaggtccacggggagccgaacacagcagtgcaggagggtgggacggtgagaattcctgccgggcagcgggggtccagacagcctgctccccaggtgcttgagccagctgctctgggctgcaggtgtggtgccagttctgcaccccagcagcaagacccacggcaggtgacctgccctctctgggacttggattcctcatctgtagaatggatctcacaaccatgccggggttcacaaagggattaaatggatgaattgcgtaaagggcttggcatggggagctccttacataatgcactgtagaagccccattaacaggaggtactgggacccaccctggaagcccctctctttttctttcaacaaacaaattattgtgacactacctggatgccctccctcattttgtctgccatggcacactttcccccatctttaaaacatcatgcaaaactcaccccctctaggaagctttccttgacttgcctctcccaatctctgaatcctagaggcagcctagcctaatttaatagctagttaagcgaggactctaaggccagactgcctgggctagttcccagccttaccattttctagctgtgtaacctcaggcaagtcccatcatctctctgtacctcagtttctccacccatattatggggaagttgacagctgtgtggtggacttgtaacttactacacgcaatgcttggcttcactgttattaccattgttattatcagcagtggacaatgatgacaacaactactattaaccgagcacttacccagtgtgagcactgtgttagtcactctgcaggtattagctcagttaaatctcacaacaacatgagacaagaattgttattattcccactttatagacaaggaaactgaggcagggagcagttaagccctttgactaatgcccacggctcacacgaggttggcatgcagtctgggaggcctggggtagccttctgaagaatggagacctctgcccaccagacagcaaagcccaccctgggactgcccacccagcccgctgactgaccgcaggttgtaggtccgcaggttacgctgcctcctcttggtggctctcagcttgacaaaggtgcggcccgtggggtcgaagacgcagaggacagtgatgcacacactgaggatgactacccagttgcagacaaccattcctgcgggcagcagtgggaggcattaggtaggggcgctggggacacctctctggctcacccgctctgaagaaagggacattggagcctccctaaccccaaatgcttctggggacaaaagccaggctccaaagcccctggtcccagtctctggccacatacgtggccaccctattgcccacccacaaccccaagggccactcttggctcagagcaggcagctctgtgggtttccaaggaggtgctgaggagcctcggcttgacctgagcagctctgtgcctgctgcagcccaccccagaccaggtagctggcaggcctcaagggtgagggaagcagtctcgcccagccaacctgctggtgcccccacagaaggcactgccctctggcaatgcccaagcttcttcctctctaaactgatctcatcccctgtgcccccggggctgctgaggctccagcaggcctcacccagacgtaccgagggtgacattcttggcagtgaggtcgttgcaggaggtgtagtactgagtgagccagacgatgcccacgatggcgtagatgaactcgatcaccaggatggctgcaaggagagcaggcctggctgaaggatggctgccacttgcatgccagggaagggcctagaaccccggcctggcctttcctatcgctgggctttcagccagctcagtagcaaaggcagaggcagcgggccattagcagaccccccaccccccgcctcccaggccccaagcccgtcctgtcaccatttggtcctgttggcccctgaatgaccgcttgcaatgtgcccaccacctctcctagcttctgtgctctcaagtccccggggcatccctgatggagttttgctcttgttgtccaggctggagtgcaatggtgtgatcttgactcactgcaacctctgcctcctgggttcaagagattctcctgcttcagtccctagggtagatgggattacacgcacccaccaccaggcccagctaatttttgtatttttagtagagacggggtttcgtcatgttggccaggctggtcttgaactcctgacctcaagtggtccacccgcctcggcctcccaaagtgctgggattacaggcatgagccaccgcgcctggcccatttcctcattctatcaggatctcagaatcatgtctgaactgtggaatcagacacatcttaggcaagtttcctaatctctctgagcctccatttcctcatctgtaaaatgggagtgacaacatttatgtcataggactgtgcaaaaattagatgagagcgtgttcacttcatggaaactatttcccagcaagaggcctctggaacctgatggaggagagaggaagggcccagcagctggtctgcatccagctcaggcccctcaggggctgagactggaggggaggggtatggagtggtggctgagaaggagatctgctggcctcatgggggcagcctggaaagccccagctgcacgggcagcagtgtggcagctcagagaccagactttggagccagacagcgtgggttcaaatcccagctccgacatttacacgcttactagttgtgtgagagctaggcctgggccccagtttcctcatctataaacggagaccaataacacccactccctgtgagttaacacaggaaaaagggcctagcccagtgcacagaagcacaagagcagtgttcactacaaatgaccagaaggggctgcaacctaagcccaagaagaggacacaggctggtcctctggggagctggcccagactcctgagggggttcccaggaagcagaaggcctgttttgagaaggatcacaaggaagatatgctttgaagagatgcacatggttgaggatggggtcagcaccttttcctgtaaagggccagagagcaaatatcttggactctgggagtcctacagtcgctgtagtaactactcaactcggctgctgtaggggcaaagcagctggagacaataccttactgaatggatatgtgccaataaaaccttattttctttttttttgagatggagacttgctctgtcacccaggctggagtgcagtggcgcaatctcggctcactgcaacctctgcctcctgggttcaagtgattctcctgcgtcagcctcccaagtagctgggattacaggcgtgtgccaccacacctggctaatttttgtatttttagtagagacggggtttccccatgttcgccaggctggtctcgaactcctgaccttgtgatccacctgcctcggcctcccaaagtgctgggattacaggcatgagccaccacacccagcctaaaaccttatttaataacacatacagcaggctggatttggccctcaggctgcagtttgctggcccctagtctagaatgtaagctacagaaggccttagttcactgctgtaccccagtgctaaaacagggcctggctcgcaacatgtgcgcagtaaatactggctgagtgaatggagaggtgggagttgtctggggcagcaccccagggtgggtggcccttacccaggcgcacgtagagcacgtactgcatggagtcacggggctccgtgtagaggatgcccccgcgcatgctcagccagatgatggccatctcagcgatcatgcagctcagcaggatgcccaggtagccgcggccgtggtccaccaggttcagggagcaggcctcgtgcgggttatagaccaggccgaagagcaccacggacaggatcacaaacctgtcacaggaacgcccgtgtgagcaaggccaggtggcccctgtacctcgagatgctactagcaggcaggcccttccccagcccagattcagtggaaggagggctggcagcaggcacctcctccataagaccattgtccacctggcatcgaatgcctagaagggcatgggcggccagtaaaagactcagggtcagccatggggagacagtagcagcaactccccccagtgttggggtcaggtccagcaatggtagcaggggtgtcattgccctaaggggctagatgtttcaggcacctcctccgggcagctgggggcatgacagggttgggacttgggcccaagcagggaggaacaaatggccagaaagcgtccttccagacctttctctccaaacccaggcctgtggccccgggcctggggactcaccaggtggtatgcaggagaaagaggaagatggccggtaggacgaggtcatcactgcccacagaccagcgccgccggaacaccacgatcccgggcatggctggtggctctgcagaggctcagtgggcctggtgctcacctcctgaaagaaagcagaggaccttatagctgcctgaggaggtgaaggcacccagggccactgcattccttgggccacgggaccagtccccggtgtggccagaagcacaggcatttttggagctggccactggaagtgctgacccacctccgggcaggagccaacacaaaggaccttagcagcaggacacagacttcagccttccccctggagtctctcctgtcccccgagactggtactggccactagggatcggcttctacctggggttaccccagcagtcactgttgagctctattaaagaccccgtttcctccttcatgggatcagtgggaccctcagcccagccctcaaaccctataatctttagacctggcccagtgcacactgtccttggagtcaagggaggggcttcccagaccaagaacaagcccacccaacagcacaaagcccagcagggcaggaggaaggctgaaggccttgggaaggtgggggcaagggaccctgtatggttggcagctgggactgacaaacatggaaggtgaggagtgcctggcatagagcaggtgctcagtaagtatttcttgaatgaaggcttcagtttcctgctttgctggaagccaagagcgtgctctatgacttggttttgaacccatcagacagaagtccccaccacagctatgcctccagggagggaagagcacggttgaggtgcagggtcaggagtagggcttgggacaccttccaccccacactgctggaaggatggggtaagccctgcagggtcacacccctcctggcaaccatacctcccaagcccaccctgagccatgcagcttttccagctggattttcaactctctgaagtagctgaattcaaatcagccccaagcaagctcaggaaagagtgcccaggaactcagggccctcactccttagcatcccaaagagaaaggaagcagcatgggtgggaggtgaccccacagggagctaggtccccagagatacccataaagggctccagggtagctctgcactaaactgctgcagggggctggggaccaagttggtgggcagctgtcccccgccgggggccagtagaggcttacatggcacctggtccggggcaggcggcagatcctcctctccccagtggcggctccagggaaaatgtgtgtccgaggagcccggcatcattcggggaggaagcagccaagtctcccttggccagtgggcatagcccccagggtgggcgagagggcgtggggccaggtggccagcccgcatgtccgcccggcccgcctccctatccccggtgcagccacttggcgagctgtggcctggcgggctggcgggctagcctgccggggtcgtgcctactcctccccccaccctcaggaagtgacatcatcccactctctctccaaggaggagtcggagctcagcttctgggaggcagggagaagggtggagagtgagggagcatggtggtggggtggctgggctttgggggtggggggtggtctgtggactgcaggggtccggggcgtcagcagtgcctgtgacatgtggctgacagcaccagcttcagattagggttggacacgataggacaggagggggggctggggcaccgtgggtggcagttgggctggggcagaacagagctgccaacagctggtattgccgccccctccctgtctccaagtagctcacagagggtaaggtgcagcgctgggtcgggctcagggggctgtcggggctgccaggagcccctcacatgaatggaacagaatgaaatggaatgaatctagaggctgggggggcagtacgcccccgcaggtgctgtagagccgcatcctgctctgatctggccagaccaggggaggagggagcagtgctgtcccagaggggctggctggagggctagggtctggccctacccagcctgcccccaggcctgcctctgccagcagccaagaatatctccttctcaggtccaccccatggatggcccctctcagtcaccctgggaggtccctcctctcactcccacccttggacccatggaacccaggatagctaacactcctcgagatcacacaccatccacccaacacacacactcactctgcactcccctcctctgcccgaacaatgcccgctcgcttcagctctcaggctggaaggagtgagccgaacctggccctgggccctgcagaggtgaggtggctgaaggactgtcaagacgctggagggatatgaccagtggtaaccactgcccccacctcagggtgaccagcctgaggccaattgccatggtcaacagcagtacctacctagagtatgaggcggggctcctgggggccgaccctgctgggtacccagtgacaggcctgcaccagtggccggcccaccaccatagaatccgaggcacagaggctgggacacaagtgccaggctggctggttttgaacctgggctctaccacgtacccactgtgtgacttattagtcgtgcctcagtttcctcaactgtaaaatgtcgatttgtaaaatgtcgattatccctacctcctaaagtcctggtgagaatcacatgagaggtctgcagaggctctagctgtcttagctggggcgggcgaggcggagggagtgcaaggaaccccttgctggaccagccacccctcccgcctgggctggtggaatctccggctggtcaccaacaagtcaaggtctggggtgggggtggcagggcctgtgctgcataagggttgggggtgggctgcaccactctccaggccaattcatacatctcttggggctatttttaagggccttgaatggtgccctttctctagagaccccggcccatcacaataagggcctgttcccctgctggggatgtgatttcatctggaggaaatgtctcaggagcggggagggcagaggctacttcctggtctggggctgccacaaagcacctcttctggctctcctcccctggggcatagggtcctcccctctaacagccacagtggggcgggggtaggcgctgcctgcccttcctatcccacaccagtggggcttccagggcaggcacggcataccttccagcaggggccacaggggcactgctgggggctcctcctgcctctggttggacccccagcacaggcaagtgtgaatggggtgccaggacccctctcacatggatggaatgacttaagcagcccaaggaagcctccttcttcccccacccacacagcccaattttcctgctggtgattcaggcccctggactaagtactaaccattctgggagttcctctttctaaaaatgcaaactctttttaaaaatgcatatgctgccccctactttaaaaaccttcctggctccccatggcctgcaggacaaagtccaagcccctcgggcggcagcgacaggcggtgcaacctcaggcatatgcctcgccctctctgaatccacgcattcccttatcacctgagcagaaagcgatcctggtgcagacagactccagcacagagcccaccctcagctgacaaatccttctggctggagaggctctccagcaccttcttacactgccacatccttctttctcgacaccccaaacatgctgctccccagaaacacatcactggaagggtccatgctttgcttactccagttctgatgggtgaaatccaactcatctctctaggtcagctaaaagtcacctcctctttgaagccctccctgacagccctcatgcaacccactctcctcctgggaaacaggctgctcccttatgggaaccctagaccccttcccccagcatggccctggtcacactgtgttacggttaacctgctgactccttgctgcccatccccaccccagctcaacagtccccggggccagggtctcacagtacccatcgccacacctctgggtgccagctgcagtgcctggctccagcacctcagtcccaccccatggcctcctcagcacagctcccctcccagtcacaagggctgagacagtggctccttccccctctgagctcacacccttcccttctggggaaacgtccctcccttcctgactgtcaggctgggttcccaccccagtgtcttccctgacagctcagggagaaccctctcccccccctctggctagatgaactgttctgggacctcagtttcttctcttgtaaaatggggctaacaacatccctctcaaggctgtggtcagaacagactggggtgatgtcactacaggactctgcacaggtcctgcacaccccaaggatctgctgatggctgctgttgcattagcagacacctgaggggctttgtggggacctcctgtgatgtgacctgtgactgggtgctggggtctggaaggtgctgctggtgcccagctggtcagaaagggctggagtgagcaaacagaagccctgaccgaggagcctgcccccaccatgagtgctccggtgctgctggtaaaagcaccccaggctgggcctcgccccctcgtcctaaggtaccctgtgggcttggccctgggagcagattttaaggagcagagtcccttggcagcaagactcccagcagatggggctccaagagctcccagggggatgggggggaagaaggtactggctcagccctctggagtgtccacagggaactggacaatgagcttgggaacccccgcgagtgccacctccagcccatgagatttcccatctggccagagatggctttggtcattggcctggggatgggatagaggttgtgcctgaaggaggggatgacagccaggtccagccatagggatccatctgacattagctgagcaccttctgtgtcccaagtcctggactaaccggcttcagtcctcacagcagtaacacagggtcgcagtgtcgctctcattccacagtgtgtgcaaggggtggttaagaccctgcactctaaaacaggctgcatctgagtcttggctctgccacttactggctgtgtgaccttggacaaggtacttaacctctctgtgcttcagtctcctcacttctaaaccagggataagaagagtacctacctccgaattatcaggagggttaaatcagtcaacacttcaaacagcgcctgtcatctggtaactgctcagcaaatgctgccactgccattactattactactgaagaatgagactgagatgcagagactgcctgacaccatccgaggatcaagaggccaggcaggcaggaggcgcaggtcattcctgctgccatccaaagcccacacctaacaaaggtcagagttaaaaggagtctcagaacagtcccactgtcccctttcatgggcgaggaaactgaggttcagaaagaacacagaggccctagctcttcccgtgatatccatcccagcagcgtcactgccaggtgctggacacacaacccaagcccccaagccagcctgctcccttctacctcactacataccccactcaaactccccagtgacaacagcattagtagcgtgtcaccacagggagcctgggctgagatcctctctttcacgatcttgaagatgcctaaccctcctagaagccagcaacatccacagaagctccctcacaggagataaacctgtagggaggcatcaaccatgtgcctacttcagtcacctgcggctggctctcctgcctccagcggtggagtccctgttgctctgcagcagctgtggtgacagagaggagactctcagacagatccagagagccaccttccctgggcccccattttactcctgcctctgggggctggtgatggggaccaggtccagccacatcctagagctgcctggtgctgaatgaagagcagtgtccccaggacagaaagtcccaacccctctaggccccagtaaatcaaaattgagggccgggaggatgagtccattgcacacatgtgagacataagggcccccacggttgctatatgtaaaactagcactggacgccacacttcctggttgccaaagtaaatgtggaaactggcaagtttgtaagggctctttttcgctctgcagggttttttgacccttggtgtcctgaagggagagcccaggactcccatttccatgacgaatgggattcctatgtgaaagggctttgaaattggaaggtggtccaaaatagtggagaggaactgatgcctactgcctgctatgctctcgtggtccatccgattttgaatgtgccttgttgggcactggagcttatctggtctgggggtgggcatctgatctgcgggactcagcacagtgaggctgggccccccagtggtgccccgcaggacactggtggcccgccccccagcagaggcgttgtgttcagaggctccaccccagctagggtgggctcaccagcaggtcgctgtctggcctcgctgggctggcagacaggtcctgctctctttagcacaggctttggtcgtggtgagattccagctgttcactgtggctgcaggactgtggtagcgagttaacctctctgcactggtgaaactgcaggctccaggatcctgggtagtgacagggacagaatgatctcagccacctataagttggggactgggctgcttcggttctcctaacatttatgaattgcctacaaggtctcggcgcacatctatgccctttacaaacatgaactcacctagtcctcataacagctctgtgaggtaggtactacccttccccttatttgacagatgagctgaagtgacttgcccacagccacacagcctaggcccagaacccaggtctttacctctgcatgctgtttctgagaagcaggattcagctaaatgcctgtttctgaactcaaaagctggctctaagcctcttcttacagactgaggagctctctgggtcttcatctagcttcagactcacaatcatgtgggatagcacgggacccattctgcagatgaggaaaactgagcccaggggaattccacggagcaggctgtggagtcgggagagagcaaggcactagaaacactatgtgtcatccacctccagcctcatcaggccacagggtattaccccaactttacagatgaagaaaccaaggctcagagaggcaaaatggtttgcacgaagatccctccacgaggacatcgcagagctgggatttcaagtagcttccttgaactacttgcaagaaaaaaataccctctctgcctgtcagtctgactccttattgtcacaaacacagagacagtaggacccacaggtcccaccccaggctcccggggctacagtaccttccccttcttcccagtggccgagaggctggcctctgaaagcacaggaggggagaggtgacaagggagacgacggagagaaagcacgtgtgggctgggggccacgtgcgccaccagcctgtacctgggtgtgtgcaacccaagttaggggcctgaaagctgtcgcttttcacacatcagctgcgctagagcagaaggcagagcggagcctgcccaggactggggccagatttcagcatgagataggtcctcacacgcccaggcctagggatgaaaacagtgtgccttgtgcagccaggggcaggagtgggaggccactgacatttgtcccctcctacccgccgcccagggtcttaggctaacaaacgcctttcccactctcccccaggatggcctggaaggaccagaggaggcacctcctccacccctcaccatgtgccagccacataaccatcctcactacaaccccaggggtgggtctagctgttcgcatgtcatggatcgggaaactgaggctccaagaatttaaagaagctagcaagtgagtgtccaagtcaggctctgaagccaggtctacctgctgtgttctctctgtgccctcctcgtgcttcttggccagagacccctcccctataaaacagcagtcagggagctgggcacagagttcagggaggaggacggaaagagaagctccagtgacttgggggcaatgccagcctgggccggacccagaaatagttccaacaattactcgatcgtgtttatttaaaaacaaactcttatatagcatttactacatgctggttactttaacaagcagttcacaaaaattacctcctttaatgtaatccttttaacaacctcttatgccctgtattatggatgaagaaatggaggcccagagaggctaaataagttgcccaaggccattcagctcttcagcggcagagccaggcctgaggttgcagggcctgtgctccaggcctctccccagaaggcttcaccagggctccatttattaccaaggctccagctactcgttctcacgctaattattttctactcatccacaatgagcagaatttgccatctgccaccagccctgctactgacaccagccaactccctgggaatcaattgaggcctttcgtttcctgctggttattttggaaagatggctggctgctggggagcgggaagtgagggccaggagggcagcagcacccttccctggcgaccaggctgggccctcctcctgcccccagccttcctctgacctctcttcccagggggattcacatcagagcccactcagtcctgtgctccgacaatgttttccaacagtggaaggagtcccccaggctctggccagaccaggtctggcttctggattcttccttggagattattcatttttctgaaactcagaacaagcccttgtcccacacgtccacatcccctctggagaggcccagacaggcgggttctgctggcctctgtgatgggtgcggccgggcagcctggatctccaagccctcacgcaaaggccgacaccgccccacactgggtggcaccaggctgttttctcctgcctgtctgtggggaagggtgtctgtggttttcgtcctttctacctgccccggtggtcttcttggtcagtcccctcatgccctaacacgtctttaccccactctcccgggaacgcgactctctcaaaggcagcgacttggagggggtggccatccaatgagctgaccgaggcctgccttctggccccagagcagggcagcccgaatttgaatcttagttccatcacttctagttgtctatgactgtcacttcactgagcgtcagtctcctcatctgtaagatggaataatgaaggtactcacttcatagtgagtgagtcatgaggagttaacgaaataacgcacataaagtgctcagctcttagaaaacaggagctgccatcattgtgatttagtaaccatgtctccccagtgtgcgcagaacctttacctcaccttgcatggcaggggcaataactctccgcgatctaagtcaatcttcccaaacagacaggtgagcaggctgacccacacctgccctcacccttccagcctgcataatcctctgacttgccttcttggaaagggagagctccaactcctaggagcccagcacggccgcactggcactgcctcctttaatccacaaccacccagggagaggggacccaacacccctgggacagcttgagccacagagttctcgcccaaggccacaagactctagaacactccaaagcctgagatcctgccaggatgccccgcatctatcagcttgcatgtttgagtttcagggtgtctcattgcaggccccttcccagctcaaacgcaggatgccctgagaggtagcggtcccccctccctttaagcccatctgcccttccagctttccactggccccaccctctgctcctccccccagagtcaccccctctcctaggagccacttgctgggacctcactccccagatggcccccctgccaggcagttcatcagctcccagcacgaatcccagcgctctggcttctcagaacttccttgagaggagactccgtctgggtgctggcaacgcctcagtgaagaattagtaccttccacttcattaggggccccctaatgaagctgttaatgatatgctaagtgggcacacctagcctgatgcctcccctcttggggcccccgcccccttgcccagcctaccctgagccctggtcctgctgcctcctctcctcaggctgtgggttggccctcggggtctggctggtgtgggtgcctgctgctcaaaggtggggaggcttcgtgggccacctccctaagctgcatggccatctagggcacaggctggccaactgggctattgggtttcccttcgactgtaccccgggcatctcggaagcaagcagggatcaagtgacttcgtaacaggagctctttccccaggggaagaggttctgcagagctctagtatgtgacaggaagggccaacatcccctgcccccacagagactggagagggaggtggcacctgccaccaccaatggcacacaggctgcagccccgtcccctccctctgtcaccctcctctccttctgtgctcaatgagggggatctcagtgctcttcagtgggtttccagaagccctcagggaccccagatgaggggaggtggccatagtgggcaggcttcagtgggcttgcaggcaatgtcaaccacagcagctttcagctgctctggatcacctgaggtcaggagttcgagaccagcctagccaacatggtgaaaccccgtctctacaaaaaattagcggggcgtggtggtgcatgcctgtaatcccagctacttgggaggctatggcaggataattgcttgaaccgggaggtggaggttgcagtgagcgaagattgcgacattgcactccagccagccttggcctcccaaaatagctctaggtgacagaactagactctgtctcaaaaaacaaacaaacaaacaaacaaacaaagtttgaaagccactaagcaggatatgctctcaggtccattctagtctggacttttagagttttacttgcagaatggccaaggagagagcctgggggctacatacaggtgcctgagctcacacaatgatcacagcatttcctcccctcgcctgagccaggagggcaaaaggggccacagaaaaaagtcactgacccagaagcttagagacctgggcctacagctgactattctgtccttcagacctccctatcccctcccatcaccccaggcagggcaaagctggacccaagcacaaggcctccaggaaggggcaggggctcagaaggcccctgctgccgggtggaggacaggactggacccggctttggtcccagtgccttgatttactcaaacggccacagagttgtgaccttcaatatacaacgcagccctctcctcgtctataaaataggatgaggatgatgacagtgcctccctcttggggtggctgggaggacaaagcgagttaaaagttgtaaagtgtgaggctgggcgtggtggctcacgcctgtagtcccagcactttgggaggccgaggcgggtggatcacgacgtcaggagatcgagaccatcctggctaacacggtgaaaccccatctctactaaaaaatacaaaaaaaattagctgggcatgatggcgggagcctgtagtcccagctactcgagaggctgaggcaggagaatggtgtgaacccagcaggcagagcttgcagtgcgccgaaatcacgccactgcactcaagcctgggcgacagagtgagactccatctcaaaaaaaaaaaaaagttgtaaagtgttgaaagcaggctctggctcagaggaggagattggtgacatagagctttaattaaatcaacccccaagtcgggcgcggtggctcacgcctgtaatcccaacactttgggaggcctaagcgggcggatgacttgaggccaggagatcgagaccagcctggccaacatggcgaaactccatctctactaaaaatacaaaaattagccaggcatggtggggggcacctgtagtcctagctacttgggaggctaaagcaggagaatcgcttgaaccagggaggcagaggttgcaatgagccgagactgcgtcactgcactccagcctgggcaatagagcaagactcagtctcaaaacaataaaataaataaataaataaataaatacataaataaattcccttctcaagagcctattatgactcctaaatgccctttaaataaaattaaaactcccaaccattagctataaagctctccaccaaccacacccctaccccgccctgcccagccctgccaccagcacccataccctccaccttgtctgactctgtccctgccggccgggcacgcccactcccagctcctgtctttccacctgctcagccactgagtgcgccccatgcccaggcatttcctcctctccagatggccccgcttgctttgggcactccgccccgacatggcctccacagcctgcgaggcctgctcagtgcctgtcccagctggccttcagccccagccctggcaaaccagcccacaaatgaccaggtaagcccgtgacccactttcctgcatgcttctggtgtgtctgcctcacctcctccattacactgtagttcccaagaagaccctggcctccatctgcctctctcccagcctgtgggggaataggccaggaggctctgggcaacatagagactggaaaggagaggggagaacaggcctccacgatgaggggaaccccatcaggcccctgacaagtgccagcctctgcctgcccatgcctgagcaaggccactgacccactctgttctgggtaggtaagtgcccatctgctcgacctctgaccccagaatttggcatcactttccttcccaagagactcgcccagccttgtcacgctgtcacttctgcggcctctgcttcccgacctgctcagggtgtggtgggaggtggagctggggccacatgctcggcacagcccctctggccccagtggcacttcactcccacttcacgaggacacggcagggagggggcgggagtttggcagggcttcatccctgtcaaccaggggctggtgccctcggcccccctaactatccgcagtggggaaaaggcaggctcccgctaacccctgctggcccaggggaggtcagtgaagctgctgtaactccaggggatgaacctttccgtgaaggagctgacggcaacgtctgagagagaccagcagtgctaatgggatgcccagctggggctgtcaagccagacaaggtcctggtgagaccggcagaggccaaggctcctgccaggcagaaagtggcacctcgtctcctccagggtttggggaggcaatctgataatgcctgcttcctcagcaggcccagtcctaggaagactctggggtgggggtggtggtaagggagtcagcgagagctaggggacctcggcggggtcagcctgcgtcacagctcatgctgactcctccaccttcagtggccgccggctgctataaataccactcctgtctctggatgttgtgggaggtgacctagaatcatgggctctgaggcctcctgggtgcaccccccgcctgttttagacagagcctgacgaccagaaaatcctcacaggttagagcccacccccaaccacgagcagggccctcggccagcagataaaaccccaacactgagggagatggcttccaaacctagagcttcctccaacttgcacctcgacatgttcatgggtggggtgcagacaccaggtccctgggagcagagccctggccagcccaagacccgaaagagacatggcacccagggccattggctcagcctgagacctgctgccattcattctcctccatgcccactgccctctggagcccagctcaagggtgaaggctccaaagccatttgatcctgagtcccttccccgcccccaacttctcagtcctacggttgtcctcgattcttgattcagcctggtttccaaacttgtcaccaccctggaagcctccctggggtgtactctacttcgaaaggggccctgttagactgttctgcagttgctcagatgagtccttgacgatttcattcttccatttggtagcacgcttctgagtgagcccttccctcctccagagatcccagacaggcccaggcctcaaaccccaggctgggctggcccaggagcaaggacaggaggtggtcctggcctcggcaggtgtgaagacaccaacacccacagatggccagggcttggttccagagtccctggtttagggcaggggcaggctctcagagtagaaaaggctggaaacagccctgagggtgggccctgggtggtgtgaacacaggtgaaatctggttaaagtcaagttagtgcatgcagccattctccatccatccacaaatcaccagagtgcctactatgtgccagggattgggtggatggtgacaaaagccgacatggtgccagcccttatggagcctgcagaccagaaggaaagaaacttcaagtgaaccttcacatacaacaaagaaaaatcctctgacacgtgctcaggcggggaggctgcctatagaactaggagctggagctgtttctgaaggactagcagagggaagcaaccacaggagagagcagcgcggaacaagcactggaggataccctcggcagcagggcctggatgtgaggacagtggaggcctggaggatggagaaaaggccagagtcaggccagcagagaggaggccaaagcaggcaggctggcagggccaggccctggactctgagcctgggaatgacaagccaaggtgggtgcgagggtgaagagaagtgggtggcccagatggaaattcagcagacaaaatggggacagacagggcaggtattaaggatgtttactgctcgctgtaacactggcgctgtcaaagacgaccccagctgtctggcccgtgcaattgggcgggcagagggggcactggatcccagaggaacgccttgagaacggaggcctggggctgcccatcccaccctcagagcaacagctccgggagtcagccctgggctctgtgaacacaggtgaagtctgtgtcctccccctccccccagtctcagctcagcccagtcccgagctcaggcgagcccgggcacggcaggtcaggatgtcagtccaggagtcccactcaggagcagtcagtgggctctgctcccaccgctgagggttcccaatcatgtgcttgagggggtttgaggcatttctcctgaacattcagctccccactcttcctgccatccgggcccgaccatgaataggactacgcagaggagctctcagagttaattcaacctactacaggaggggaatggaaagagggtctctgtatgccagtcatccactctcccaaccacatgttggggctcagaaaatggtaccccaaagtgaacgcctcacaaacagcctcagaagcaaagcttttctctgaacatctcctgccttcctgtctctatcccttactctcccgacacaaaccacagaaactagaattctcttccccacccctcactctccccagaggcaagccatagaaactagaattcctctttcccaaggcaggtcacagaaaccagaactcctttcccctaaagccacccataaaacctaaaagtattagccttctcctgcctttctgcgtaagagctggccataaagaaatcctttggtcgggcagggcacagtggctcacgcctgtaatcccagcactttgggaggctgaggcaggcagatcacctgaggtcaggagttcgagaccagcctggccaacatggtgaaaccccgtctctatcaaaaacataaaaaattagctgggcatggtggcacgcgcctgtaatcccagctgcttgggaggctgaggcaggagaatctgttgaacccgggagacagaggtgccatgagccgagatcgtgccattgcactccagcctgggtgacagagtgagactccatctcaaaaaaaaaaaaagaaagaaattctctgacctactttgtttgatagtagatcataagacccccactcagaatcctgccccataccctgaaggaaggaatgcagcacagagaggccaagaaggatctgagagcaggccttgctgggtttccccactcagtctgctcccatggggtcttactctttgtgtccaatcatagctcttcatagttgcccattcctcctcaaacttaagcataaaaatggagtttccctggatctttggatcttcattctgaaggctcccatgtcacgtaaaactttgattaaatacatttgttatgctttcctcttgttaacctgtcttttgttacaggagtgttgcctatgaccctcatgatggggagaaaagggatcaccccatagctgcacctacaatccattcatccatccatccatccatccatccatccatccatccatccatccattcctccatcctccatccacccactcaccatttccagtcattctacactgttcatcacacttagaaagccctctccctcttacgttggcctgccagccctgtggcctggcctctgcctgccctcaccagcctcccaggcaccctggccttctctctgttcttgcaacaggccaggcgtgccgaacgcctttgtcctcactcctcctctagcctggagagaaccccaaccccacccccacccccagagctttgcgtggctggctccctcctgtcattcagctcctagctcaaacatcccctcctgggacctgcctgccaaatcttaggtaccccaagcgcccccatcataggactcagttttcctatcagcacttctcaccatctaaagttctggtgaatgtgtttaccatctggctccctccaccagggtgtggcttctcaggggaggggtctcgcctgttttcttccttgccaggttccctgcactgagtaaaggtttggcaggttgggggagctcaccacgtccctgctgcctgaaagagaaaccatttcggagcacggcctgagaaggacagaaacaggagaacgtaggagccacagcagagctgcacccagaacccagggctcctgactcccagccctggcctctttccacaccatctgctggccatgcctgggatccaaagccctatcctgaactgcccacatatgcaacttcactggctaccaacgaccacgctgtgggcgaggcagggaggaaatgtggcatcttcattttactgatgaggcaactgtggcaggaaggggctgtgggtgatttgcctgtggtaatgcagtgagtggtcctgctactggagggctccctagcattgacaagcctggcttccctctacctccctatgcatctggggccgtgtgacttgcgtccacctctgtacagcatcctgtgggagggagggcgcacctccaggaaagagcacagaaagctacgttctcaggatgcagccaggagactgaagccctctcccaaccgggggcccggagggcacctcagccatggcctggctataagtgagaaggggaaggacctggggaaatgacttctcttctaagagactcagtgtcttcatctggaggatgagggggttgaccagatgatctctaatttccctaggatccacttttacccccatcccccaatgctcagtttataagggtctgcagcctctggctcaggaatataatcccacagaagactcggagccttaaggtgctatcatctttctcacccactttcttctgggccccaacattgtcctggaggtagagaggccaggaatttgcacaccatggcccagtgctttgatgatccccacttttgaaatctgtcagaactaagttcgaaacctaacatgttcagcttgtaattatcagagttaaagacagagagagagagaaagagagagagaacctaacatgggctagctgtgggggctcacacctgtaatcccaatgctttgggaggccgaggctggaggatcactgaggccaggagttcgaaactagtaagaacccatttttacaaaaaaaattttttttaatttagccagatgtggtggtgcatgcttatagtcccagctactcaggcagctgacgcaggagaattacttgaggccagaagtttgagaatagtttgggcaacatacggggaacctgtctttattaaaaaaaaaaaaatttatctgggcatggtggcacatgcctgtagtcctagctactcaggaggctgaagcaggaggatcacttgagctggggagttccaggctgctgtgagctgtgattgcaaaactacattgaagcctgggtgacagagcaaaaccctgtctctaaaaacaaaacaagaaaacctaaccccccactgactgccgctgtgtgacctcagcaggctcgggggtgagactcggtaaagggcaggttttcggggtcctcatccacccccttccctgtgacacagaactgccctttgccaacttccctcgaatgtgagaacaaacaagatatactgagggttccttagaggaaggcactagaacaagcctcagcaatactccttccctttaagcagagccttgggcccctgcgcgcacacatccccaccacatgggggctcatcgaatcccggctgctttcctcctccaggttcgtacaatccacgagaccagaggaagacagcaggtgcctgagacatgcccgagcctcggcagcttccctacctagagcagagggagaggcgggcagcaggcatgcagtagggctgggcctggcagcggagaggctggctcctagtccccatggcccctcagagcccagcctcctctctgctcttctggggccttggtaggacacatgagatcacgtctgggcggtgctcagggcgtctgagagagaaaaggcccaagggatggaggtgggattaattatgtattagcacgcttctttattagcacttctgtttactgcagggcacagtggaaaacacatggggcttggtgtcagagaatccaggctggacatggggcctggccattcaagaggtgtgggcaagtcacaacctctttgggccccggttccgggaaaaaggggatgaacaacatctgagcgatgctggagaaagcatgacacaaatcagatttcctcacctgtcagtgggattgcaagaacaccagcctcccagcatcgctcactgtgaggtggccaagtgcctggcccggggccacatgtgagtgacatgcagggggtctcgttgctggaggagcagggaggtgcagggtgaaaggcctgaggatcgggctattggcagtgccgttcaggctggcactctctgggtgtgtcccaggtgggtatgctgggccagctctccttaggcagatacccacagcagcaagagaaggaaggggctgtgcaggactgcagggagggaggcacccggctccttgcctggctaatgcaagcctctctttggggtcccagctgtgggagagaaagggctccctcttccctaggatgccagatccatcagcagctaattatctaatctgttccccttggcctgaggaccacgatcacaggctcaaggagtcactggccatgagctgaatctgacagaaaaggacgcttgcaggccacaccctcaggagggcaggtgttggggaggcaggtccagggcttccgcctccagggctggcccagaggctggagaagtccaagttcaagttcctggggctgactcatcagaaagagggtgaagagaaggtcagggcagggactggttgaatcaagacaggctctccttgcaggagggcctgcagacaggctgctgcagaaaaggaaggcgcagacgtgtccataaatactcccagattcagttatgtgctcctctgcctcctgccatacaaaagtctcactgatgcatcccgtcacccccacaacccaggaccagtgccccaacaggagggctctgggggcctctccagctccttactgacagttcggctgctgctgccgctgccctggcacgccaggcatgccaggcccaggcactgccaagtcacatgctctgcgcgggcgaggccgggcactgctggggcagccttggggatgcagggtggtgtggcattcgcaggcagtgtgggtctgcagaaaaacggagtgcccagaggcagccggccacctgcctgccaccctccccagccccaccctccttccaggggagaaatccttgggcaaacagtcagccaggtgtgagcagcacagctaatgcagggctgggaaaagcaaacacggagggcctccatgctgtgggcccgctgccctatggggtggcattcgggtggccctgcccacagctgccattggtgtccccagcactctgcctacagtatttggagggtcttccaggatgaatgctttggccttccctccactgtactccccggaggggcctgactgtgaggtgacagaagcagcgcagggaagaacaggcaaggcatgagtctgcaaagggtgaggcggacctaggcctggagtctctgctgggccacgccttggctgggtgacttggagcaagtcaaaggacctcagggccagggatgcccaccgcacatggcctttgtgaaggttaaatgggatgaggcccatgtgggaccactgagaaaggatttggcacagaagagggtctggatatgtgggtgctcagcttagtgccacctgtgggtgtggggtggagccagggcaggtcgcagtaggagaggcagtgccatggaggtctggcccacacactctcccagggcatgctcacctggctgatctgtgaccccctggccttagctccagggcagtaaggccaacaccagacttctggcctgtggctgcagggccagccaggagggaaggatggtccagttctattctaccagcaggggctgctgcgtctactggccccaaactcagggcagaattccccccaactgagaaaggcctgttcccccaatggctcccatccagggcttcagcttcaggctggcccccacccatacgcagccagaggaggccctgtctttctgagggtgcatagcatgtcctgctttctctgctctgctgtgcaccacagttgagcgtgctctgcaggcggtctgcatgcctctgtgcccttgcacagtctgttctctttgcccaaaaggccttttccaatcctgctcccctgggaactcctcagtgttccaaagctcagcctaaacacaacctcctctgtgaagctgccagggcccgccaacccccaagggcagacctaatcagtgccccctccattccgggctccccactgggctgggagctccaggagggcagggctacactctgcatctctgtgtccttggcacccagcaccacgcctggtgcctagcagctgctcaagaaatgtcagacaaggcccccgggccagctcccttgctcctctcagatcatgctgccggcacatttggccaaagagactcagagatggcatgtgggaagcagggtaagagtgagcttccccagggaagcaggtggggtacgaggtttcctttcctttggaaactgtccgtgctacgtgcaccaagcttcacccactatcagaagtggctctggaggcttgcaggctgcctccccatctccaaaagcagaaaccaaagttagcaggggggtgagcaaaggaaagggaagtgcaccggaactgcagagagaaaggcagttgtggctgccatctgctgtgagcaagatgtttggagaacatgcgctcctcattctgaggtctcccagccaacttgcagagagctgggccgcccctctgcagatgggagcctgcagctcagccaagctgcagaggcaccacaggagagatgtcagggaccctgcctgcctgccctgaccctctggctggcccagtctgaccttctgattcttgagcagactgggggccaggatgccagcccaggacaagagtcacactgccttttccagggagcccccaacaggctctgagaaggcaactccacaataaggctgatgataatgtaaacataagggtgataagggcagtagtaccagccattgctcactgagagcccaactagctgccagaagacctggtactgggaacttccagtcattatctcactttgccccatgactcccaggggaggaggaaatggagggtccaagaaagggccctggcactgctcctcactgcagagacacctggctacccagggccatcacaggaggaaattagctgggcatggcagggcatgcctgtagtcccagctgcttgggaggctgagatgggaggatcacttgagcccaggaattcgaggctgcagtgagtgcactgagctatgattgtaccacggcactccaggctgggtgacagagcaagaccctgtctaaaaaataaaaaaataataaaaataaaaaaaaacaggagaatatctgagtgggaaggaacctctgagccactgagtcacaaatgctcatttgagggaggaaggtgaggaaggatgtagacagctgccccaggccacatcgaggtcagcagcaggctgggagcagaacctggaaccctgccccacagcccaggctcctggggccttggtgtgctcctgcgcaggaatggctgctgtcctcctgtccttggcaccacctggggctcagccacgtgtggccattcccccaagcagagcgatgcatttccgaggactgaggtaatgctggccttgcctggagggcccatctcagtttaggccaggccttccctcgccctggcccggcttctatgctcctgaccacagcagcgggccaagctcaggaggctgggtagggttgggcctaccaaccacattcctttccagggccaccttaccctggggctacccacaaaggaatttgcacagccaacagcctcatcagagtcactggagctgtccatggcactggggcacagaaaccgcttcatttctcactggccaggtgagcaggtagggggctgagaagtctgcctgccaagaccgaaccatgccagggtcctgaatgtcgccctgtgccctcagccctggcaggccagtccccagaggctaccatcccctgctatgccatcccagggaggtcatgggtgacctccctccccttggcgataggaaggtgaggatcttggggcaaaccacccagatccacacctcccatcccaccccacgcagctctgctgccactgcccccacaggccagctcacaagccgcacactccacatttctgtctgctcagtcctcccccagccccctacacacggtaattgcaacacctccaccccactgacagtgcctgccgctgcctgctcgctgccaaggaggctgggatggcccaaagatgtgcttcacgcaaaccttgctaggggaagggactacagttttccccttttctccaaggggtctttggatccgggtgctgaccccacttcctgcctctcacagctccccaccccaccccaccccacccccaaccccgggtcgcccagtctgtgaaatgcctcttactctgggagggatggagggaatcaatggcttccctattctcctgcctctcccacaggggaaggggaggggaggcatgtggcccctggagggatctttcagggagcgccccggccccactgctcctccccgctgggaagtgggggtggtgtccttgacggacggacggctgggcgtcaggtccactgggagtggaaggcaggcagccagggtagtgggcacctccacccccactctcccgctcccaggactccatgggaatcgctgtcactatccagacaccttcacagagaactcatgcctaggctgaggcacagccaggccgagggtgagtcagccagggaaatcccggcactggcgcccaccgctggtgacggttccgctgacacctacggaacggggtgcccagcccctcccgcagagggtgagaggaacacccaggctcccccactctcatttcctgctccctgagagcaagcctggtggtggggacagggaggagtctcagtgggggcggagtcctggagcgaggcctccgcaggctgccgtctttgggcctctggtccctcacccttgaacatcagcggggaaggaggtgggagaacggtcaccacagcccctgggctctggcccggagcctgtcatccacactctgggtatctggctttccagggtctcaccggggcacgcagggatgcacaccctacctcattcctgaagggccctgcccctgccctccttccaggcaaggccactgctctgcctgagcccagcacccccactatatgctgtcctggaccccaaaaaggcaagatagagagcagacttaagccagaagtcagtaccctccctgggatgaaagagagagaggaggagcaaagaggagccaagaagaacagaaagccaggcacaaagcctccttacagcaggacattctgtccctggagaagcgcctgtggccaggtccccacaaactcgccagaccagttggctggagcggggtgggaggctcagaccagggccagagagtggacctaggacctgaaagctcccagacaagaagctcccactgctcctccccgctgggaagtgggagtgggttggactcagcaggcccttaggcaggagcttctggggacatgaactcgaggatgccaagccctatcctcaagtagctcacagtgcagaataacaaggaaaccggggcgggtcagtgagcacagagctccgacactgatgcctggaccactgctcagccccaggcagacagaga

SEQ ID NO: 3105 - protein, 352 aa, Homo sapiens
DAFRAFHQDLNFVRKFLQPLLIGELAPEEPSQDGPLNAQLVEDFRALHQAAEDMKLFDASPTFFAFLLGHILAMEVLAWLLIYLLGPGWVPSALAAFILAISQAQSWCLQHDLGHASIFKKSWWNHVAQKFVMGQLKGFSAHWWNFRHFQHHAKPNIFHKDPDVTVAPVFLLGESSVEYGKKKRRYLPYNQQHLYFFLIGPPLLTLVNFEVENLAYMLVCMQWADLLWAASFYARFFLSYLPFYGGPGKPLVRVDHTDEPHPQGDRPREAPGLGQLSAGSHLQRGALTFHQLVQRAPQLPDRAPPLPQDAETQLQPGGPAGQVAVCQARPQLRSEALPHRAGGHRQVPEEVW

SEQ ID NO: 3106 - DNA, 542 bp, Homo sapiens
tttttaaggtcttatgtattgcagctttattgatagtgatgagatgacaaaataacactacatacattttagtttgttgttccttatatagtaccagaatgttttaagcaaagaaagaaatttttttgccaaaatttgctgaataaataaaaagtttttaaagaatatccaggacaaataatttatttcaaattccctgagagggcaaattaaatggtctttacccagtgaatgtgctggagggtaaatctttaatattttagattgtttaattcttataattacgaataaaggactgtttggaaaattattctgtaggttttttggcatgaaaagaaatactgaaaagtatttccttttaatgctgccttgtgctggagaacatattcatcagcggctggaatagggatgtagttcattcagagattacataaattcatttggttgtaactaagggaaaaaaattaatgaggtgattttagtttatttcgtctcgtaacttggatgagttctgaagacacttggccaggataaccagcaaa

SEQ ID NO: 3107 - DNA, 399 bp, Homo sapiens
ttttttttttttaagggaaacaagaaataaatgtatttaattttaaaacagccataataaaagtagacttgataaataaaacccaaaaccacttctttgaaaagaccgttaaaaaaacctctgagaagtcaagcaaaagagaaagaaaaggcacaaattttaaaatgttagatttagaaaaatggcataataaccaacgtgcagaagctgcttcaaatcaaggagacgggaggccagcttcattccatgggaggccagcttcattccagtaggttctgtttcacctggatgaaatggaagattttcttggaatgtataaattggcttagcaggaggcagaaaaccctttcacagctggggagtggagcctgggcctgcgcctctccgcgccagagccgg

SEQ ID NO: 3108 - DNA, 475 bp, Homo sapiens
ggaccgcggtgtcccgggcgctcctgcaggactagatcgcaccgggaagcagcgcttcggggcaccgcacctcgctccccattagatggcggcttttgcctgacagcggatggggcactggggtcgggtcgggaacgccaagtatcctggcaacagggtctcccgaggcagccagcaaaccaatcataaggattttgcgcgccctggggtccattgtgaggtgttccgaccaatgggctccggttctcgcctctagtaacaggcgccccttccttgaccaatgagcgcatccccgtcgctcccccgccgctcccccgccgcaagcctggcaacaagggcgcctcaattggtaggggaggtcgggtcacctcgggggcaactgtactgggcctcttccgggtgccaagatgtaccttgcacggcgcctgacctgaggttagacccgcccttccccaatcacaaactcgactttgtt

SEQ ID NO: 3109 - DNA, 511 bp, Homo sapiens
ttttcggtgtttgtgtctttatttggagaccaggagacagattacagcttaatgagaggaacaacgactcaagtgatctgatgggaagggtgagtttcctggcccttaggaagcaacagatgtgatttctaatcaacaaaaactagtaagtctggaacttttcagacaggaagctgagaggctaccaaaactaaaagtgaaagtgtctgccatcaatgtgtaagtctaaattacaaataaatacattaataaagcccctaacaggggttacaaaatttgtatgactgtaataaagcacagaatataaaatctgaaaagcttaactacgctgggctttttgcaccccattctctgagacaggaaccacacatgaaaggtcactggaacccccacatgcacctctgggaactgtgacttaagagaaaatggagacttcttgaaagataaagcagaaaccacaatttggcaaggacagcattttatctcaattcctttacttttcactcccttg

SEQ ID NO: 3110 - DNA, 544 bp, Homo sapiens
cacgagggcattgctcaaaaggaaggatttggcaaatcttgaggtgccacatgagttacccaccaaacaggatggcagtggtgtcaagggctatgaagaaaaacttaacgggaatctcaggcctcatggagacaacaggactgctggaaggccaggcaaagaaaacatcaatgatgagcctgtggatatgagtgctagacggagtgagccagagcgaggaaggctaactccctcaccagacatcattgttttgtctgacaatgaggcttccagtccccgttccagttccagaatggaagaaagactcaaagcagccaacttagagatgtttaaggggaaaggcattgaggagcggcagcagcttatcaagcagctgagggatgagctacgattggaagaagcccgactggtcctgttaaagaaactgagacagagtcagctacagaaagagaatgtggtccagaagactccagttgtacagaatgcagcatctattgttcagccatctcctgcccatgtgggacagcagggcctatctaagctt

SEQ ID NO: 3111 - DNA, 430 bp, Homo sapiens
ttttttttttaaattttacattgcaggtctcattagcagaaaactgctggatttgtatgaaagcaacaacacaattggtttcatactagcaacgtaaggtgaatttgaattcaatctgacgccaagctttgtgttggttgaggctcgcaaagatataaagctccctaccctccaagattctgctttctggcagcagcaatagatgattaaaccgcaaaccctaactacagtgacaacaaaaagtatttggagcacaaaggacaaactgctctgcctgagggtaggggcttgtcaatgatttaggagcaagaccaactcaactgggtcctcaaagataaccaggatttttgcaggctaagaaaagcctagggggaaaactagctcaaaggcaaagaggtctgtttgaattccctgaattgaattcagagtc

SEQ ID NO: 3112 - DNA, 317 bp, Homo sapiens
tttttaaaatttttttttttttttttgaacagacaaatttcaaggtttaataaattttatcttgataacatcaaaaacaagtttagcttttacactgcaatataaaaaatacattagtcttcacattagttttacatggaaatatataattatttgaatatttaaatatagcttttctttaaccaaaaaaaaaaaaaaaaaaaagtgttactcacagccctagttacataaataatttaaatgcacaaatgcaaaaacacacttcacacgatattgttcacatactgtagaactcaggacaattacaataaaaatct

SEQ ID NO: 3113 - DNA, 379 bp, Homo sapiens
tcctcgatttgcacaagatggcactagccccaggacaacccttccttccgtcagtcaccaagggcggggagttctggagtcggaaggcgaagagcctaccaccaggtctcccactcccgcggtgccctcccttcccttccctgcggccccggaccatatttattgcatgcgccccggcggccccccatcccgagcccaggctgggctgggctggaacgcggtctctttagctccctcctcttcgttggtatatttcctaccttgtacacaggctcttccagagccgattccattttctatactcgaaccaaacagcaataaagcagtaaccaaggaggtgatcttctgaacgataaggtgattgatcttctgcacggta

SEQ ID NO: 3114 - DNA, 2104 bp, Homo sapiens
ctctgccgagcctccttaaaactctgccgttaaaatgggggcgggtttttcaactcaaaaagcgctcaatttttttcttttcaaaaaaagctgatgaggtcggaaaaaagggagaagaaaccggcaccctctctgagaggcaacagaagcagcaattgtttcagcgaaaaaagcagcaagggagggagtgaaggaaaaaagcaaaaaagggggcgacacgcaagtgcctgtaggggtgaaaggagcagggaccggcgatctagggggggatcagctacaaaagaaactgtcactgggagcggtgcggccaaggaggaagcagtgctgccaggctctgctccagggcacagctggctggcggctgccctgtccgcagcaaaggggcacaggccggggaccgcgagaggtggcaaagtggcaccgggcgccgaggctgctgagcgctcgccgagacggcgaccggactggctgccccggaactgcggcgactctccctactcagaacttggcctacgtttcccaggactctccccatctccagaggcccccacaaaaccgggaaaggaaggaaaggacagcggcggcagcagctcaatgagtgcctacagcagaaagcctgaacgagctcggtcgtaggcgggaagttcccgggggggctgcccagtgcagccgcaatgctgccgcgagctgccccagcagtccgggctccgtagacgctttccgcatcactctccttcctcgggctgccgggagtcccgggacctggcggggccggcatgacgggcttctcgggggcccgccgcacgcccggcagcctccggagacgcgcgccgagcccggctcccacggcctctgaggctcggcggggctgcggctgcctggcgggcgggctccggagctttcctgagcggcattagcccacggcttggcccggacgcgaccaaaggctcttctggagaagcccagagcactgggcaatcgttacgacctgtaacttgagggccaccgaactgctactcccgttcgcctttggcgatcatcttttaaccctccggagcacgtcagcatccagccaccgcggcgctctcccagcagcggaggacccaggactatcccttcggcgagacggatggaaaccgagccccctggaggacctgcccctgcagttctgcctcacacggctcaagtcaccaccgtgaacaagggaccctaaagaatggccgagccttgggggaacgagttggcgtccgcagctgccaggggggacctagagcaacttactagtttgttgcaaaataatgtaaacgtcaatgcacaaaatggatttggaaggactgcgctgcaggttatgaaacttggaaatcccgagattgccaggagactgctacttagaggtgctaatcccgatttgaaagaccgaactggtttcgctgtcattcatgatgcggccagagcaggtttcctggacactttacagactttgctggagtttcaagctgatgttaacatcgaggataatgaagggaacctgcccttgcacttggctgccaaagaaggccacctccgggtggtggagttcctggtgaagcacacggccagcaatgtggggcatcggaaccataagggggacaccgcctgtgatttggccaggctctatgggaggaatgaggttgttagcctgatgcaggcaaacggggctgggggagccacaaatcttcaataaacgtggggagggctcccccacgttgcctctactttatcaattaactgagtagctctcctgacttttaatgtcatttgttaaaatacagttctgtcatatgttaagcagctaaattttctgaaactgcataagtgaaaatcttacaacaggcttatgaatatatttaagcaacatctttttaacctgcaaaatctgttctaacatgtaattgcagataactttgactttcttctgaatattttatctttccttggcttttcccttgcttccccttttgccaatctcaacacccaagttgaagactttgtttttaaaatggtttgtcctgatgcttttgtctaattaaaacactttcaaaacaggaaaaaaaaaaaaaaaaaa

SEQ ID NO: 3115 - protein, 168 aa, Homo sapiens
MAEPWGNELASAAARGDLEQLTSLLQNNVNVNAQNGFGRTALQVMKLGNPEIARRLLLRGANPDLKDRTGFAVIHDAARAGFLDTLQTLLEFQADVNIEDNEGNLPLHLAAKEGHLRVVEFLVKHTASNVGHRNHKGDTACDLARLYGRNEVVSLMQANGAGGATNLQ

SEQ ID NO: 3116 - DNA, 999 bp, Homo sapiens
gggcgaggctgcaccagcgcctggcaccatgaggacgcctgggcctctgcccgtgctgctgctgctcctggcgggagcccccgccgcgcggcccactcccccgacctgctactcccgcatgcgggccctgagccaggagatcacccgcgacttcaacctcctgcaggtctcggagccctcggagccatgtgtgagatacctgcccaggctgtacctggacatacacaattactgtgtgctggacaagctgcgggactttgtggcctcgcccccgtgttggaaagtggcccaggtagattccttgaaggacaaagcacggaagctgtacaccatcatgaactcgttctgcaggagagatttggtattcctgttggatgactgcaatgccttggaatacccaatcccagtgactacggtcctgccagatcgtcagcgctaagggaactgagaccagagaaagaacccaagagaactaaagttatgtcagctacccagacttaatgggccagagccatgaccctcacaggtcttgtgttagttgtatctgaaactgttatgtatctctctaccttctggaaaacagggctggtattcctacccaggaacctcctttgagcatagagttagcaaccatgcttctcattcccttgactcatgtcttgccaggatggttagatacacagcatgttgatttggtcactaaaaagaagaaaaggactaacaagcttcacttttatgaacaactattttgagaacatgcacaatagtatgtttttattactggtttaatggagtaatggtacttttattctttcttgatagaaacctgcttacatttaaccaagcttctattatgcctttttctaacacagactttcttcactgtctttcatttaaaaagaaattaatgctcttaagatatatattttacgtagtgctgacaggacccactctttcattgaaaggtgatgaaaatcaaataaagaatctcttcacatg

SEQ ID NO: 3117 - protein, 136 aa, Homo sapiens
MRTPGPLPVLLLLLAGAPAARPTPPTCYSRMRALSQEITRDFNLLQVSEPSEPCVRYLPRLYLDIHNYCVLDKLRDFVASPPCWKVAQVDSLKDKARKLYTIMNSFCRRDLVFLLDDCNALEYPIPVTTVLPDRQR

SEQ ID NO: 3118 - DNA, 480 bp, Homo sapiens
gtagagacagggtctcaaacccctgggttcaagtgatcctcctgcctcagcctcccaatgtgctgagattataggcgtgacgaccgtgcctggcctgcaaactttataaacagaattctggctaaagcctccagtataaatgggcaaagtagatgtcttaatttattttatgctgctataacagaatatctgagactcggtaatttatgaagaaaataaacgtatttcttatagttctggctgagaagtacaagaccatgaggtctgcatctgataagggacttcattttacatcatcccaggtcagagggcagaagagcaagagacggtgcacactcctttataactaacccactcccaaataaagacagtaatccattcacaggggcagacccgtcatgaccgaatcacctaataggccccaactcccaacactattgcaccagggattaagtttctaacacacaaactttggagaac

SEQ ID NO: 3119 - DNA, 228 bp, Homo sapiens
tttttttttttttatttgtataagatcaagtttattatttccagtgctttctgcaactattttctcaaaatattctttccccccaagatgttagataagtcatatggaattgcagtttggggctatttttgcagaaatcctgttcagaggtccctttcatcatctgcataatattaatttcacttgggcttcctgctgcccacatgcatctcagccaggcagacagag

SEQ ID NO: 3120 - DNA, 137 bp, Homo sapiens
ggtaggcaaatcaagaaagagcattggtttataactcagagaggcagtactgtggccatgtcagtagtggatgctacgtgtgccccatccagatccctttattaaataaatgctagccaagtgagtaaaaggtacaa

SEQ ID NO: 3121 - DNA, 506 bp, Homo sapiens
aatttttttttttttttttttttttgcattcatagatactttatttaaaaagtacactaattgaagttttacaccattttatgattcatcaaacacagcaactgaatactggcgtatagcaacattacagatgatgttagtctaagataaaactcataacacattttaaaaagggtaaaaggaaggaaaggaaaaaggatccaaggctgtagaaagattttaaaaacaaacatcgtatgtctgaacctttgcctggagtttcttattttgtgaaaagcagtttgtaagtagaggactcgtaagtgcacctagtacactgcaatggcacagacacggcagatagtcaataaaatgatctttaacttctgatctagattatttttgttgttgttcatgtattaacctagtgaatctcagccaatagatggagtggcattgacctgcacaacttccaaaatcccatccaaccttagtgtcctctgaagttctccataacttattgtctg

SEQ ID NO: 3122 - DNA, 349 bp, Homo sapiens
atagagtcggagttttaccacatttcccaggctggtgttaaactcctgagctcaagtgatccgcccggccttggcctcccaaagtgtaggattatagggatgagccaccacacccggccagacatttaaggttttaaaaaaatctttgctcatttgtggtttttaaaaaatgtactacaatgagcacatactatttgtggaacaataaaaaagttatttccaaaggaaagtggctggtaaggaggctgacatgacagccggcaataataattagtgatcattacaagttggaaagagggaccttctccttggatggtgcacctactatgagccacataatttatggcac

SEQ ID NO: 3123 - DNA, 493 bp, Homo sapiens
tttttttttttttttttttttttttttttttaaaaaaagagggtgcactataatgcccaagctggattgaactcctgggctcaagcaatcctccaccatagctgggactacaggggcatgtcaccacacctgccttcaaattttttattgggggaaactcttccttaatgtattgacatttttttctgcttgatttattctccgacagcttcaggggtatcaattattggcatactaaattgactgtattccctatctggcactctctctctagtctttcttcatttttatttgttccattttgggttgctcaaatttctcaagcttgcttccattacccccagctatagttgatatttgcactttgaatgtttctgcaatgttacttttctcttattttggaccctgattccatcagctcactcttacaatacttctggtggcttcttttatttctcgagcttttatatctcatctttaaactctagtttca

SEQ ID NO: 3124 - DNA, 320 bp, Homo sapiens
ttgaggcctacgcgaaaatctgtgacccagggctgacctcgtttgagcctgaagcactgggcaacctggttgaagggatggacttccacagattctacttcgagaacctgctggccaagaacagcaagccgatccacacgaccatcctgaacccacacgtgcacgtcattggagaggatgccgcctgcatcgcttacatccggctcacgcagtacattgacgggcagggccggccccgcaccagccagtctgaggagacccgcgtgtggcaccgccgcgacggcaagtggcagaacgtgcacttccactgctcgggcgcg

SEQ ID NO: 3125 - DNA, 305 bp, Homo sapiens
  misc_feature (43)..(43): n is a, c, g, or t
  misc_feature (143)..(143): n is a, c, g, or t
  misc_feature (173)..(173): n is a, c, g, or t
  misc_feature (183)..(183): n is a, c, g, or t
  misc_feature (205)..(205): n is a, c, g, or t
  misc_feature (217)..(217): n is a, c, g, or t
  misc_feature (262)..(262): n is a, c, g, or t
tttttttttttttttttttttgcaggcggcggtgcagcggatntgccttcatcttttaatggccggtgcggtacagttagtggacagacgggggatgggacacagcaggggtgaaacagggcagtcacagccggggccggggntctggaagcgggggcgttcctccccctggnaaacaccgtntctggaaggaacacccttaggntcccctgacctnagggtgaccacccacacgggacctggttttctgggaggcccgggntggagtgacccccagcccctccctacgttccagggacccttgg

SEQ ID NO: 3126 - DNA, 478 bp, Homo sapiens
ttttttttttttttttttgctagtgaccacagtttgcaatattattcttgtcattcttgcaattgtagaattgtaacatacatttaaagtatataactgcttcaccctgtgtttaactaaaagacagaccctcacactttcaccagggctgattctcagctccctcagggtcttcgctgagcccctgcttttctctcacctaggtgtggggctaacagtcaacaatctgaagaccagcttccttccctgtcagacgacaatatccaaacacaggacgagaataaagctggcatatgaatctagtcatacaaaccttctgagacacatggtaattattacttctagtcatttttcaaatacgttttgtgtatttggaatggggatttttttaggtgtggatgtgtgtgtgagtgcaggtgtgcagagaataagattaattcgggtttgagactcagatcagtccacagctctctaagct

SEQ ID NO: 3127 - DNA, 377 bp, Homo sapiens
tttttttttttcaaataaggcgggaattttcaaatcagtagatatttcttaaagaaactgtcatgagatttgagaacaacatgtattgagccacagctgaaggactgagaatatgatttctgcaaagcgcacagaagaggcagggcccaggctatggcaggccagctggtaggcaggtgaagccagatgggaatcccagagtgcccatctaaagccagaatttggaggcccgacaggccccaacaacgcccaaagccctcccagagaggcagatgctcagcaggtgtggagggaaccccctggccctgcttccaaggcccctcactcacctccagtggggtattcgtctccaggacatgagtctcatctgcttcctg

SEQ ID NO: 3128 - DNA, 749 bp, Homo sapiens
gtgactcccccctgccggctgcggaggtggaggggggacggcgcccccgccgtgtgcgtggggcggggatggagcacgcgccctggagccccggagccagatgctctgacctttgacccctgccgttcagctctagggcccgtgcaggccacaccatgaacacctccccaggcacggtgggcagtgacccggtcatcctggccactgcaggctacgaccacaccgtgcgcttctggcaggcccacagcggcatctgcacccggacggtgcagcaccaggactcccaggtgaatgccttggaggtcacaccggaccgcagcatgattgctgctgcaggttaccagcacatccgcatgtatgatctcaactccaataaccctaaccccatcatcagctacgacggcgtcaacaagaacatcgcgtctgtgggcttccacgaagacggcgctggatgtacacgggcggcgaggactgcacagccaggatctgggacctcaggtcccggaacctgcagtgccagcggatcttccaggtgaacgcacccattaactgcgtgtgctgcaccccaaccaggcagagctcatcgtgggtgaccagagcggggctatccacatctgggacttgaaaacagaccacaacgagcagtgatcctgagcccgaggtctcatcacggtcgccagatcgatcccgagcagctacatggcagctgtcaatagcaccggaactgctatgtctggaatctgacgggg

SEQ ID NO: 3129 - DNA, 530 bp, Homo sapiens
tgacttgaatttaggtgacactatagaagagctatgacgtcgcatgcacgcgtacgtaagcttggatcctctagagcggccgcctactactactaaattcgcggccgcgtcgacgctggtgcacaggaaggatgaggaagaccaggctctgggggctgctgtggatgctctttgtctcagaactccgagctgcaactaaattaactgaggaaaagtatgaactgaaagaggggcagaccctggatgtgaaatgtgactacacgctagagaagtttgccagcagccagaaagcttggcagataataagggacggagagatgcccaagaccctggcatgcacagagaggccttcaaagaattcccatccagtccaagtggggaggatcatactagaagactaccatgatcatggtttactgcgcgtccgaatggtcaaccttcaagtggaagattctggactgtatcagtgtgtgatctaccagcctcccaaggagcctcacatgctgttcgatcgcattccctttggtggg

SEQ ID NO: 3130 - DNA, 324 bp, Homo sapiens
  misc_feature (79)..(79): n is a, c, g, or t
  misc_feature (101)..(101): n is a, c, g, or t
cttgaggggaagaggctgactgtacgttccttctactctggcaccactctccaggctgccatggggcccagcacccctntcctcatcttgttccttttgtnatggtcgggacccctccaaggacagcagcaccaccttgtggagtacatggaacgccgactagctgctttagaggaacggctggcccagtgccaggaccagagtagtcggcatgctgctgagctgcgggacttcaagaacaagatgctgccactgctggaggtggcagagaaggagcgggaggcactcagaactgaggccgacaacatctccgggagagtggtc

SEQ ID NO: 3131 - DNA, 482 bp, Homo sapiens
  misc_feature (24)..(24): n is a, c, g, or t
  misc_feature (146)..(146): n is a, c, g, or t
  misc_feature (341)..(341): n is a, c, g, or t
  misc_feature (381)..(381): n is a, c, g, or t
  misc_feature (426)..(426): n is a, c, g, or t
  misc_feature (447)..(447): n is a, c, g, or t
tctaatcacacttgaccatgagtnttgagttgcttttccttcctctgaggccaagagttacttatatccaagaccgtgaagaactctttttgacctgttggatatgatcttgtgactgggtcgaggaaaatgaactcccagggttnttggagtagagctgtttccaccaaaagacagaactgtatgcagctaataagagctccagcacagtgaagatgagcatcaccactaggacacctgttaaactgacactggtcaggagacaatctttgatttcatatattgggataatagtactccgattaagggcaatgagggatagataatccatttctgagccnccaatgttgagaggcagtccctcaggggctaccctgctgntcagcaagggagggaggagggcctgcttcctgcagttaaccaggncttcactggcattttgagggncaagctgctccgggtcaaggggctttagtttgttg

SEQ ID NO: 3132 - DNA, 6846 bp, Homo sapiens
ctgtgcaacggggtcaacgactgtggtgacaacagcgacgaaagcccacagcagaattgccggccccggacgggtgaggagaactgcaatgttaacaacggtggctgtgcccagaagtgccagatggtgcggggggcagtgcagtgtacctgccacacaggctaccggctcacagaggatgggcacacgtgccaagatgtgaatgaatgtgccgaggaggggtattgcagccagggctgcaccaacagcgaaggggctttccaatgctggtgtgaaacaggctatgaactacggcccgaccggcgcagctgcaaggctctggggccagagcctgtgctgctgttcgccaatcgcatcgacatccggcaggtgctgccacaccgctctgagtacacactgctgcttaacaacctggagaatgccattgcccttgatttccaccaccgccgcgagcttgtcttctggtcagatgtcaccctggaccggatcctccgtgccaacctcaacggcagcaacgtggaggaggttgtgtctactgggctggagagcccagggggcctggctgtggattgggtccatgacaaactctactggaccgactcaggcacctcgaggattgaggtggccaatctggacggggcccaccggaaggtgttgctgtggcagaacctggagaagccccgggccattgccttgcatcccatggagggtaccatttactggacagactggggcaacaccccccgtattgaggcctccagcatggatggctctggacgccgcatcattgccgatacccatctcttctggcccaatggcctcaccatcgactatgccgggcgccgtatgtactgggtggatgctaagcaccatgtcatcgagagggccaatctggatgggagtcaccgtaaggctgtcattagccagggcctcccgcatcccttcgccatcacagtgtttgaagacagcctgtactggacagactggcacaccaagagcatcaatagcgctaacaaatttacggggaagaaccaggaaatcattcgcaacaaactccacttccctatggacatccacaccttgcacccccagcgccaacctgcagggaaaaaccgctgtggggacaacaacggaggctgcacgcacctgtgtctgcccagtggccagaactacacctgtgcctgccccactggcttccgcaagatcagcagccacgcctgtgcccagagtcttgacaagttcctgctttttgcccgaaggatggacatccgtcgaatcagctttgacacagaggacctgtctgatgatgtcatcccactggctgacgtgcgcagtgctgtggcccttgactgggactcccgggatgaccacgtgtactggacagatgtcagcactgataccatcagcagggccaagtgggatggaacaggacaggaggtggtagtggataccagtttggagagcccagctggcctggccattgattgggtcaccaacaaactgtactggacagatgcaggtacagaccggattgaagtagccaacacagatggcagcatgagaacagtactcatctgggagaaccttgatcgtcctcgggacatcgtggtggaacccatgggcgggtacatgtattggactgactggggtgcgagccccaagattgaacgagctggcatggatgcctcaggccgccaagtcattatctcttctaatctgacctggcctaatgggttagctattgattatgggtcccagcgtctatactgggctgacgccggcatgaagacaattgaatttgctggactggatggcagtaagaggaaggtgctgattggaagccagctcccccacccatttgggctgaccctctatggagagcgcatctattggactgactggcagaccaagagcatacagagcgctgaccggctgacagggctggaccgggagactctgcaggagaacctggaaaacctaatggacatccatgtcttccaccgccgccggcccccagtgtctacaccatgtgctatggagaatggcggctgtagccacctgtgtcttaggtccccaaatccaagcggattcagctgtacctgccccacaggcatcaacctgctgtctgatggcaagacctgctcaccaggcatgaacagtttcctcatcttcgccaggaggatagacattcgcatggtctccctggacatcccttattttgctgatgtggtggtaccaatcaacattaccatgaagaacaccattgccgttggagtagacccccaggaaggaaaggtgtactggtctgacagcacactgcacaggatcagtcgtgccaatctggatggctcacagcatgaggacatcatcaccacagggctacagaccacagatgggctcgcggttgatgccattggccggaaagtatactggacagacacgggaacaaaccggattgaagtgggcaacctggacgggtccatgcggaaagtgttggtgtggcagaaccttgacagtccccgggccatcgtactgtaccatgagatggggtttatgtactggacagactggggggagaatgccaagttagagcggtccggaatggatggctcagaccgcgcggtgctcatcaacaacaacctaggatggcccaatggactgactgtggacaaggccagctcccaactgctatgggccgatgcccacaccgagcgaattgaggctgctgacctgaatggtgccaatcggcatacattggtgtcaccggtgcagcacccatatggcctcaccctgctcgactcctatatctactggactgactggcagactcggagcatccaccgtgctgacaagggtactggcagcaatgtcatcctcgtgaggtccaacctgccaggcctcatggacatgcaggctgtggaccgggcacagccactaggttttaacaagtgcggctcgagaaatggcggctgctcccacctctgcttgcctcggccttctggcttctcctgtgcctgccccactggcatccagctgaagggagatgggaagacctgtgatccctctcctgagacctacctgctcttctccagccgtggctccatccggcgtatctcactggacaccagtgaccacaccgatgtgcatgtccctgttcctgagctcaacaatgtcatctccctggactatgacagcgtggatggaaaggtctattacacagatgtgttcctggatgttatcaggcgagcagacctgaacggcagcaacatggagacagtgatcgggcgagggctgaagaccactgacgggctggcagtggactgggtggccaggaacctgtactggacagacacaggtcgaaataccattgaggcgtccaggctggatggttcctgccgcaaagtactgatcaacaatagcctggatgagccccgggccattgctgttttccccaggaaggggtacctcttctggacagactggggccacattgccaagatcgaacgggcaaacttggatggttctgagcggaaggtcctcatcaacacagacctgggttggcccaatggccttaccctggactatgatacccgcaggatctactgggtggatgcgcatctggaccggatcgagagtgctgacctcaatgggaaactgcggcaggtcttggtcggccatgtgtcccacccctttgccctcacacagcaagacaggtggatctactggacagactggcagaccaagtcaatccagcgtgttgacaaatactcaggccggaacaaggagacagtgctggcaaatgtggaaggactcatggatatcatcgtggtttcccctcagcggcagacagggaccaatgcctgtggtgtgaacaatggtggctgcacccacctctgctttgccagagcctcggacttcgtatgtgcctgtcctgacgaacctgatagccagccctgctcccttgtgcctggcctggtaccaccagctcctagggctactggcatgagtgaaaagagcccagtgctacccaacacaccacctaccaccttgtattcttcaaccacccggacccgcacgtctctggaggaggtggaaggaagatgctctgaaagggatgccaggctgggcctctgtgcacgttccaatgacgctgttcctgctgctccaggggaaggacttcatatcagctacgccattggtggactcctcagtattctgctgattttggtggtgattgcagctttgatgctgtacagacacaaaaaatccaagttcactgatcctggaatggggaacctcacctacagcaacccctcctaccgaacatccacacaggaagtgaagattgaagcaatccccaaaccagccatgtacaaccagctgtgctataagaaagagggagggcctgaccataactacaccaaggagaagatcaagatcgtagagggaatctgcctcctgtctggggatgatgctgagtgggatgacctcaagcaactgcgaagctcacgggggggcctcctccgggatcatgtatgcatgaagacagacacggtgtccatccaggccagctctggctccctggatgacacagagatggagcagctgttacaggaagagcagtctgagtgtagcagcgtccatactgcagccactccagaaagacgaggctctctgccagacacgggctggaaacatgaacgcaagctctcctcagagagccaggtctaaatgcccacattctcttccctgcctgcctgttccttctcctttatggacgtctagtccttgtgctcgcttacaccgcaggccccgcttctgtgtgcttgtcctcctcctcctcccaccccataactgttcctaagccttcaccggagctgtttaccacgtgagtccataactacctgtgcacaagaaatgatggcacatcacgagaatttagacctggattttaccatgaacctcacatcttgtactccatcctgggccccctgaaactgcttattcgtgattcctcaccagcgtagagctccacctcccctttccccagtaccctcagtgcctgcttctcagtgctgatgcagctgatgacccaggactgcgctctgccccatcacagccagcatgactgcttctctgagagaacttgcccatcaggggctgggacatgggggtgtgggtaaagacagggatgaaggatagaggctgagagaagaaggaagaatcagcccagcaggtatgggcatctgggaaacctccagcctcaagtgtgttggtaacatgaaaaagctctggggggtagttggatctgggtgtctggtccattgctggcagtggacattattcttgccctaagagacactgccttttcagcagcagatactggtgagatgggggtggctcaggctgttcttcctcctcctagaatgtctggagctgtttctacattcagataactgggtcccctatcacaaggctactggctaataggaattccctcctggtgccaccactggccagtacctttcctaagtctttgctcaaattaaccaggttgtgagccagtggcttgagtgaatgttaggccttgggggctgagtctctgaaaagtctaagaagctctgcctagaccaaatatggtatacctcctgacccctctctccctcatgtcctgggattctggggaagagacctagaaacaagctttcaaagaaaaaccagaagttgtcataaatggtcagaaagaacgatcaggttggagacttgggaaacccagggcctaaagagaagtatccatgagggtcaaacttcctgttgaacttcctatgttctttctcaagtgctcagggatctaagttagtggacagcaagcctgtggctacggggtggtgatgttcctcttccagctgtcccctcagctaaggggcttagtttccatgtgggatgccatcacttggttcatgctcattcacacaaagggcacgtgtctcagcctggtatcagggaaattgagacttatttttgccctaaaacgtctccctagctgttcttcgtggggtttttttgtttgtttttttgcctaatttgctttttctgaccaagccttgtggcaccagcaatctccaaagtcctgtggtgggagggctgaataaataaaaatacaaagaggtgggtaaggagtaggaaggtagagagcaccactgatgaggccctcctagcccatggcagacccagacctcttctcccccaggaattagaagtggcaggagagaacaacaggggctgggaatggaggggagaatttctaggggaagtttcctgagttgaaacttctcctgtggttactggtattgagaaatcagctaccaaagtgaaaaaggacaagatcaattcttttctagtcagttctaagactgctagagagagataccaggcccttagccttgctctcagtagcgtcagccccagttctgagcctccccacattacacttaacaagcagtaaaggagtgagcactttgggtccttagactcatgtctggggaggaagagcaagtagaaaagtggcattttcttgattggaaagggggaaggatcttattgcacttgggctgttcagaatgtagaaaggacatatttgaggaagtatctatttgagcactgatttactctgtaaaaagcaaaatctctctgtcctaaactaatggaagcgattctcccatgctcatgtgtaatggttttaacgttactcactggagagattggactttctggagttatttaaccactatgttcagtattttaggactttatgataatttaatataaatttagcttttcttaatc

SEQ ID NO: 3133 - protein, 1576 aa, Homo sapiens
LCNGVNDCGDNSDESPQQNCRPRTGEENCNVNNGGCAQKCQMVRGAVQCTCHTGYRLTEDGHTCQDVNECAEEGYCSQGCTNSEGAFQCWCETGYELRPDRRSCKALGPEPVLLFANRIDIRQVLPHRSEYTLLLNNLENAIALDFHHRRELVFWSDVTLDRILRANLNGSNVEEVVSTGLESPGGLAVDWVHDKLYWTDSGTSRIEVANLDGAHRKVLLWQNLEKPRAIALHPMEGTIYWTDWGNTPRIEASSMDGSGRRIIADTHLFWPNGLTIDYAGRRMYWVDAKHHVIERANLDGSHRKAVISQGLPHPFAITVFEDSLYWTDWHTKSINSANKFTGKNQEIIRNKLHFPMDIHTLHPQRQPAGKNRCGDNNGGCTHLCLPSGQNYTCACPTGFRKISSHACAQSLDKFLLFARRMDIRRISFDTEDLSDDVIPLADVRSAVALDWDSRDDHVYWTDVSTDTISRAKWDGTGQEVVVDTSLESPAGLAIDWVTNKLYWTDAGTDRIEVANTDGSMRTVLIWENLDRPRDIVVEPMGGYMYWTDWGASPKIERAGMDASGRQVIISSNLTWPNGLAIDYGSQRLYWADAGMKTIEFAGLDGSKRKVLIGSQLPHPFGLTLYGERIYWTDWQTKSIQSADRLTGLDRETLQENLENLMDIHVFHRRRPPVSTPCAMENGGCSHLCLRSPNPSGFSCTCPTGINLLSDGKTCSPGMNSFLIFARRIDIRMVSLDIPYFADVVVPINITMKNTIAVGVDPQEGKVYWSDSTLHRISRANLDGSQHEDIITTGLQTTDGLAVDAIGRKVYWTDTGTNRIEVGNLDGSMRKVLVWQNLDSPRAIVLYHEMGFMYWTDWGENAKLERSGMDGSDRAVLINNNLGWPNGLTVDKASSQLLWADAHTERIEAADLNGANRHTLVSPVQHPYGLTLLDSYIYWTDWQTRSIHRADKGTGSNVILVRSNLPGLMDMQAVDRAQPLGFNKCGSRNGGCSHLCLPRPSGFSCACPTGIQLKGDGKTCDPSPETYLLFSSRGSIRRISLDTSDHTDVHVPVPELNNVISLDYDSVDGKVYYTDVFLDVIRRADLNGSNMETVIGRGLKTTDGLAVDWVARNLYWTDTGRNTIEASRLDGSCRKVLINNSLDEPRAIAVFPRKGYLFWTDWGHIAKIERANLDGSERKVLINTDLGWPNGLTLDYDTRRIYWVDAHLDRIESADLNGKLRQVLVGHVSHPFALTQQDRWIYWTDWQTKSIQRVDKYSGRNKETVLANVEGLMDIIVVSPQRQTGTNACGVNNGGCTHLCFARASDFVCACPDEPDSQPCSLVPGLVPPAPRATGMSEKSPVLPNTPPTTLYSSTTRTRTSLEEVEGRCSERDARLGLCARSNDAVPAAPGEGLHISYAIGGLLSILLILVVIAALMLYRHKKSKFTDPGMGNLTYSNPSYRTSTQEVKIEAIPKPAMYNQLCYKKEGGPDHNYTKEKIKIVEGICLLSGDDAEWDDLKQLRSSRGGLLRDHVCMKTDTVSIQASSGSLDDTEMEQLLQEEQSECSSVHTAATPERRGSLPDTGWKHERKLSSESQV

SEQ ID NO: 3134 - DNA, 3635 bp, Homo sapiens
tccaagatggcggaactgcagctggacccggcgatggcggggctgggagggggcggcgggagtggggtgggcgacgggggtggcccagtccgcgggccccccagcccacgcccggctggccccacgccccgcgggcacggccgcccggctgccgccgtcgcgcagcgattggagccgggtcccggaccacccgagcgggcagggggcggcggcgcggcccgctgggtcaggctgaacgtgggaggcacctacttcgtgaccaccagacagaccttaggccgggagcccaagtcatttctctgccgcctctgctgccaggaggacccggagctggactcagacaaggatgagacaggagcctatctgattgacagggaccccacctactttggtcctatcctcaactacctccgccacgggaaactcatcatcactaaggagttggcagaagaaggtgtgctggaggaagcggagttttacaacatcgcgtcccttgtgcggctggttaaggaaaggatacgggacaatgagaacagaacttcacaaggccccgtgaagcacgtgtacagagtcctgcagtgtcaggaagaagagctcacgcagatggtgtccacgatgtccgacggctggaaattcgaacagctcatcagcatcggatcttcctataactacggcaatgaggatcaggcagaattcctctgtgttgtctccagagaactaaataattctaccaatggcatcgtcatagagccgagcgaaaaggcgaagattcttcaggagagaggatcgcggatgtaaactaagaccccgaaaactccagaccttcaggagagcagtcagcagagcccctctgtgaagtgaaaccttactcctgtccagtgaccgagccactgcaaagcacagctgatcctggccccctgtgaagaagtgttctggtcaaaactaaaggaactccctccccacctgcaggactccgaagacagtgcgacttctggctgcagaataccttttcagaaacctgctttcatttgcttagccagtattagaacagatctttacaacagcagctgggctgggttcccagtcggagcctttcggggatctgggggatgagggcggaaggcctagctccttggaaatggcctgtactttaaggacgctggagccaagaggattgttcccgtgccgtgccatggtttcaccctatgtgtgccacaatggacgttagcagctgcttcggaacaccgtccctcctatgcaccctccaagacctgcagcagatgcaaagggttctagctgcagtttgtcgaattgaggttttaggtaaagcatagagttgccagagtaccccgcattcccatgaatagagcctccaaggaaagggaggatggggtgtcctttgttgtggttggaggttggtgatcattgctctggatttggggctcccggctgccaccacatgcagctttgcctcagctttctccagcagccgggaccctctggagagcttgttttccctccaagaagaggtttgagacaggcggcatcctgcactgagtcagacaagtgggagctgtaggaactgcacctgcagcctcttcttactccccattgaccctgtcttccttccctggctttttcaactggaccaaagatgaaggcacttatggaccctttgatggcttggagtggggaaggctgtttctttgaaagttgccaaatgtgttacgttgtgtctcagagagagttatttctgtgactctcttggaaatgccttgactgaatgtgcaatatttgtgtctcttggtttctaaccttggcggacctgctcccctctgtactgtccccagtggtatgtatgtatgtgctaggcagtctggggaccccctgtgtctctgaccacccccctgacccccgccattactttcttttctggagtgccatgctggcgaggatccggatgcggcagcaccctctttcgggctgcatccacagagtttgtgtccacactttctctccgagcatgtgggtctcgctgagcagtcatggaatgcggtagagccaggggaccctgtctgccccgaataactttcagtagtatggcagatggcacagagaaagggaaggggctctggggacttctccttctatgaaagccgcctcgagccaggtgctcctgggcaccttcagaagtgatgtcctgtgtgctccacagctcacctgcttgccaaggtacgtctgggtagtagtttctggaaatgactgcagactgtgccaaatgtcttttgagcttctgacctgaccatgcccagatggcataacttttccctaggaccctcagtctccttgtttctctgtatctgtagcatagcatagaacccggtatacaggggtttctgctgacacatcaacgtctaaacacctatgcgccacattttacagctgtaaagtgttagatgaactgccgtcctcagtaaaagcagccaccccttcaagagtcacaggcatccatccagtcgtatctttcagagaaaaaaaaagttagatgtagccaaggaaagtagtgatcacgggaaggactgctctgagccgggtaggatggaggactttggaagaggcgctccttggccaggtccaatgagtaacatcagactgacagaggaaaagcagcttggtttgcggccttgtgcccagtctcgttgaggcgcttgtccctgtctgctttcctggggcatgcctgatcagcgtgggctggagctcctagaccaaccccagctttctcaccaggttcagcaaggaggcctgggggtcagacaccaatgttgagcacctcctgagggcgccgtttccttcattcctcttagattccatagttgccgccatgaaaagactgctcttgagccccaaggcacaggcacgtgctctgggaaatagacaggagtggtatttccgccctctcggagggctggtgttcaccaagtttccctcctcgctgcaacccaatgacacctgtattgttccagcgctccaggactctgggttcttaagatttctgggagcgttgttcacccaccccctttaggaaccaggctggtgttcttgcttgaaagcgttgtgccctctgagtgtctggctgatcacatcagagaggtctgcgtggcagtttggggctgtcacgtgaccagtgacccacactctctgctgcccagtactgccaagtggggagggtcctgcctttttctctgccccaggtctgggacgcaggtgatgccagccaggcccaggagtgcccagcatcccccaactgatgacacagtagcactgattctgtcttttcctcagaatctggcctttttccatggcaatgaggtggggcccagcctcctctaaagtgactttgtttctgcacagttgtaactgctcttggggatgtcagtgaggctgggagcagggagccacgggatgctgagagaggaggcccgagaggacaccccaccctccagcgtggcctttgatccagacttagggacgaggctgtcactggtgggcaccctctgttcctgtttgtgtgtttgaatagtctgaaatgctgtgactttttttgtgtgaataaagatatgaaacttctgaatctc

SEQ ID NO: 3135 - protein, 265 aa, Homo sapiens
SKMAELQLDPAMAGLGGGGGSGVGDGGGPVRGPPSPRPAGPTPRGHGRPAAAVAQRLEPGPGPPERAGGGGAARWVRLNVGGTYFVTTRQTLGREPKSFLCRLCCQEDPELDSDKDETGAYLIDRDPTYFGPILNYLRHGKLIITKELAEEGVLEEAEFYNIASLVRLVKERIRDNENRTSQGPVKHVYRVLQCQEEELTQMVSTMSDGWKFEQLISIGSSYNYGNEDQAEFLCVVSRELNNSTNGIVIEPSEKAKILQERGSRM

SEQ ID NO: 3136 - DNA, 2181 bp, Homo sapiens
ggaaagcatccaacggagtggaagcagcatgaaggaagagccgctgggcagcggcatgaacgcggtgcggacgtggatgcagggcgccggggtgctggacgccaacacggcggcgcagagcggggtgggtctggcccgggctcactttgagaagcagccgccttccaatctgcggaaatccaacttcttccacttcgtcctggccctctacgacagacagggccagcccgtggagatcgagaggacagcgtttgtggggttcgtggagaaggaaaaagaagccaacagcgaaaagaccaataacggaattcactaccggattcagcttctctacagcaatgggataaggacggagcaggatttctacgtgcgcctcattgactccatgacaaaacaagccatagtgtatgaaggccaagacaagagcccagaaatgtgccgagtcttgctcacacatgagatcatgtgcagccgctgttgtgacaagaaaagctgtggcaaccgaaatgagactccctcagatccagtgataattgacagattcttcttgaaatttttcctcaaatgtaaccaaaattgcctaaagaatgcgggaaacccacgtgacatgcggagattccaggtcgtggtgtctacgacagtcaatgtggatggccatgtcctggcagctcctgataacatgtttgtccataataattccaagcatgggcggagggctcggaggcttgacccctcggaaggtacgccctcttatctggaacatgctactccctgtatcaaagccatcagcccgagtgaaggatggacgaccggaggtgcgactgtcatcatcataggggacaatttctttgatgggttacaggtcatattcggtaccatgctggtctggagtgagttgacaggtcctcattccatccgtgtgcagacccctcctcggcacatccctggtgttgtggaagtcacactgtcctacaaatctaagcagttctgcaaaggaacaccaggcagattcatttatacagcgcgcaacgaacccaccatcgattatggtttccagaggttacagaaggtcattcctcggcaccctggtgaccctgagcgtttgccaaaggaagtaatactgaaaagggctgcggatctggtagaagcactgtatgggatgccacacaacaaccaggaaatcattctgaagagagcggccgacattgccgaggccctgtacagtgtcccccgcaaccacaaccaactcccggcccttgctaacacctcggtccacgcagggatgatgggcgtgaattcgttcagtggacaactggccgtgaatgtctccgaggcatcacaagccaccaatcagggtttcacccgcaactcaagcagcgtatcaccacacgggtacgtgccgagcaccactccccagcagaccaactataactccgtcaccacgagcatgaacggatacggctctgccgcaatgtccaatttgggtggctcccccaccttcctcaacggctcagctgccaactccccctatgccatagtgccatccagccccaccatggcctcctccacaagcctcccctccaactgcagcagctcctcgggcatcttctccttctcaccagccaacatggtctcagccgtgaaacagaagagtgctttcgcaccagtcgtcagaccccagacctccccacctcccacctgcaccagcaccaacgggaacagcctgcaagcgatatctggcatgattgttcctcctatgtgaaagaattgccttgaagaattgtattaatgaagaggttggattctgctacagagagtaatctgatacaagtcccagagtggaacttttaactcaggcctttataagaggaatcacacaataactgcagatttttaaacaaaatcaccgaccttgcaaatactgaaattggaagaggaatctgaaagtgcagggtgttggttaaagttgtacctcccaagtattttggggatatatttattctgtattgacaaaagcaaatccactttttctttttcttttttttttttaagcttaattctgcaatcatttgacttttatataccgtaatgctctatacaagggacactataaataagactccatgttttaatttatgtttttaaagctgtgtaaaggaagaatgaagtggtgatatttac

SEQ ID NO: 3137 - protein, 586 aa, Homo sapiens
ESIQRSGSSMKEEPLGSGMNAVRTWMQGAGVLDANTAAQSGVGLARAHFEKQPPSNLRKSNFFHFVLALYDRQGQPVEIERTAFVGFVEKEKEANSEKTNNGIHYRIQLLYSNGIRTEQDFYVRLIDSMTKQAIVYEGQDKSPEMCRVLLTHEIMCSRCCDKKSCGNRNETPSDPVIIDRFFLKFFLKCNQNCLKNAGNPRDMRRFQVVVSTTVNVDGHVLAAPDNMFVHNNSKHGRRARRLDPSEGTPSYLEHATPCIKAISPSEGWTTGGATVIIIGDNFFDGLQVIFGTMLVWSELTGPHSIRVQTPPRHIPGVVEVTLSYKSKQFCKGTPGRFIYTARNEPTIDYGFQRLQKVIPRHPGDPERLPKEVILKRAADLVEALYGMPHNNQEIILKRAADIAEALYSVPRNHNQLPALANTSVHAGMMGVNSFSGQLAVNVSEASQATNQGFTRNSSSVSPHGYVPSTTPQQTNYNSVTTSMNGYGSAAMSNLGGSPTFLNGSAANSPYAIVPSSPTMASSTSLPSNCSSSSGIFSFSPANMVSAVKQKSAFAPVVRPQTSPPPTCTSTNGNSLQAISGMIVPPM

SEQ ID NO: 3138 - DNA, 408 bp, Homo sapiens
ttttttttttttttttttttttttttttaatttggaacacaaatgctttatttaagggtgcatcacaattcccgtgtggtgagcaaaaaataaaataaaggagcagatcgtagcacaccattcccactggccaagtggttgaaccctgcatccaagacccagtgagcagccaagtgaggtgcaacctctgggcctctcactcgtgactccaacagaattagcacattgcccttgtgcatggggccttttacattgcagattttggagcagcaagacaatgtatatctgttcgtaactcttgttcttccctcctgatttttaaaactgcgtaattataaaactatgttgatggacatataattattataaagatgtagtttgtgacaataacagcatgggcagaatgaa

SEQ ID NO: 3139 - DNA, 1041 bp, Homo sapiens
tgacatgcctgatcctctcttttctgcagttcaagggaaagacgagatcttgcacaaggcactctgcttctgcccttggctggggaagggtggcatggagcctctccggctgctcatcttactctttgtcacagagctgtccggagcccacaacaccacagtgttccagggcgtggcgggccagtccctgcaggtgtcttgcccctatgactccatgaagcactgggggaggcgcaaggcctggtgccgccagctgggagagaagggcccatgccagcgtgtggtcagcacgcacaacttgtggctgctgtccttcctgaggaggtggaatgggagcacagccatcacagacgataccctgggtggcactctcaccattacgctgcggaatctacaaccccatgatgcgggtctctaccagtgccagagcctccatggcagtgaggctgacaccctcaggaaggtcctggtggaggtgctggcagaccccctggatcaccgggatgctggagatctctggttccccggggagtctgagagcttcgaggatgcccatgtggagcacagcatctccaggagcctcttggaaggagaaatccccttcccacccacttccatccttctcctcctggcctgcatctttctcatcaagattctagcagccagcgccctctgggctgcagcctggcatggacagaagccagggacacatccacccagtgaactggactgtggccatgacccagggtatcagctccaaactctgccagggctgagagacacgtgaaggaagatgatgggaggaaaagcccaggagaagtcccaccagggaccagcccagcctgcatacttgccacttggccaccaggactccttgttctgctctggcaagagactactctgcctgaacactgcttctcctggaccctggaagcagggactggttgagggagtggggaggtggtaagaacacctgacaacttctgaatattggacattttaaacacttacaaataaatccaagactgtcatatttaaaaa

SEQ ID NO: 3140 - protein, 230 aa, Homo sapiens
MEPLRLLILLFVTELSGAHNTTVFQGVAGQSLQVSCPYDSMKHWGRRKAWCRQLGEKGPCQRVVSTHNLWLLSFLRRWNGSTAITDDTLGGTLTITLRNLQPHDAGLYQCQSLHGSEADTLRKVLVEVLADPLDHRDAGDLWFPGESESFEDAHVEHSISRSLLEGEIPFPPTSILLLLACIFLIKILAASALWAAAWHGQKPGTHPPSELDCGHDPGYQLQTLPGLRDT

SEQ ID NO: 3141 - DNA, 350 bp, Homo sapiens
  misc_feature (215)..(215): n is a, c, g, or t
  misc_feature (232)..(232): n is a, c, g, or t
  misc_feature (279)..(279): n is a, c, g, or t
  misc_feature (297)..(297): n is a, c, g, or t
  misc_feature (306)..(306): n is a, c, g, or t
  misc_feature (324)..(324): n is a, c, g, or t
  misc_feature (334)..(334): n is a, c, g, or t
  misc_feature (343)..(343): n is a, c, g, or t
attcggcacaggggatgtacagcgttgaccgtgtgtctgacgacatccctattcgtacctggttccccaaggaaaatcttttcagcttccagacagcaaccacaactatgcaagccatctcggtgttcaggggctacgcggagaggaagcgccggaaacgggagaatgattccgcgtctgtaatccagaggaacttccgcaaacacctgcgcatngtcggcagccggaggtnaaggcccagacgttcgctgagcggcgcaacggaagtttcagccggtnctggagcgaccccacccncatgaaagncgacaatttccacgactnccgagacagnagtgacctncagagtt

SEQ ID NO: 3142 - DNA, 350 bp, Homo sapiens
  misc_feature (15)..(15): n is a, c, g, or t
  misc_feature (161)..(161): n is a, c, g, or t
  misc_feature (231)..(231): n is a, c, g, or t
  misc_feature (239)..(239): n is a, c, g, or t
  misc_feature (246)..(246): n is a, c, g, or t
  misc_feature (254)..(254): n is a, c, g, or t
  misc_feature (261)..(261): n is a, c, g, or t
  misc_feature (268)..(268): n is a, c, g, or t
  misc_feature (276)..(276): n is a, c, g, or t
  misc_feature (294)..(294): n is a, c, g, or t
  misc_feature (338)..(338): n is a, c, g, or t
ccgggagctgcagantacgcagccttcggtgcagtcgtcactcgtgtctcgctaccagctccccgctgccctgcgctcgggggcttggcatccggcccgggggaaagcggaccagcccttctgcaggtctgcggggccaagtgtcccggcggcgcacctcncgtggcgagaatcgggagaaggaggagactacaaggataggcccaggagtaatggagtccaaagagaaangagcagtnaacagtntcagcatngaaaatnccaaccnagaaaatnaagaaaaggagcaagttnctaataaaggggagcccttggccctccctttggatgctggtggnatactgtgtgcc

SEQ ID NO: 3143 - DNA, 438 bp, Homo sapiens
tacatttaaatccttgctttatcgggattttgacagagtaattaaatccaatttggtttcccatatatttgtccagttgtccaacactatttatttgagtacatcatcatctctctactaatttcaactgctacctttatcatatttcaaactctcatttaatttgtgtccatttctagactctattctggactgctgatgggcctgttgataggccagagctcagttattttaattatgtaactttatgatgcacttatctgtgtagcaggactccccctcatctccattacttaagagccaataatgggaagctcattttcacaaatgcagtcaaccaggggaattcatggcatggcctaagatctaaacactcttaagatttaaacacaggattagctcttgagttagacaggaagctggggtgtttgggactga

SEQ ID NO: 3144 - DNA, 511 bp, Homo sapiens
  misc_feature (56)..(56): n is a, c, g, or t
  misc_feature (310)..(310): n is a, c, g, or t
tttttttttttttttttccatgttcatttttatttaaagactgcagaaacacaggncatcatggtttgtcatcactgacaagtcttccaaaatcacacgttgacatttgtgttctaacaaaaacacttgggatagggtgtgtgtgtttgtgtgtgtgaactgtgcaaagtacaaaggatctcccagtcggctgagcctgttttgaagtgcccggcctggcatcaccccatgaggatgccaggagagcacccgtggccgccatcctctctgcctccctctgggcagaggcccctggtggcctgcagtcctntcccctcggtgtccactgacttcagccatggctgtggactctaccatgctcctcaaaggaaatctctgtggccccccaaggccactacatggctaagatgtgtacatcatggggccaggatgaaacataagggttagtttatcttaaccgccaaacatgtgtaccctttgaggcaagatggcttaagaaagggtaatttgc

SEQ ID NO: 3145 - DNA, 437 bp, Homo sapiens
  misc_feature (213)..(213): n is a, c, g, or t
  misc_feature (372)..(372): n is a, c, g, or t
tggaagaaaatatttcagtgaacactgatttttacctataaggaattttctgtttggagaggaaaagttgagttttattctgctcctttcctcccactcgcctgacatagaggtccctaagccctttctccaaacctgcatggatgagtttcttttcttgttcaggtggttccttatgtcacgacgatttttggaggcctgcatgcagaaagnatggtcatgctgcaaggagtggtccctctagatgcacacaggtggacttccagtgtgggctgcagctgtgtccccggccagatatcgccttccacttcaacccttcgcttccataaccaccaagccccatgttcatcttgcaacaaccttgcatgggtnggacgctgggcaaagggaggcccggtggccccacctgggccctgcgaagagggttccagctttcc

SEQ ID NO: 3146 - DNA, 353 bp, Homo sapiens
ttttttttttttttttttttttttttttttttttttacagatataacttttcctttattgcccattaagctggacaagagtcacaaaagagagggacttcaatcatacttccagcattggctggggttctcccagttggatcagtacaaaaaaaggggacaacgtcaggaaagaaataggtccaaaacacctgaagggcaatcctatactgggacacaaatgtcccccaggccacagagttgtccctaagcatgctgcctgagggcacataacagtcaggttatgctatctgcttgcatttggcagggggagccctaaccaatttctcccccacctgaaagaccttgactgac

SEQ ID NO: 3147 - DNA, 3199 bp, Homo sapiens
tctcctgcgtagccatggcggtcccattccccaaccctctttccagtggtgacccaagcctccggggttcagggtgaccacaatgtctcccccactctgcatcccaggcccatatggcctggctctagagctccccactccatccagagtccctgtttccccaaagagaagggcccaccccggctcccgctcactcctcctcctgcctctgcatcttccccgggcgctgcctggacaggcctgcctgcgtgctgggacatgtctggcctccaaggaccgtcggtgggcgatggctgcaacggtggaggggccagagctggaggcagctgctgccgcaggagatgcttcagaggattcggacgcagggtccagggcgcttcctttcctgggcggcaaccggctgagcttggacctgtaccccgggggctgccagcagctgctgcacctgtgtgtccagcagcctcttcagctgctgcaggtggaattcttgcgtctgagcactcacgaggaccctcagctgctggaggccaccctggcccagctgcctcagagcctgtcctgcctccgctccgtggtcctcaaagggtcgatctgggacctcggaccctggctctgagggccacatccgcctccccccttcccaggagggcaacgccgggacacactgggtgcctgtctccggggtgccctgaccaacctgcccgctggtctgagtggcctggcccatctggcccacctggacctgagcttcaacagcctggagacactgccggcctgtgtcctgcagatgcgaggtctgggtgcgctcttgctgtctcacaactgcctctctgagctgcctgaggctctgggggccctccccgccctcaccttcctcacagtgacacacaaccgcctgcagacgctgcccccagcactgggggccctatccaccctgcagcgcctcgatctctctcagaatctgctggacacgctacctcctgagattggaggcctgggcagcctcctggagctcaacctggcctccaaccggctgcagagcctcccagcctctctggcgggacttcggtccttgcggctccttgtcctgcacagcaacctcctggcctctgtgccagctgacttggcccgccttccactcctcacccggctcgacctgagggacaaccagctccgggacctgccccctgagctgctagacgccccctttgtgcgcctgcaggggaaccccctgggtgaggcctcgccagacgccccgagttcaccagtggcagccctcattccagaaatgcccagactgttcctgacctcagatttggacagctttcctgtgacccctcgaggctgctcagtgaccctggcctgtggcgtccgcctgcagttcccagcgggagccaccgccacccccatcaccatccgctatcggctgctgctgccggagccaggcctcgtccccctgggtcctcatgacgccctgctcagccatgtgctggagctgcagccccatggggtggccttccagcaggatgtggggctgtggctgctcttcaccccaccgcaggcccggcgctgccgtgaagtggtggtcaggacccggaatgacaacagctggggtgacctggagacctacctggaggaagaggcaccccagcggctctgggctcactgccaggtgccccacttctcctggttccttgtggtttcccgccctgtgtccaatgcctgcctggtgccaccggaggggacactgctgtgctcctcgggtcatcctggggtcaaagtcatcttcccccctggggccactgaggagcctcgtcgagtctccatgcaggtggtgcgcatggctggccgagagctgcaggccctcctgggagaaccagaggctgcagtgagccccctgctgtgcctgtcacagagcggtccccccagcttcctccaaccggtcaccgtgcagctgcctctgccctctggcatcacaggcctcagtctggaccgctcccgcctgcacctgttgtactgggcccctcctgcagccacctgggatgacatcacagctcaggtggtcctggagctcacccacctgtactggctctggtacaccaccaagaactgtgtgggaggcctggctcggaaggcctgggagcggctgcggctgcaccgtgtgaacctcatcgctctgcagcggcgccgggaccctgagcaggtcctgctgcagtgcctgccccgaaacaaggtggacgccacccttcggcggctgctggagcggtaccggggccccgagccctctgacacggtggagatgttcgagggcgaagagttctttgcggccttcgagcgcggcatcgacgtggatgctgaccgccctgactgtgtggagggcagaatctgctttgtcttctactcgcacctgaagaatgtgaaggaggtatacgtgaccaccactctggaccgggaggctcaggctgtgcggggccaggtgtccttctaccgtggcgcggtgcctgtgcgggtgcccgaggaggctgaggctgcccggcagaggaagggcgcagacgccctgtggatggccactctgcccatcaagctgccgagacttcgagggtccgaggggccacggcggggggctggcctctccttggcacccttgaatctgggagatgccgagaccggctttctgacgcagagcaacctgctgagtgtggctgggcgtctgggtctggactggccagccgtggccctgcacctgggggtgtcctaccgggaggtgcagcgcatccggcacgagttccgggatgatctggatgagcagatccgtcacatgctcttctcctgggctgagcgccaggctgggcagccaggggctgtggggctcctggtgcaggccctggagcagagtgaccggcaggacgtggctgaagaggtgcgcgcagtcttggagctcggccgccgcaagtaccaggacagcatccgacgcatgggcttggcccccaaggaccccgttctgcctggctcctcggctccacagcccccagagcctgcccaggcataggccccacagaattttaggctggcccagatattccccagtggatgggcagagcccccaccttcaagtctctccagtgtgtggggacgggtccctgtgagcaacaaaactgcactgtttctttcacctcgaaaaaaaaaaaaaaaaaaaaaa

SEQ ID NO: 3148 - protein, 753 aa, Homo sapiens [sequence omitted]

SEQ ID NO: 3149 - DNA, 4563 bp, Homo sapiens
ggtatcgataagcttgatcgcctcacagcgatggcggccgagcagggccggtggcggcggcggctgcggctacggccggagacggcagtgttggcggtagtggtgggtggcaggggcctgtgaccgggagctgcccccggacccgggcaccatgagccaaggcccccccacaggggagagcagcgagcccgaagcaaaagtcctccacactaagcggctttaccgggctgtggtggaggctgtgcatcgacttgacctcatcctttgcaacaaaactgcttatcaagaagtattcaaaccagaaaacattagcctgaggaacaagctgcgtgagctctgcgtcaagcttatgttcctgcacccagtggactatgggagaaaggctgaggagctgctgtggagaaaggtatactatgaagttatccagcttatcaagactaacaaaaagcacatccacagccggagcactttggaatgtgcctacaggacgcacctggttgctggtattggcttctaccagcatctccttctctatatccagtcccactaccagctggaactgcagtgctgcatcgactggacccatgtcactgaccccctcataggatgcaagaagccagtgtctgcctcagggaaggagatggattgggcacagatggcatgtcaccgatgtctggtgtatctgggggatttgtcccgatatcagaatgaattagctggcgtagataccgagctgctagccgagagattttactaccaagccctgtcagtagctcctcagattggaatgcccttcaatcagctgggcaccctggcaggcagcaagtactataatgtggaagccatgtattgctacctgcgctgcatccagtcagaagtgtcctttgagggagcctatgggaacctcaagcggctgtatgacaaggcagccaaaatgtaccaccaactgaagaagtgtgagactcggaaactgtctcctggcaaaaagcgatgtaaagacattaaaaggttgctagtgaactttatgtatctgcaaagcctcctacagcccaaaagcagctccgtggactcagagctgacctcactttgccagtcagtcctggaggacttcaacctctgcctcttctacctgccctcctcacccaacctcagcctggccagtgaggatgaggaggagtatgagagtggatatgctttcctcccggaccttctcatctttcaaatggtcatcatctgccttatgtgtgtgcacagcttggagagagcaggatccaagcagtacagtgcagccattgccttcaccctggccctcttttcccacctcgtcaatcatgtcaacatacggctgcaggctgagctggaagagggcgagaatcccgtcccggcattccagagtgatggcacagatgaaccagagtccaaggaacctgtggagaaagaggaggagccagatcctgagcctcctcctgtaacaccccaagtgggtgagggcagaaagagccgtaagttctctcgcctctcctgtctccgccgtcgccgccacccacccaaagttggtgatgacagtgacctgagtgaaggctttgaatcggactcaagccatgactcagcccgggccagtgagggctcagacagtggctctgacaagagtcttgaaggtgggggaacggcctttgatgctgaaacagactcggaaatgaatagccaggagtcccgatcagacttggaagatatggaggaagaggaggggacacggtcaccaaccctggagccccctcggggcagatcagaggctcccgattccctcaatggcccactgggccccagtgaggctagcattgccagcaatctacaagccatgtccacccagatgttccagactaagcgctgcttccgactggcccccacctttagcaacctgctcctccagcccaccaccaaccctcatacctcggccagccacaggccttgcgtcaatggggatgtagacaagccttcagagccagcctctgaggagggctctgagtcggaggggagtgagtccagtggacgctcctgtcggaatgagcgcagcatccaggagaagcttcaggtcctgatggccgaaggtctgcttcctgctgtgaaagtcttcctggactggcttcggaccaaccccgacctcatcatcgtgtgtgcgcagagctctcaaagtctgtggaaccgcctgtctgtgttgctgaatctgttgcctgctgctggtgaactccaggagtctggcctggccttgtgtcctgaggtccaagatcttcttgaaggttgtgaactgcctgacctcccctctagccttctgctcccagaggacatggctcttcgtaacctgcccccgctccgagctgcccacagacgctttaactttgacacggatcggcccctgctcagcaccttagaggagtcagtggtgcgcatctgctgcatccgcagctttggtcatttcatcgcccgcctgcaaggcagcatcctgcagttcaacccagaggttggcatcttcgtcagcattgcccagtctgagcaggagagcctgctgcagcaggcccaggcacagttccgaatggcacaggaggaagctcgtcggaacaggctcatgagagacatggctcagctacgacttcagctcgaagtgtctcagctggagggcagcctgcagcagcccaaggcccagtcagccatgtctccctacctcgtccctgacacccaggccctctgccaccatctccctgtcatccgccaactggccaccagtggccgcttcattgtcatcatcccaaggacagtgatcgatggcctggatttgctgaagaaggaacacccaggggcccgggatgggattcggtacctggaggcagagtttaaaaaaggaaacaggtacattcgctgccagaaagaggtgggaaagagctttgagcggcataagctgaagaggcaggatgcagatgcctggactctctataagatcctagacagctgcaaacagctgactctggcccagggggcaggtgaggaggatccgagtggcatggtgaccatcatcacaggccttccactggacaaccccagcgtgctttcaggccccatgcaggcagccctgcaggccgctgcccacgccagtgtggacatcaagaatgttctggacttctacaagcagtggaaggaaattggttgatactgacccccaggccctgcagtggggctgactccagatctctcctgccctccctggcagccaggaccagcacctgtagtcaccccaccacacgcagactcatgcacgcacacaggagggaggcctagctgctcagaggctgcagggagggcccaggagccggctgggagggtggggtccctttgttgccaagacgttaggaaagcgaggaaagtgcttggattaggagagtcttgtgggcccctggccagccttcctgcctcagctcccctgctgtctccaggggcaggtggtaggcatgggtacctgcatttcactggaatgggttcttggatctctgaggggaaggaacagcaaaagaggcccttcttcctcacccaagatgcagggtggttggggccaggagtttggaccctctaggtcttgggggaagagctgggtaatacctggtgtctgagtgattctctgcagacccttcccctcctcaaggatcacccatcctcctttcagccccctttatggggaccaggcagctctggagccagccacaggggctgttagagaagcaaggcctggagtggcctgcaccgagtagcagggtcagggttcgtgtgctcctcctcctgctgcaggggctgcacatcccattgccccacttctgctttgtgtctccctctgtctagcttccagggcagggagcaggccccacctagggctgcaggcagtctggcctgtgccagcacggtctcctgtgcccaccagccccacaggtgctgtgctttgtgctcttggctgctgtgctgggacagaatgggatgccaggaagagaagaaagggggtgcagtctgaggccaccaccccccttcctatctaagggagggctgaagacaaggggccggcattcagtgggcagcagaaaggagaggccccttgaagctgctcagtcagaggcccccgtccctccttttgccttccgcaggactgaagacctgaaggggctggcttttggagtgttgaggtgaatatctgggagcagagatcatgaatagctcagggcagtgaatggcgcaccaagagcagggctgtgtgtgggaggctgcagccaggattgcctcagctcctccccctcaggctgggaggatagcacaggctaggggctcggggtggagggtctcagctctgctgcccccaccccagtactagcctagcttcccaagctgtggcttagaggatagttggcttcctgcctctctcctctaaaatagcaagtctgggaaatcctggggtgagtggagtcaccccactcccagttgctggcagagactgagactaaagcatcacttaataaaccccccaagccc

SEQ ID NO: 3150 - protein, 1033 aa, Homo sapiens
WWVAGACDRELPPDPGTMSQGPPTGESSEPEAKVLHTKRLYRAVVEAVHRLDLILCNKTAYQEVFKPENISLRNKLRELCVKLMFLHPVDYGRKAEELLWRKVYYEVIQLIKTNKKHIHSRSTLECAYRTHLVAGIGFYQHLLLYIQSHYQLELQCCIDWTHVTDPLIGCKKPVSASGKEMDWAQMACHRCLVYLGDLSRYQNELAGVDTELLAERFYYQALSVAPQIGMPFNQLGTLAGSKYYNVEAMYCYLRCIQSEVSFEGAYGNLKRLYDKAAKMYHQLKKCETRKLSPGKKRCKDIKRLLVNFMYLQSLLQPKSSSVDSELTSLCQSVLEDFNLCLFYLPSSPNLSLASEDEEEYESGYAFLPDLLIFQMVIICLMCVHSLERAGSKQYSAAIAFTLALFSHLVNHVNIRLQAELEEGENPVPAFQSDGTDEPESKEPVEKEEEPDPEPPPVTPQVGEGRKSRKFSRLSCLRRRRHPPKVGDDSDLSEGFESDSSHDSARASEGSDSGSDKSLEGGGTAFDAETDSEMNSQESRSDLEDMEEEEGTRSPTLEPPRGRSEAPDSLNGPLGPSEASIASNLQAMSTQMFQTKRCFRLAPTFSNLLLQPTTNPHTSASHRPCVNGDVDKPSEPASEEGSESEGSESSGRSCRNERSIQEKLQVLMAEGLLPAVKVFLDWLRTNPDLIIVCAQSSQSLWNRLSVLLNLLPAAGELQESGLALCPEVQDLLEGCELPDLPSSLLLPEDMALRNLPPLRAAHRRFNFDTDRPLLSTLEESVVRICCIRSFGHFIARLQGSILQFNPEVGIFVSIAQSEQESLLQQAQAQFRMAQEEARRNRLMRDMAQLRLQLEVSQLEGSLQQPKAQSAMSPYLVPDTQALCHHLPVIRQLATSGRFIVIIPRTVIDGLDLLKKEHPGARDGIRYLEAEFKKGNRYIRCQKEVGKSFERHKLKRQDADAWTLYKILDSCKQLTLAQGAGEEDPSGMVTIITGLPLDNPSVLSGPMQAALQAAAHASVDIKNVLDFYKQWKEIG

SEQ ID NO: 3151 - DNA, 415 bp, Homo sapiens
  misc_feature (197)..(197): n is a, c, g, or t
  misc_feature (298)..(298): n is a, c, g, or t
  misc_feature (365)..(365): n is a, c, g, or t
tttttttttaagtaggaaagtatgtagggaaggaaaaagcacaaattctacctgagtactaaaacagttaccttttaaaagacaaatcatgcttatgttcacttaagtaagcggaacagacagaaaccactgctcgacttaaagtgtccagaaaaagtgcttctgtagcaacagaatgcctagaagaactcctgggntttctagaatgtctcagtataaaaccaagtctttctcttactctgttgtacacgctggaactggatgggttcattcgattccaagacatgtgaccacagantttcagagttaaaacaagacatcatgaggaagggaacctcgttcttaaataatatttttaggatctnctaaaggccagagggggggtttaactgctatttccgtggcaaaggttagg

SEQ ID NO: 3152 - DNA, 5818 bp, Homo sapiens
aagcgagacaacaaagagatccggacctacaactgcagaattgctgagtactcctatgggcatcaaaagaaatcaagcaagaagaaaaaaatcagtaagaatgacatccgcctggtaccccgggatgtggaggagacagacaagatgaacgttgtcagttgctcttccctgacctcctccctcaactattttgactaccaccagcagacgctgcccctgggctgccgccgctctgagagcactttcctgaatgtggagaaccagaatacccgcaacaccagtgctaaccacatctaccatcactctttcaacagccaggggccccagcagcctgacctgattatcaacggtgtgcctctgcctgagactgaaaactattcttttgactccaactacgtgaatagccgagcccatttaatcaagagcagctccaccttcaaggacttagagggcaacagcctgaaggatagtggacatgaggagagtgaccaaactgacagtgagcatgatgtccagcggagcctgtattgtgatactgctgtcaacgatgtgctgaacaccagtgtgacctccatgggatctcagatgcctgatcatgatcagaatgaaggatttcattgccgggaagaatgccggattcttggccactctgacaggtgctggatgccccggaaccccatgcccatccgttccaagtcccctgagcatgtgaggaacatcatcgcgctgtctattgaagctactgctgctgatgtcgaggcttatgacgactgcggccccaccaaacggactttcgcaacctttgggaaagatgtcagcgaccacccggctgaggagaggcctaccctgaaaggcaagaggactgtcgatgtgaccatctgcagccccaaggtcaacagcgttatccgggaggcaggcaatggctgtgaggcgattagccctgtcacctcccccctccacctcaagagctctctgcccaccaagccttccgtgtcttacaccattgccctggctcccccagcccgtgatctggagcagtatgtcaacaatgtcaacaatggccctactcgtccctctgaagctgagccccgtggagctgatagcgagaaagtcatgcatgaggtcagccccattctgaaggaaggtcgcaacaaagagtcccctggtgtgaagcgtctgaaggatatcgttctctaaaccagtctccaggaagaagagaaagaaaccacactggctagtgaagaagcaggagcttcttgttttaattgctcaccaatggttggttcttgagtggctatatttcagagcttttcctaaatgtattgtttataggtgattatcattctgtgacagtcccttgtttcaacttgttcagttggagcaaattagctttggcttgagttgttcatggggccttgatgttggggaaacagagacaaattcagttgtgaaaagtattatgtattaagtgtttgaatttatatatttttctatgtcaaaattataatataaattaccattgtttgtggaggattacatttaaaaaagcaaaaagtgaaaaaaaaaaagctctggacacctttaataagctcgccactgttttttgtagtgtagacaagttaatggtcatttattgtgtactattcattgattcagtgatgtgaaattgagcccccaaaaggttgtttctgaagctcgagtacttcccaatgccgctactttgctgtggacacccctgctttaaaaacccttttgctagctgtgctattgttgtatttgatattgcaaattgctatgtgtgtggtgatggcaaaaggcttttaaaagttggtgttttctttttcttaaaaaaataataaaactacagacaaaaacaaagtgcaaacaactgagacagcaaatgaatgagcaacaccatgcatatagattgagtacttggagaatactcacgttttttaactcatgtagtgattgctcaccactttgcaaagtatttttcctgcctttcagtggtctgcccaggtccatgatagatcattgcagaaagtcatttttggataggctgctatctaatttgcagttgtcagaaatactgtgctgaaagttttatgacatccatcttttaaattttcaggccctgaacaggaaagttgctcctgaagttatgtttccaggcttagaaattccctctctccaatcatctaaaattgaagatgactgaatctattttaagatctaaattagcatctcttcagacacacacttcctgattcagtgtttcccaatcatgattagaattagactgcaaagcacgtcatgggctgggattgagaactccatgttgctctgtatcttaggcttatatacgtagggatagagtaagcagtacaaagtgtatattttggaaaagacaggtaacaggtaacagcatcgctaatccaattactgtgccttctaaacggagacactcagacacttgaactcatctttttatgactaatagttttttgattaaaaatgtgaacaagaaaatactaaaataaaaatcctttcgatttagccaactctttttgctgtaggctaggaatacaccctttttaaattaacacactgtagatcctttttttctgttttaacattcctctaactcccccatttatcttttgtctattaatattcactagccaacatagtatttttgcagcctaagagttcattatttaaaaataaactaaagaaatatgtcacctttgttctgccttggtcttaagagagttgtttctagagaaacaagttttatggttctgttttcatttgtttcattttttgaaattcaggaatacacagagagaaggcctagaggttagagcactagaatgcaaaagaggatttattttcttaagtttaggtagataagtcagctcttttgaatgttttacttatttttgcctgagttcctagctttacgcattactaggaatattttcttttacaggagggagaagggttttgagggagggggtgggtaaggcagtagggatggggttaggtaggggagaacatttctgaaaaagaacttataatgaagctacaaatccatccttatttcttattcagtgctgaatactacctcatgcaaaatattggtgtggctgcaaatttccctctgaagctgacacaattaaggatgaattaccataacatcttcatttttcctcatttcattgcctctcatacagttttctccctctgatttatttcattttggtagtggattttgaattaagtatttatttctctttgcaagtgactatttgattaacacattaaaaattttttaaaaatttcccctttaagttatgatggctgcctatagaatttagactgtttctcaccctgatccatcctgatattatgttattagctacgatttcaaggtcactttgaagtcagacttcacagttttctacaggtgtatttcttgctatgctcagtgggaaccagggagcagaaaagattgtggaaagtgggaacattaattgtcacgtggctgttgagccagagaggccactggctgccatgcctcttaccagccaagttttaaatggttagagtggcattggcattgattttgcttttctcttgggttttcttcatttcttttcataattcatcttcaagctatagatccatccttcttccctatccaaatactttgttctcagtgggcagtcagatttttttggcttccaaacctcactgagcatgttcagagaattcctctcattaaggaaatatttttccccacaattgtctgatgtatgagtcctctcagaagcacaagtgcatactaggaaggctttgtaaactggttttgtaggcaggctgtacctgcaaataggcattctgagcaaggatcctaaatttccctttggctcatgtcccccccgccccaccccaccttctcctttttggcatgtctggtgaaaagctacaaggttcacagggccaaatattctcccttttgttctctaaacatgttgcacacataaactcaagggagtgatttcggttcctaagtcctagggagttctattccatttattctgatgtcccttttaaggaggagttggtgttgaagtgtgacatgctttaatgataactgctttggcaattccccagacaggtatacttcttcatccaaaattgcacctaaggtgttcatttagacaaaattgttcgcttagtgatccactgatctctaatcagaaatatttttaaaaaatacaatttagatctctgaaaattggaaccactcaagagtatcatcttgatagtgttacttcagcatatgactgactgattttatgaagggagtttagctgacttttccctgtagccctatcatattaaaaacaaaaagtggtccacttgaagcagcaaggacaaagggcagtttagggagaggcagggtgaaggggatagctcgattgggcatccagagtggaaaaggattattattgtacataatagcagttctggctggaattccaatccactttctggggatcattttgatgttgaatgttcccccaaagcattctgacaagtttggtccacttggctctttaccccgggtaataagacccttattgactttgaaaaactggcataaatgagcttaagaaatccattgtatacagtcctagtgtttgccttcttggtaaaattacatttaaggatgtcatttcatgagtcaaattgtatctgctgacactgaagtgtattgagatgttgttctttagtttaagtatgtaacaaagtaatattcaaaggggatgtttgggggtggggctgggaccgggtggctttatattgataatgaaatattccagagcaaaacacattgtcctaatgaagttgttgcagctctcttcgttttcttgtgccgctggaattggcttgtgggtcacttgttgtgcaaaagtgaattaatttcaaataggaatcatattgcttttgtgaaacaaagaaaatttaccaccttgtctgatacatagattggaaggcgctcttggtaaagaataacccacaaacacctgatcttgattggaaagcattgtaggtcattagggaaaactgatgatgctgactgttgctccagctgtgttggcaattcaagatgaccttgttactaactgaaagttgctgtcaaccttagcaaacaaaccagctaacaccattacagcactggttaagtagatttttactggcactggctggcgttcagctgaggaaggctaggatacagactttaatgaccaagagccagactagctcgagctagaaatcagcaacaaatacctccttgtgctatttgaatgctaaggtattagttgcaataggcttacgccttcgctcctctagtgaggggaatgagcctgatgacactattactgtttacctgtcaaaccagggtggaaatttagagggatgcaagtacagtatgtctcattaagcagtctctgttgctgattatatgaagataaaattgttgtatatgctgatctgtatgttatgtacattttcacagtgattgaatcattgtaaaaagaaaaaagacaaaaaagaatcaccactgtctattttatgaagatgataaagcagctttattaaattattacagttatgtttcaaatggtgttatctgccacattgtttccttttatctggtggttctctgtttccccctttaaatgtgttttctctgcttcaaaaatttaatgcattttagtattaaaggctattatggaaaaag

SEQ ID NO: 3153 - protein, 398 aa, Homo sapiens
KRDNKEIRTYNCRIAEYSYGHQKKSSKKKKISKNDIRLVPRDVEETDKMNVVSCSSLTSSLNYFDYHQQTLPLGCRRSESTFLNVENQNTRNTSANHIYHHSFNSQGPQQPDLIINGVPLPETENYSFDSNYVNSRAHLIKSSSTFKDLEGNSLKDSGHEESDQTDSEHDVQRSLYCDTAVNDVLNTSVTSMGSQMPDHDQNEGFHCREECRILGHSDRCWMPRNPMPIRSKSPEHVRNIIALSIEATAADVEAYDDCGPTKRTFATFGKDVSDHPAEERPTLKGKRTVDVTICSPKVNSVIREAGNGCEAISPVTSPLHLKSSLPTKPSVSYTIALAPPARDLEQYVNNVNNGPTRPSEAEPRGADSEKVMHEVSPILKEGRNKESPGVKRLKDIVL

SEQ ID NO: 3154 - DNA, 464 bp, Homo sapiens
tttttttttttattatactttaagttttagggtacatgtgcacattgtgcaggttagttacatatgtatacatgtgccatgctggaagaactttcctgaccctaagattcagttttgctatatgttcatgtgctttctcatgttctaaggtcaaaacatcaatgaaaatataatgtcttacaagcaaggcaggtcttattaagccgacaatgcataggcaagccttggtgcagagggtacattttcttaccaagtatagggcatgtataaaaattactgagggttaatctgacttggccttcccaattaagcctgcctggaggcctgagcaaaccagaatgtcccagacactagacttggcctgggttgaatgtgactatctgctgggttgccctgagaggagtccaggctctagactggccctcccactttgttctgtagtgaatttaaaggggatttaggtt

SEQ ID NO: 3155 - DNA, 423 bp, Homo sapiens
  misc_feature (147)..(147): n is a, c, g, or t
gcggccgcacctatgaccccaacctcaggtggcagcacccctccgggcatcactgcaccagccgtgcctagcatcccatcccccattggggtgaatggcttcaccggcctccccccacaggccaatgggcaacctgctgcggaactngtgttcgccaatggcatccacccctacccagcacagagccccaccgccgcggaccccctgcagcaggcctacgccggagtgcagcagtatgcaggtccagctgcctaccctgctgcctatggtcagataagccaggcctttcctcagccgcctccaatgatcccccagcagcagagagaagggcccgagggctgtaacctgttcatctaccatctgccccaggagtttggggacgctgagctgatgcagatgttcctccctttcggcttcgtgagc

SEQ ID NO: 3156 - DNA, 396 bp, Homo sapiens
  misc_feature (348)..(348): n is a, c, g, or t
ttttttttttttttttttttttttaaaaaaaagatatatggcattactttggtctccaaaacagttgccagtttgaactttattctgccagcaagtatttggtttggctcaccagggctcaagttgaaaaaatatttgcccattccaaaaagatttaacgagctttgctgcaaatgctggtgccatttggcacatcacagggactgtggcacagcaaaagagaactctctcaaccacagattttatttgcccaaggtagccagcactgggagctcagttgattcctcgggtcaagaagctgcaagtcaaatgcgtgaagtttccaagagaaagtgaccaaagcaggcntgagaaaactcttgctgacattgaaaaggaagtcactgggtctgactc

SEQ ID NO: 3157 - DNA, 3811 bp, Homo sapiens
  misc_feature (1088)..(1088): n is a, c, g, or t
  misc_feature (1099)..(1099): n is a, c, g, or t
  misc_feature (1129)..(1129): n is a, c, g, or t
gctgattttgggaggtgccaatattaattaccggacagaggttttaaataatgctccaattctatgtgttcagtcccatcttggttacacagaaatggtagccctgctgctggagttcggggccaacgtggatgcctcttctgaaagtggcctgactcccctgggatatgctgcagcagcagggtacctgagcattgtggtgctgctgtgcaagaaacgggccaaggtggatcatttggataagaacgggcagtgtgctttggttcatgctgcactccgaggtcatctggaggttgtcaagtttttgattcagtgtgactggacgatggccggccagcagcaaggagtatttaagaagagccatgccatccaacaggccctcattgctgcagccagcatgggttatactgagattgtctcctacctacttgatcttccagaaaaagatgaagaggaagtagagcgagcacagatcaacagctttgacagtctctggggagagacagccctaacagctgcagccggaaggggcaaactggaggtgtgccgtttgctcttggaacaaggggcggcagtggcccagccaaaccgccgaggagcagtgccactattcagcacagtgcgccagggccactggcagattgttgatcttttactcacccatggagctgatgtcaacatggcagacaagcagggccgcactcccctgatgatggctgcttccgaaggccatctaggaaccgtggactttctgcttgcacaaggtgcctccattgctcttatggacaaagaaggattgacagccctcagctgggcttgtttgaagggccatctctcagtagtacgttctctggtggataacggagctgccacagaccatgctgacaagaatggccgtaccccactggatctggcagctttctatggcgatgctgaggtggtccagttcctggtagatcatggggccatgatcgagcacgttgactacagtggaatgcgccctttggatagggcagtggggtgcccgaacacttctgttgttgtcactcttctgaagaaaaggagccaagataggttgtcagacgttncgagtcgcccncgaggtccagccacatgggcgatggccccntccaagccagacatcatgatcatcctgttgagcaagttgatgaaagagggggacatgttttataagaaaggtaaagtaaaggaagctgcccagcgctaccagtacgccctgaagaagttccctagagaagggtttggtgaggacttgaaacctttccgggaactaaaggtgtctctcctcctcaacctctctcggtgtcgcaggaaaatgaacgattttggaatggcggaggaatttgctactaaggccctggagctgaaaccgaaatcttatgaagcttactatgcgagagcaagggcaaaacgcagcagcagacagttcgcagcagccttagaggacctgaacgaggccatcaagctgtgtcccaacaaccgtgagatccagagacttctgctgagagtggaagaagagtgtagacagatgcagcagccacagcagccaccgccgccaccgcagcctcagcagcagttgccggaagaagcagaacctgagccacagcatgaagacatatactctgtacaggatatattcgaggaggagtacctggaacaggatgttgaaaatgtttccattggcctccagacagaggcccggcccagccaggggctcccggtcatccagagcccaccctcctctcccccgcatcgggactcagcctacatctccagctcacctcttggctctcatcaggtttttgacttccggtccagtagttctgtaggctctcccactagacagacctatcagtccacctcacctgccctttctccaactcatcagaactcacattacaggcctagcccaccacacacttccccggctcatcagggaggatcttaccgtttcagcccccctcctgtgggaggacagggcaaagaatacccaagccctcccccttcccctctccggagaggccctcagtatcgggccagccctccagctgaaagtatgagtgtctatagatcccagtctggttcacccgtgcgctatcagcaggaaacaagcgtcagtcagcttcctggcagacccaaatctccattatccaaaatggcccagcggccctaccagatgcctcagctccctgtggcagttccccagcaagggctcaggctacagcctgccaaggcccagattgtgagaagtaaccagcccagcccagccgtccattcaagcaccgtcatccccacaggagcctatggccaagtagcccattcaatggccagtaaataccagtcttcacaaggagacataggagtcagccagagccggttggtttatcaagggtcaattgggggaatcgtaggggatggaaggccggtgcagcatgtccaagccagcctgagtgcaggcgccatctgtcagcatggaggattgaccaaagaggatcttccacagcgaccttcctcagcataccgaggtggcgtgagatacagccagacaccacagatcggacgcagccagtcagcatcctattacccagtctgtcactcaaaactagatctggagcgctcctccagccaactaggttcccctgatgtgtcgcatttaatcagaagacctatcagtgtcaaccctaacgaaatcaaaccgcacccgccaactcccaggccgttgctgcattcccaaagtgtaggccttcgcttctctccatctagcaatagtatctcctccacctccaacctaactccgaccttccggccatcttcttccatccagcaaatggagatcccactgaaacctgcatatgagaggtcatgtgacgagctgtcgccagtgtctccaactcaaggaggttaccccagtgagcccacccgatccaggaccacaccattcatggggatcatagataaaacagcacggactcagcagtacccccacctccaccagcagaatcggacctgggcagtgtcatctgtggacaccgtcctcagtcccacgtctccaggcaacctgcctcagcctgagtccttcagtccaccatcatccatcagcaacattgccttttataacaaaaccaacaatgcacagaatggccatttgctggaggacgattattacagcccccatgggatgctggctaacgggtctcgtggagacctcttggagcgagtcagccaggcctcctcctatcccgacgtgaaggtagctcggactctacctgtggctcaggcataccaggacaacctgtacaggcagctgtcccgagactctcggcaagggcagacatcccctatcaaaccaaagagaccgttcgtggagtctaatgtttaaaagacgttttgttggagtgagacccatatgttttcactgcacattttcaggcttggtttccacattcgaggtagttctctggcttaatttctcatgtagtttctgtgtggtgttcagaggtggcagcccacatgctgaaatcctttgcatgcagccgactgggaagcggcctcccgggagccaggacttcagtttctcttgtctgtgcccagccacatgctctctccctctcttcagatgccaacgaggagattttcgtgctgtgtgctttaacccagggagatcagacacactggtcagctttttccaggagacaatcgctttcactgatgttcttgttgtgtaattgtctttttccttttttaaaaaataaggtgttcttgttcgttttcttccaaaaaaaaaaaaaaa

SEQ ID NO: 3158 - protein, 1101 aa, Homo sapiens
  misc_feature (332)..(332): Xaa can be any naturally occurring amino acid
MVALLLEFGANVDASSESGLTPLGYAAAAGYLSIVVLLCKKRAKVDHLDKNGQCALVHAALRGHLEVVKFLIQCDWTMAGQQQGVFKKSHAIQQALIAAASMGYTEIVSYLLDLPEKDEEEVERAQINSFDSLWGETALTAAAGRGKLEVCRLLLEQGAAVAQPNRRGAVPLFSTVRQGHWQIVDLLLTHGADVNMADKQGRTPLMMAASEGHLGTVDFLLAQGASIALMDKEGLTALSWACLKGHLSVVRSLVDNGAATDHADKNGRTPLDLAAFYGDAEVVQFLVDHGAMIEHVDYSGMRPLDRAVGCPNTSVVVTLLKKRSQDRLSDVXSRPRGPATWAMAPSKPDIMIILLSKLMKEGDMFYKKGKVKEAAQRYQYALKKFPREGFGEDLKPFRELKVSLLLNLSRCRRKMNDFGMAEEFATKALELKPKSYEAYYARARAKRSSRQFAAALEDLNEAIKLCPNNREIQRLLLRVEEECRQMQQPQQPPPPPQPQQQLPEEAEPEPQHEDIYSVQDIFEEEYLEQDVENVSIGLQTEARPSQGLPVIQSPPSSPPHRDSAYISSSPLGSHQVFDFRSSSSVGSPTRQTYQSTSPALSPTHQNSHYRPSPPHTSPAHQGGSYRFSPPPVGGQGKEYPSPPPSPLRRGPQYRASPPAESMSVYRSQSGSPVRYQQETSVSQLPGRPKSPLSKMAQRPYQMPQLPVAVPQQGLRLQPAKAQIVRSNQPSPAVHSSTVIPTGAYGQVAHSMASKYQSSQGDIGVSQSRLVYQGSIGGIVGDGRPVQHVQASLSAGAICQHGGLTKEDLPQRPSSAYRGGVRYSQTPQIGRSQSASYYPVCHSKLDLERSSSQLGSPDVSHLIRRPISVNPNEIKPHPPTPRPLLHSQSVGLRFSPSSNSISSTSNLTPTFRPSSSIQQMEIPLKPAYERSCDELSPVSPTQGGYPSEPTRSRTTPFMGIIDKTARTQQYPHLHQQNRTWAVSSVDTVLSPTSPGNLPQPESFSPPSSISNIAFYNKTNNAQNGHLLEDDYYSPHGMLANGSRGDLLERVSQASSYPDVKVARTLPVAQAYQDNLYRQLSRDSRQGQTSPIKPKRPFVESNV

SEQ ID NO: 3159 - DNA, 622 bp, Homo sapiens
ccacttctccagccagcgccccagccctcccgccgcccgctcgcaggtcccgaggagcgcagactgtgtccctgacaatgggaacagccgacagtgatgagatggccccggaggccccacagcacacccacatcgatgtgcacatccaccaggagtctgccctggccaagctcctgctcacctgctgctctgcgctgcggccccgggccacccaggccaggggcagcagccggctgctggtggcctcgtgggtgatgcagatcgtgctggggatcttgagtgcagtcctaggaggatttttctacatccgcgactacaccctcctcgtcacctcgggagctgccatctggacaggggctgtggctgtgctggctggagctgctgccttcatttacgagaaacggggtggtacatactgggccctgctgaggactctgctaacgctggcagctttctccacagccatcgctgccctcaaactttggaatgaagatttccgatatgggctactcttattacaacagtgcctggccgatctccagctcgagtgactggaacactccagccccactcagagtccagaagaagtcagaaggctacacctatgtacctccttcatgga

SEQ ID NO: 3160 - DNA, 609 bp, Homo sapiens
acatgagaggtatgattggtggtggatttttccgtggatctatcaattcacaattcgaatttggaagaaagaaggaaaacatgacgtctccagccaaattcaaaaaggataaggagatcatagcagagtacgatactcaggtcaaagagatccgtgctcagctcacagagcagatgaaatgcctggaccagcagtgtgagcttcgggtgcaactgttgcaggacctccaggacttcttccgaaagaaggcagagattgagatggactactcccgcaacctggagaagctggcagaacacttcctggccaagacacgcagcaccaaggaccagcaattcaagaaggatcagaatgttctctctccagtcaactgctggaatctcctcttaaaccaggtgaagtgggaaagcagggaccataccaccctgagtgacatctacctgaataatatcattcctcgatttgtacaagtcagcgaggactcaggaagactctttaaaaagagtaaagaagtcggccagcagctccaagatgatttgatgaaggtcctgaacgagctctattcggtcatgaagacctatcacatgtacaatgccgacagcatcagtg

SEQ ID NO: 3161 - DNA, 320 bp, Homo sapiens
ttttccagagaagtaaaactcttttattttcaccgtccaaacatcagtcaatatactgggagagccagcggaaaccctcgccgtaaccttgcctcttgagcacactgcacatgaacacttccatggggcgagcattcagctccttcagggtcacattcccctttcctgtggtctgtccataaagcccaaatatctcacggagtttttcttcactgattgcatctgttctgtcaattttgttacccaagataaggattggcacattggatattgtttcatcagtcattaaagcattaagctcaactttggattccacgagg

SEQ ID NO: 3162 - DNA, 455 bp, Homo sapiens
tttttttttttttgcttgacaacatactctttattccctttgcagattcgcctcctactcccccagcagaggttcctggatcagcaccaaacacactgatccttaaatcctcatctcagggtccattttcctggaatccaagacaaggaagcactcccgaatctccccgaggattctgcctaagggcaacactggccctcgtacccgaggggagagctgtgtatgttcctgagctgcaggtgggtgtctgcctgcctgcgagcgagacctctggaggggtctgtgccgacaggtctttccacaatgagagcctggagggatggagccaatcacaccatttattgtgccctggttctgacgcccactcttgctattctgcatgggtgaagatcgggtcttccaggagttttctggagccaggggcaggtcgacagttctcatcctcccagcagagg

SEQ ID NO: 3163 - DNA, 407 bp, Homo sapiens
agtcagctaaagttctccctcaaagcaaaagcaaaagcaaaatcctccctgcccccattccctagaactgtgaaagcccgcatcccattccccgctcctctaactaaaatatttatatacatacaacaaaaattgtcttaacagcaacaaaccaaactttggcttggggtggggggacccttaaaaatggccagtggactgggcagttggtgtccccttattctctgtcttcctccccagagtcagtaataattgcatcgaggcctctagcttccttgacatcgcccctagtttcaggcacagcctctctcccagttacgaggcgagacaggattctgaagggggaaaggatatgtattctacacaacaggtcaacgccctctcagatatatcactctgcttacaaa

SEQ ID NO: 3164 - DNA, 418 bp, Homo sapiens
tttttttttctttataggacttggacaggggtgttataattcattatgctatctatggcctgtttttaactgactgcccatagctccactagtttctataaacctagctagaaactataaaaaaatgctttggtttaaagaatgattcaaggattctggcaaaatggaaaggtacttctgataaaattgcaccaaaactacaaattaagaatctttttaactttagtggctaactttacaattacatgtacagaatcactccttttctagcagtcttgaggggtggggagactggagggagatatcactctcttttttaggtggagggtaaaagagagagcaccactgaaagccaaggttttagatacgaaccacatactggtagatcaagagctttgagtgagatgtataagaaagt

SEQ ID NO: 3165 - DNA, 344 bp, Homo sapiens
gagcgggatccaaacttccggtgcctgcagagctcggagcggcggaggcagagaccgaggctgcaccggcagaggctgcggggcggacgcgcgggccggcgcagccatggtgaagattagcttccagcccgccgtggctggcatcaagggcgacaaggctgacaaggcgtcggcgtcggcccctgcgccggcctcggccaccgagatcctgctgacgccggctagggaggagcagcccccacaacatcgatccaagagggggagctcagtgggcggcgtgtgctacctgtcgatgggcatggtcgtgctgctcatgggcctcgtgttcgcctctgtctacatct

SEQ ID NO: 3166 - DNA, 764 bp, Homo sapiens
ctgcatcctccgtgcccggcctgagctggagtcccccgcgccccccgcgttccgcccggccatggctgcggtggcgctgatgccaccgccgctgctgctgctgctgctgttggcgtcgccgcccgccgcctccgcgccgtccgcccgcgatcccttcgccccccagctcggggacacgcagaactgccagctgcggtgccgcgaccgcgacctcggcccgcagccctcgcaggcggggctggagggcgcctccgagtctccctatgacagagccgttctgatcagcgcttgcgagcgtggctgccgcctcttctccatctgccgatttgtggccagaagctccaagcccaatgccacccaaactgagtgtgaagcagcctgcgtggaagcctatgtgaaggaggcagagcagcaggcctgtagccacggctgctggagccagcccgcggagcctgagccggagcagaagagaaaggtcctggaggctccaagtggggccctctccctcttggacttgttttccaccctctgcaatgacctcgtcaactcagcccagggatttgtctcctccacctggacatactacttgcagactgacaatgggaaagtggtggtgtttcagactcagcccatagtggagagcctcggcttcaggggggccgtctgcagcgcgtggaggtgaactgcgaggttccacctgaagcctggaggtgacgtggacctgtaggccctggacaggtgagaaggcagatcgagtcaagaca

SEQ ID NO: 3167 - DNA, 2374 bp, Homo sapiens
gcacaatctctctctcacacacacacacacacacacacacacacacactcactcactctattttgtgctgtcgtaaaacccacgtgtccagccgggaagctgccagagcgtggaaccaaggagccaggacgcggcagcggccaagcgcagcagcccacggcggttgagtcgggcgcccaggtccgtccgcactctcgcgccctccgcgggcctcccaattttctcgcttgcaggtcgggaggtttccgggcggcacaatctctaggactctcctcccgcgctgctcaggggcatgtagcgcacgcagggcgcacactctcgcgcacccgcacgctcaccgagacacccgcgctggctggtctctcggccctgccggtgtcgcagctgccggtgttcgcgcctctagccgccgctgccgtcgccgccgagccgctgccccccaaggaactgtgcctcggcgccacctccggccccgggcccgtcaagtgcggtggtggtggcggcggcggcggggagggtcgcggcgccccgcgcttccgctgcagcgcagaggagctggactattacctgtatggccagcagcgcatggagatcatcccgctcaaccagcacaccagcgaccccaacaaccgttgcgacatgtgcgcggacaaccgcaacggcgagtgccctatgcatgggccactgcactcgctgcgccggcttgtgggcaccagcagcgctgcggccgccgcgcccccgccggagctgccggagtggctgcgggacctgcctcgcgaggtgtgcctctgcaccagtactgtgcccggcctggcctacggcatctgcgcggcgcagaggatccagcaaggcacctggattggacctttccaaggcgtgcttctgcccccagagaaggtgcaggcaggcgccgtgaggaacacgcagcatctctgggagtaaatgtcccttcaacggtaatggaagccatgtgcagacaagacgccctgcagcccttcaacaaaagcagcaaactcgcccctaccacccagcagcgctccgttgttttcccccagactccgtgcagcaggaacttctctcttctggataagtctgggcccattgaatcaggatttaatcaaatcaacgtgaaaaaccagcgagtcctggcaagcccaacttccacaagccagctccactcggagttcagtgactggcatctttggaaatgtgggcagtgctttaagactttcacccagcggatcctcttacagatgcacgtgtgcacgcagaaccccgacagaccctaccaatgcggccactgctcccagtccttttcccagccttcagaactgaggaaccacgtggtcactcactctagtgaccggcctttcaagtgcggctactgtggtcgtgcctttgccggggccaccaccctcaacaaccacatccgaacccacactggagaaaagcccttcaagtgcgagaggtgtgagaggagcttcacgcaggccacccagctgagccgacaccagcggatgcccaatgagtgcaagccaataactgagagcccagaatcaatcgaagtggattaacggattgactggttggaattaaactgcaaggaaagtcatgattaaatgtcacggacacttaagcaaaaccaaagatttcctctgagcaactttcaatcagtcccagaaaaccaaaagcagtaataaaataagtaagatgttaagagatattgatcctggcatggaagtcagaccaggaaagagattatttatttatgacttagggatgagacttatttcagtggacaactaacctgggatggtaaacattcccagtcccaccatgtattttgctttgtttctaaaaagctttttaaaaactgttatttaataccaaagggaggaatcgtatgggttcttctgcccaccgttgtgactaagaatgcacagggacttggttctcgttgcacctttttttagtaacatgtttcatggggacccactgtacagcccttcattctgctgtgtcagtttggcctggcctgacactggctgccccagcggggaccacggaagcagagtgagagccttcgctgagtcaatgctaccttcagccccagacgcatcccatttccatgtcttccatgctcactgctcatgcactttttacacggtttcttccaaacagcccggtcttgatgcaggagagtctggaaaaggaagaaaatggtttcagtttcaaaattcaaaggaaaaagttgaggacttattttgtcctgtcaagattgcaagaacatgtaaaatgtacggagcttcataatacgttatattgttccgaagcagctcgttgagaaacatttgttttcaataacattttagct

SEQ ID NO: 3168 - protein, 313 aa, Homo sapiens
AQSLSHTHTHTHTHTHSLTLFCAVVKPTCPAGKLPERGTKEPGRGSGQAQQPTAVESGAQVRPHSRALRGPPNFLACRSGGFRAAQSLGLSSRAAQGHVAHAGRTLSRTRTLTETPALAGLSALPVSQLPVFAPLAAAAVAAEPLPPKELCLGATSGPGPVKCGGGGGGGGEGRGAPRFRCSAEELDYYLYGQQRMEIIPLNQHTSDPNNRCDMCADNRNGECPMHGPLHSLRRLVGTSSAAAAAPPPELPEWLRDLPREVCLCTSTVPGLAYGICAAQRIQQGTWIGPFQGVLLPPEKVQAGAVRNTQHLWE

SEQ ID NO: 3169 - DNA, 8624 bp, Homo sapiens
gtaaaaatgatgccaactgtgattgtttttctggagacgatggttatgccaaggatgcaaagttaaataccccatcttccttggctgtgtgtgctgatggggagctctacgtggccgaccttgggaacatccgaattcggtttatccggaagaacaagcctttcctcaacacccagaacatgtatgagctgtcttcaccaattgaccaggagctctatctgtttgataccaccggcaagcacctgtacacccaaagcctgcccacaggagactacctgtacaacttcacctacactggggacggcgacatcacactcatcacagacaacaatggcaacatggtaaatgtccgccgagactctactgggatgcccctctggctggtggtcccagatggccaggtgtactgggtgaccatgggcaccaacagtgcactcaagagtgtgaccacacaaggacacgagttggccatgatgacataccatggcaattccggccttctggcaaccaaaagcaatgaaaacggatggacaacattttatgacaacctcagatggcaggaattatcatccacattttttacatatgaagtacagagagattagataacaagcctgaaaccacacggtacgacagctttggccgcctgacaaatgtgaccttccctactggccaggtgagcagtttccgaagtgatacagacagttcagtgcatgtccaggtagagacctccagcaaggatgatgtcaccataaccaccaacctgtctgcctcaggcgccttctacacactgctgcaagaccaagtccggaacagctactacatcggggccgatggctccttgcggctgctgctggccaacggcatggaggtggcgctgcagactgagccccacttgctggctggcaccgtcaaccccaccgtgggcaagaggaatgtcacgctgcccatcgacaacggcctcaacctggtggagtggcgccagcgcaaagagcaggctcggggccaggtcactgtctttgggcgccggctgcgggttcacaaccgaaatctcctatctctggactttgatcgcgtaacacgcacagagaagatctatgatgaccaccgcaagttcacccttcggattctgtacgaccaggcggggcggcccagcctctggtcacccagcagcaggctgaatggtgtcaacgtgacatactcccctgggggttacattgctggcatccagaggggcatcatgtctgaaagaatggaatacgaccaggcgggccgcatcacatccaggatcttcgctgatgggaagacatggagctacacatacttagagaagtccatggtgctgctactacacagccagaggcagtatatctttgagttcgacaagaatgaccgcctctcttctgtgacgatgcccaacgtggcgcggcagacactagagaccatccgctcagtgggctactacagaaacatctatcagccccctgagggcaatgcctcagtcatacaggacttcactgaggatgggcacctccttcacaccttctacctgggcactggccgcagggtgatatacaagtatggcaaactgtcaaagctggcagagacgctctatgacaccaccaaggtcagtttcacctatgacgagacggcaggcatgctgaagaccatcaacctacagaatgagggcttcacctgcaccatccgctaccgtcagattgggcccctgattgaccgacagatcttccgcttcactgaggaaggcatggtcaacgcccgttttgactacaactatgacaacagcttccgggtgaccagcatgcaggctgtgatcaacgagaccccactgcccattgatctctatcgctatgatgatgtgtcaggcaagacagagcagtttgggaagtttggtgtcatttactatgacattaaccagatcatcaccacagctgtcatgacccacaccaagcattttgatgcatatggcaggatgaaggaagtgcagtatgagatcttccgctcgctcatgtactggatgaccgtccagtatgataacatggggcgagtagtgaagaaggagctgaaggtaggaccctacgccaataccactcgctactcctatgagtatgatgctgacggccagctgcagacagtctccatcaatgacaagccactctggcgctacagctacgacctcaatgggaacctgcacttactgagccctgggaacagtgcacggctcacaccactacggtatgacatccgcgaccgcatcactcggctgggtgacgtgcaatacaagatggatgaggatggcttcctgaggcagcggggcggtgatatctttgagtacaactcagctggcctgctcatcaaggcctacaaccgggctggcagctggagtgtcaggtaccgctacgatggcctggggcggcgcgtgtccagcaagagcagccacagccaccacctgcagttcttctatgcagacctgaccaaccccaccaaggtcacccacctgtacaaccactccagctctgagatcacctccctctactacgacttgcaaggacacctctttgccatggagctgagcagtggtgatgagttttacatagcttgtgacaacatcgggacccctcttgctgtctttagtggaacaggtttgatgatcaagcaaatcctgtacacagcctatggggagatctacatggataccaaccccaactttcagatcatcataggctaccatggtggcctctatgatccactcaccaagcttgtccacatgggccggcgagattatgatgtgctggccggacgctggactagcccagaccacgagctgtggaagcaccttagtagcagcaacgtcatgccttttaatctctatatgttcaaaaacaacaaccccatcagcaactcccaggacatcaagtgcttcatgacagatgttaacagctggctgctcacctttggattccagctacacaacgtgatccctggttatcccaaaccagacatggatgccatggaaccctcctacgagcttatccacacacagatgaaaacgcaggagtgggacaacagcaagtctatcctcggggtacagtgtgaagtacagaagcagctcaaggcctttgtcaccttagaacggtttgaccagctctatggctccacaatcaccagctgccagcaggctccaaagaccaagaagtttgcatccagcggctcagtctttggcaagggggtcaagtttgccttgaaggatggccgagtgaccacagacatcatcagtgtggccaatgaggatgggcgaagggttgctgccatcttgaaccatgcccactacctagagaacctgcacttcaccattgatggggtggatacccattactttgtgaaaccaggaccttcagaaggtgacctggccatcctgggcctcagtggggggcggcgaaccctggagaatggggtcaacgtcactgtgtcccagatcaacacagtacttaatggcaggactagacgctacacagacatccagctccagtacggggcactgtgcttgaacacacgctacgggacaacgttggatgaggagaaggcacgggtcctggagctggcccggcagagagccgtgcgccaagcgtgggcccgcgagcagcagagactgcgggaaggggaggaaggcctgcgggcctggacagagggggagaagcagcaggtgctgagcacagggcgggtgcaaggctacgacggctttttcgtgatctctgtcgagcagtacccagaactgtcagacagcgccaacaacatccacttcatgagacagagcgagatgggccggaggtgacagagaggaccaaggacttcttgccaaagacagctactcttttgtggccgcatacctgactgtgttgtacttttaaaaaaatgattttttaacaagtgcagaaacaaaaagatactggttgcattgtaactcatgcaacatccttttttttagaaaagaaaaacacagatttggccttcgcacattttttgcaaagaacagaaggtatttttttctgtagtgtgatcacaatgaaaactttattgtcttttgttccctttttccttgaggatttttcccttgtcgtttggggtatgtatctcctctctgagatgcatctcctggggtgtgtcctcgtctgtccctaggtacccagtgtgatgtgggacatgaatgtctgtgctaacttgtctcatgtgcaaccctttcttcttcgactggggtcgggcaggagtaaagggagtgatgggccagtacaacaccccttccaagggggcctgggaggagggtctgtaggacctgaggctccttggcagggctcctgcagaagagtggtggatttcttctcaccttgttctctgcctccagaggatcatagatggcttcatcttgctccagggaatttcatggtgttgttcagcaccttttttaagctgccccaaactcctgttcaagctttctattttgatgctgaatgaaaccccctaccacttttgcaaatcctgtgtagttgtcggtgccacccccatgctgggatagagaaagtgtctcccaggtcctttcccccagaccagtgacataacatcctgggctcagagtcccatcctcccgggagggaaagcacccaggatgcctgtgattggttggtcctccatgatgttcctgttcatctcctcctttctcccaaagccagatgtgagaacgagcactgcacagcaagccttcaatgtgggcaccatgtccacagaacagaaggccacccatggcaaaggcatggcagtggtggcgagggcaccagcctgccttccgaggcaaagccctctctctatgactttgagtatcttccctccaccactcagccgccaccactgagacgtaggaatgtggagggaggtgcttggtggcctttgattctggaaaaatgcttaacaaaaaaagccagccaaagagaggaaggcataagctaagcatccttctaaccagttcccaaagtcccatctgcctccatgtaccagctgatcgcagagctggactggggcaggctgggcttccaggaaattcctgaagttctgaaacagcttcccctctagagaagcccacccaatgtgttttttagtgacaggaagaaaggagggaagagctgatgtggtgtggcctgcccatatcatacaaccccaccaggagcagggcagttcccaaggtgggtgcccgtagatctgggaggccaggctggcatgattcctgtgaagaactgtgcctgtgtcgtcagggagaggcctgagccctctcagaagcagggacagcccacacctgaagagcacgcccaagctgaggcagcagccagcaggctgggggagcagtgagggcagggggagtcacagccagagctgggagccccttgttcaaggattccattcctggttcatccgcctaattaccattgtcattaccactcacaggaggctctgggagatgggaggggaagccaaatgcttccttttaagctgggcttcttagaaaatggaacttttatgggttacatttacattaagtgtggaaaatgaattctgagtctgagctattccccgtggaaaccttgttggactgataagctcatggcacctctatagccttactcacatagtcttcagaatattacacaagttaatgaaactgagaaggtctgactgcatgaggatcggagcagcatgtagtctgggttctgcctggcagagggaggcaaccaaaacttcttggggagaggagatttcgccttaacgtcatcccactgggattagaggatgtgtttcgctaagtgctcttcctgtttccaaaaaaaaagccaccctgctgcagcagtgcgctttggcctgcttgtccactggttgcccattgcccctggatccagagctctactgagtcagatacagtgctctgcaggcctgctgtgggaggcatgagctggagatgggggctcccatctggcaggatcattcttggatgagatggaaaacagtttggcctgaagaacacaagttttgtcctccagaagggacttacgcctctcaaaatgtactcttcataccaagggcccttgggcaaagtgctcctgcccagttgatcagtcccatcctggctgcctgacatcagtgaagacctgctggggatgtctgctcagaggtcaggaacggcatgcggtccacaggaaccagctccctacgcttcccccacgccctgtccctcctccacagccccctccccaaaggaatagggtggacttttagggatcaaaaacagaattattgggtgtttcatttctttttttctttctttcttttttttttcatagagatggggtctcactatgttgcccaggctgttctcaaactcctggcctcaggcgatccaccttggcctcctgaagtgctggggttacaggtgtgagccactgcgcctggactgagtgtttgtttctttaaaggatcttatatttttcctgtgctacataccaccacagcagcccagcttctgtggggagagaagttgaaggatcccgaagctttagaaaaaggatctcagctgtggcacaggcagtgttatgcgcctcactgccacattggtgctgttgtattgaaggtggtgcttctggccttggcccttttgagttggtttccatttgggctgcaggtgactcagtgactccctcctcaagctgtcctcctgctaagaccagcagtcacaaacccatggcaagggtgagtgtgaaggcctaaccctgtgcctatgtaataggctccaagcatcgactcccatcctgagaggaccggcccttttgacactcaccaaccaaatctgttcattcgatagagtgaccaggcctccctcacctgcccaggtgtatgatcctacagttcctgccttctctcctaccccgcacagctgccaactggtcctacatcctcagcccctctgccaccaccttaaataggactttactgattccccaactttgtttttttgtaggatgagatttcctttttatcccacccccccacaccccaaacagacattgctggagggcagactggaggaaggggaaggcatgcaggtaaattactgccttgtcagcctctgaccctcatctctcagaattgttggctgagaattaacccaaggaccacaccagtgcctgatttctacttagggagagaggattggaaacgatccctaagaaactgactgagggtgagaatggccaggaggtgtgtgtccaaataaccaggagggggcacagaagatgatggcaaggcagactgggcagtgttttgtagacacagaacaaagaatcagaatttgaaaaaagaagaaaaacaaatcttcgcagctgcaactttaaagtatcacctttatagatggcagggatttccattatgcaaatggaatctaagatttcaatgtgaaatcttagaatgcagttttaccacttgcagtcttgtatttgtggtggccatgtggtgagggcggtgatgctgagctttctgcccaggaggaatgagctttcaagctctcagcagggtgtcaggcttggggatttgagcatccactgctcaaagtccaggctattctccagtcctcacggcagccactaagcccaggagccagacctggcccagggacacatctcctgagggatcccagaaagaacccagtctttcctttcccttggggtccttgttagaatgaaaacctctctatttaaggcacatcattcccagctaggtttatacacttgtctatattttactggaggaaagggaattaaaaaagaactctgcagttcaaggccctttcatttaaccttccaaaaacagcaaactcattttaaagactcattgctgaggtgatagagagaaaccttatcctctccaacctttacattcacaaaaaccatccttgtgtacttgactgccctagacagtggtgactcttaggtttcattacgaatgtggaatatcagagtgtgggaaggcccaggcgagggccaatgttgtgtttcttaccccctctggaatgccaaaggcaaggtactaggtgacctcctggtccccaagaaaatgtgatttattctgagggcgaacagccaagggaggactagtctggagcacgctcggccgtcctggcaggagctgagcctcaggtgtctggcggtgccccagcagccctggattcacccaacaccagaatcccacttttctaaatccacctgttgttctgagcacctctgaacccgcagcttcggcaaaaggagtctgtaccaagctgcttctggatgaccaacactggagactctggccttaccatgtggaaatcattttcctgaagtctggaaccaattttgagaagtttttttctcaacacttttgtgtttctaacactgtatcttgactgtgtaaataccaacaaggctgtaaataaatgcagatgtagataccttctagaaaaaaaaaagcataaaaacaaaaccagaagtgatcccgtgtagccttcgttgacaaataaagactattttgtgttt

SEQ ID NO: 3170 - protein, 1086 aa, Homo sapiens
STERLDNKPETTRYDSFGRLTNVTFPTGQVSSFRSDTDSSVHVQVETSSKDDVTITTNLSASGAFYTLLQDQVRNSYYIGADGSLRLLLANGMEVALQTEPHLLAGTVNPTVGKRNVTLPIDNGLNLVEWRQRKEQARGQVTVFGRRLRVHNRNLLSLDFDRVTRTEKIYDDHRKFTLRILYDQAGRPSLWSPSSRLNGVNVTYSPGGYIAGIQRGIMSERMEYDQAGRITSRIFADGKTWSYTYLEKSMVLLLHSQRQYIFEFDKNDRLSSVTMPNVARQTLETIRSVGYYRNIYQPPEGNASVIQDFTEDGHLLHTFYLGTGRRVIYKYGKLSKLAETLYDTTKVSFTYDETAGMLKTINLQNEGFTCTIRYRQIGPLIDRQIFRFTEEGMVNARFDYNYDNSFRVTSMQAVINETPLPIDLYRYDDVSGKTEQFGKFGVIYYDINQIITTAVMTHTKHFDAYGRMKEVQYEIFRSLMYWMTVQYDNMGRVVKKELKVGPYANTTRYSYEYDADGQLQTVSINDKPLWRYSYDLNGNLHLLSPGNSARLTPLRYDIRDRITRLGDVQYKMDEDGFLRQRGGDIFEYNSAGLLIKAYNRAGSWSVRYRYDGLGRRVSSKSSHSHHLQFFYADLTNPTKVTHLYNHSSSEITSLYYDLQGHLFAMELSSGDEFYIACDNIGTPLAVFSGTGLMIKQILYTAYGEIYMDTNPNFQIIIGYHGGLYDPLTKLVHMGRRDYDVLAGRWTSPDHELWKHLSSSNVMPFNLYMFKNNNPISNSQDIKCFMTDVNSWLLTFGFQLHNVIPGYPKPDMDAMEPSYELIHTQMKTQEWDNSKSILGVQCEVQKQLKAFVTLERFDQLYGSTITSCQQAPKTKKFASSGSVFGKGVKFALKDGRVTTDIISVANEDGRRVAAILNHAHYLENLHFTIDGVDTHYFVKPGPSEGDLAILGLSGGRRTLENGVNVTVSQINTVLNGRTRRYTDIQLQYGALCLNTRYGTTLDEEKARVLELARQRAVRQAWAREQQRLREGEEGLRAWTEGEKQQVLSTGRVQGYDGFFVISVEQYPELSDSANNIHFMRQSEMGRR

SEQ ID NO: 3171 - DNA, 348 bp, Homo sapiens
gctttcaaatacggtgcctttttatttaaaacagtgtaaacataacaactcaacaccaccaataattggaaaaagaatggatatgtgaacactaatttcctcatatgtcccatgaaagtgagggtaaataaacagacaaatcttcaggagaggtttcagttcaccttagcagtggtaaaaatattgctttattccaaatgaacatacaacacaatttactgttcttttggggggcttcttgtgaactgaatagtctgggtatttttatttcaacaatttattcttcccatactaaccacagaagccgaagccttggtccacacatagcagacttgctataaaataaat

SEQ ID NO: 3172 - DNA, 439 bp, Homo sapiens
ttttttttgagatggagtctcaaaaatttaaaaaatatatatttttttaagcatcagataagcttgctctgcaaagatcttagatctttgtagtcaaaaatacctagaattgtttgaattccaattgtgacaattagttgtaggaaccttaaacaagttatttaaaaccccagtcttagctaaaaatggaatctgaggctgcaaagatgacagaagatcataatataaactgcatggtgtacagtctagaacacagtcttagtttcccacaatttattaaaccccaaagaaagaaaagatgggagaggaatgcactttcctttaactcccttcacaaactggtgaatgatgacacccaatgatgactacaacattctcaaatgagggaaattaaaacgaagaagaaaaaaaaactggccctaccaaaagctttcacaac

SEQ ID NO: 3173 - DNA, 1540 bp, Homo sapiens
gatacatacacctgcaaaggttcagctttccctatacacatatttgtctgctgaatttattggaactgctaccatctacaccaccatacgcagagtaggaacagtattacagctaatgcacaccttaaaatattactactgggttattaatcctgctgacagtagtggcattacacctaaaggattagatggtccccggccatcacaaaaagaaattatatcactgagggcatttatgctactttttctgaaacagctgatactaaaggatcgaggggtcaaggaagatgaacttcagagtatattaaattacctacttacgatgcatgaggatgaaaatattcatgatgtgctacagttactggtggctttaatgtcggaacacccagcctcaatgataccagcatttgatcaaagaaatggaataagggtgatctacaaattattggcttctaaaagtgaaagtatttgagttcaagctttgaaggttctgggatactttctgaagcatttaggtcacaagagaaaagttgaaattatgcacacccatagtcttttcactcttcttggagaaaggctgatgttgcatacaaacactgtgactgtcaccacatacaacacactttatgagatcttgacagaacaagtatgtactcaggtcgtacacaaaccacatccagagccagattctacagtgaaaattcagaatccaatgattcttaaagtggtggcaactttgttaaaaaactctacaccaagtgcagagctgatggaagttcgtcgtttatttttatctgatatgataaaacttttcagtaacagccgtgaaaatagaagatgcttattgcagtgttcagtgtggcaggattggatgttttctcttggctatatcaatcctaaaaattctgaggaacagaagattaccgaaatggtctacaatatcttccggattcttttgtatcatgcaataaaatatgaatggggaggctggagagtctgggtggataccctctcaatagcccattccaaggtcacttatgaagctcataaggaatacctagccaaaatgtatgaggaatatcaaagacaagaggaggaaaacattaaaaagggaaagaaagggaatgtgagcaccatctctggtctttcatcacagacaacaggagcaaaaggtggaatggaaattcgagagatagaagatctttcacaaagccagagcccagaaagtgagaccgattaccctgtcagcacagatactcgagacttactcatgtcaacaaaagtgtcagatgatattcttggaaattcagatagaccaggaagtggtgtacatgtggaagtacatgatcttttagtagatataaaagcagagaaagtggaagcaacagaagtaaagctcgatgatatggatttatcaccggagactttagtaggtggagagaatggtgcccttgtggaggttgaatctctgttggataatgtatatagtgctgctgttgagaaactccagaacaatgtacatggaagtgttggtatcatt

SEQ ID NO: 3174 - protein, 334 aa, Homo sapiens
MHTHSLFTLLGERLMLHTNTVTVTTYNTLYEILTEQVCTQVVHKPHPEPDSTVKIQNPMILKVVATLLKNSTPSAELMEVRRLFLSDMIKLFSNSRENRRCLLQCSVWQDWMFSLGYINPKNSEEQKITEMVYNIFRILLYHAIKYEWGGWRVWVDTLSIAHSKVTYEAHKEYLAKMYEEYQRQEEENIKKGKKGNVSTISGLSSQTTGAKGGMEIREIEDLSQSQSPESETDYPVSTDTRDLLMSTKVSDDILGNSDRPGSGVHVEVHDLLVDIKAEKVEATEVKLDDMDLSPETLVGGENGALVEVESLLDNVYSAAVEKLQNNVHGSVGII

SEQ ID NO: 3175 - DNA, 404 bp, Homo sapiens
  misc_feature (26)..(26): n is a, c, g, or t
  misc_feature (304)..(304): n is a, c, g, or t
  misc_feature (324)..(324): n is a, c, g, or t
  misc_feature (332)..(332): n is a, c, g, or t
  misc_feature (342)..(342): n is a, c, g, or t
  misc_feature (366)..(366): n is a, c, g, or t
  misc_feature (388)..(388): n is a, c, g, or t
tttttttttggcactggcaacaaagnaatttttaatgagtttgacagggaaaggacacccacacaaggattttttggttttcttctacacaaggtttttaaaagcctggtttggtttcagcacattgagcttacagaaaaaataaaaccgctagcaagtcatcagactcttcaatgaaaatgtatttcacattaaacacaaggtacatatcatgcaaatgaggcatcaccatggtcacaatggtgctgtgaggtacaacaaatcacaagaaaacagacatttagcaaaataaggttcccggggnagatgagaggcattttctgnaagccagnccatgctatnggtttctgtgtgcctgtcattaanggggctttggccagtttttttncccgggatgggccagg

SEQ ID NO: 3176 - DNA, 467 bp, Homo sapiens
ttttttgcattatgtaactatttatagggagtaggctggcaaccatggcctaaaatacattaactagaattcaaaaggaagctagaaaactgtatgcctttttcaatgaaaaagactttaatgatcctttctgtgagtacaagagaaattttcatttcacaaaatcatggagtcttatagactttggattggaaaatattttaaatctcattcatttcaacatcactctggtgcttgcctctaaatacaacctctacattaggtatttgtttgactcacgtttgaacaccttctagggcttcctattagatctcagaatagtgtgaggaaagtctttcacatttgagccgagatcttgttttctgtaatttctgttatttggtcctagtgcttcaattcttcagtgccataaagatcaggaacaatcgcctcaaatgataatcttttttgaaactgcaaaaggagat

SEQ ID NO: 3177 - DNA, 224 bp, Homo sapiens
tttttttttaaaacataatacatttttatttctttaaaaacgtatgacaaaatttcttctgccatcggccatgctcagatttatacattataaaatgatttaattccctaaagtacaaaaaagaatggctgaatctccaaagagttgataaagactgaagatgtttataaggcatgcttatgtatactatttcaagccatctacaggacttgagacaggaatgt

SEQ ID NO: 3178 - DNA, 631 bp, Homo sapiens
ctaggtacgaggccccgtgttgatcggccgaggcgggagctggcgccatggtgctgttgcacgtgctgtttgagcacgcggtcggctacgcgctgctggcgctgaaggaagtggaggagatcagtctgctgcagccgcaggtggaggagtccgtgctcaacctgggcaaattccacagcatcgttcgtctggtggccttttgtccctttgcctcatcccaggttgccttggaaaatgccaacgccgtgtctgaaggggttgttcatgaggacctccgcctgctcttggagacccacctgccgtccaaaaagaagaaagtactcttgggagttggggatcccaagattggtgccgcaatacaggaggagttagggtacaactgccagactggaggagtcatagctgagatcctgcgaggagttcgtctgcacttccacaatctggtgaagggtctgaccgatctgtcagcttgtaaagcacagctggggctgggacacagctattcccgtgccaaagttaagtttaatgtgaaccgggtggacaatatgatcatccagtccattagcctcctggaccagctggataaggacatcaataccttctctatgcgtgtcaggcagtggtacgggta

SEQ ID NO: 3179 - DNA, 442 bp, Homo sapiens
taaataataataggctttctgccccaactaaaggaattttaggcttctgcaacaagtggaggaggcattttgaagatgggacacaaagaagtcttctttctccagatccagaagtcaggccttgtaagaattcaagccaaaaaaagttcatccatgggaaaaacggttcttctatcatccagcacgtatttgtgccaacagagctgagggacttgagtaattcaagaggctaggggttggggggcagatgtgtccagtggctcccacagccccgccgtcctgaaagtcacgccagttaatgtgcctcggggtggatcagccctcccgacagatgactactaggaaattaatccccagttaataatgtgctttggaccaagtaagtcaagattatttttcctacaattatacaaagatatgcttttccagaagggaacttctg

SEQ ID NO: 3180 - DNA, 606 bp, Homo sapiens
aattttgcggggctcaacggctcgcggagcggctacgcggagtgacatcgccggtgttgcgggtggttgttgctctcggggccgtgtggagtaggtctggacctggactcacggctgcttggagcgtccgccatgaggagaagtgaggtgctggcggaggagtccatagtatgtctgcagaaagccctaaatcaccttcgggaaatatgggagctaattgggattccagaggaccagggttacaaagaactgaggtggtaaagaagcatatcaaggaactcctggatatgatgattgctgaagaggaaagcctgaaggaaagactcatcaaaagcatatccgtctgtcagaaagagctgaacactctgtgcaggagttacatgttgagccatttcaggaagaaggagagacaaaccatctgtgcaactagaaaaagattggcgcacccaagtggaatttgatgcgaaaaccgaaaacggagagaaaacaggaactgaagctacttcatgagcagatcaagaactgtgcgaaattcttgtatggcccactatgatattgacagtgcctcagtgccagcttagaagagctgaacagtcaggcacatgg

SEQ ID NO: 3181 - DNA, 353 bp, Homo sapiens
ttttttgcttgctttacggttttattttgcctttcgttttttagctcattttataatttgttacttctgaacaccttccaagtgctggtgctttcagatatctacctcaaagtattatttgtaaatgtcaaaaagtccctcttacatataattgaaagctggctacatggtagacaatatgatcacaaacttttaaacaattttttaagctgaagaaatactttttctttttataagtatcagatcaaaatgtaattcagcatccacccataaagcgcaactaaaaacttttcacaatgccattaacaacttgtggttaccatcataagcctacagacctacacactaattat

SEQ ID NO: 3182 - DNA, 651 bp, Homo sapiens
  misc_feature (567)..(567): n is a, c, g, or t
gccccacccccaccacctgtccccacccagtgtcccaggccacaggagcttattggccaggagggaataatgtcccccaatactgcctgttgagggaccagagttggggtctttggtgcttccaacctcctgccaacctggagttcacaacaccagagccccacggcctcgcacactgaagcaggggcgtgcggtgactcggtgcttctgttttggaagaaccacctgtcatcaaaacatggacagcagggtgttctcagctcccagcgaagcctccacaacagaatggggccacagggcagccgggactccctgtctcacctacattaacccatgcatactgtatgccataaactcactttggtatatccgcgtcacatgcagagaggaactctgcgacgtcaaagtgttgcttcttaaagtttcattattggcaactagagggttgtttttaatgcatggaaactaaacagattcctcggggagttcctgaaggaaccaggtgggcaaacctttgcttatatacatgcggcctcacctggaagagaaataaaccacttgtactanaaaaaaaaaaaaaaacccgtggtgaacggacccgtcgccatgggccgggtgaccggggccagaagaagggccgggtctggtccg

SEQ ID NO: 3183 - DNA, 337 bp, Homo sapiens
tagtcaggctcggtcccggattgacgccacgtctggctgcgacatctgtcaccccttgatcgccaggttgattcggctgatctggctggctaggcgggtgtccccttcctccctcaccgctccatgtgcgtccctcccgaagctgcgcgctcggtcgaagaggacgaccatccccgatagaggaggaccggtcttcggtcaagggtatacgagtagctgcgctcccctgctagaacctccaaacaagctctcaaggtccatttgtaggagaacgtagggtagtcaagcttccaagactccagacacatccaaatgaggcgctgcacgtggcgtctgt

SEQ ID NO: 3184 - DNA, 471 bp, Homo sapiens
gcttttaaaatactgagacagcattttaattcaatattctaggttcaaactgatacattaaaaaaaaatcataccaacctttaatcattctacatccattttttaaagttagctaacaagatgatgtttcactaaaataaaatatccaatcatcagattaaagtgtaaagtttgtgtgaacagggaaattagatcatttctctaagttttaattcctatgtttctgaatgtttcttgaattaaaaattcatttcatcatcttactttcaaaacacggcatctctctttcaccattccacagagagagaaaagactagaaaatactttaaaaaaaataaatattttaaaagtatagcttacagtgacaatgtagtattttagacctgtgccttcgtgcctatttgcattaaatacatgcttcaagttataactaccttttctatctctctatatattgtgggccactaagtg

SEQ ID NO: 3185 - DNA, 439 bp, Homo sapiens
  misc_feature (363)..(363): n is a, c, g, or t
  misc_feature (412)..(412): n is a, c, g, or t
tttattttaaatatgtgtcttttacagtcttttgtcattctgacatttctggatttttgctgttttataatttaccctttgttattcagaagcatgcttacttatagaaactaaatggtctttataaaagtaattacttaaaaagaaatcaggggaagaaagatatctatctaatctattaaatctttataaaacattacattgcagagggggagctactcctaaatattttcatgatttgcatggtttaatcagattttttttttttttacaccatattagctaccttttcaatggagaagagacagttcacacaattccctggttagcacagatgtggactgagtgctttgtcacctgcanggtagtaacccagtgatgtttcttacagaaacacaatatgttgaaaatnctgggtgtgaccaatatggaataaaga

SEQ ID NO: 3186 - DNA, 470 bp, Homo sapiens
agtctggcggccgagaggactagttgtcccagcgtgccctgcgcctcagcccgcgcgctcggagcttctcgctctcgcctgcctgcccgctcccttgcttgctcgcgctttcgctcgccctctcctcgaggatcgaggggactctgaccacagcctgtggctgggaagggagacagaggcggcggcggctcaggggaaacgaggctgcagtggtggtagtaggaagatgtcgggcgaggacgagcaacaggagcaaactatcgctgaggacctggtcgtgaccaagtataagatggggggcgacatcgccaacagggtacttcggtccttggtggaagcatctagctcaggtgtgtcggtactgagcctgtgtgagaaaggtgatgccatgattatggaagaaacagggaaaatcttcaagaaagaaaaggaaatgaagaaaggtattgcttttcccaccagcatttcgg

SEQ ID NO: 3187 - DNA, 370 bp, Homo sapiens
gagatgagggctccctatgttgcccaggttggtctcgaactcctggactcaaagtatcctcccgcctcggcctcccaaagtgttgggattataggagtgagccaccacaccggccaagatgcttttcaaactgatacagatgacaatgggagcctcataaagatggcttttgtttcttcccttcaaggtcatttacttgtacgagacagaaaaagatagcattggggacatgggatgggggagggagggcaatagtggaacgaactttccatgggaaactttcccttttgtaagttgagggccaggggtagggatattttttagtttgtgattttacatttatctgtacatactttttcaagattgatca

SEQ ID NO: 3188 - DNA, 310 bp, Homo sapiens
  misc_feature (41)..(41): n is a, c, g, or t
gtggctcagtggtggcaaaatactggtgatgctccctaganaggaggcccggaagtgctgacgcagccatcagcctgccaagattgttttttaatcttcacagtgttttaaagaacatgttaaaaaaaaaaaaatctagtgctcctgctgtcaagatttctgtcatggaaaccttgtttgagaaaggtgttaataaaattctattgcaaaaatttctttttctagaaaaaataaatacaaaaaaaaaaaagaagaaattccaaagtaataaaacttttcttgagacaaacaaaaaaaaagtttgcttacc

SEQ ID NO: 3189 - DNA, 318 bp, Homo sapiens
gctataaaggcatagacatttttattgggagatatgggcagaaaaattatttcctcagggtggggcatttggctaaacacttgccaatatcctttactgtgtaatttaggtaacacaggcagaaaaggcgtttgaaaagcagaaatcaagtggcaaaaatcagatctgagggacgcaatgagggtggagctgaaatccgtggtccttggatttgaaacttaccagcccgcgaacaaggctggtattgcttttggcataagacgacagcctttcttttcattagctcaggaggaatactggctttccaagtgagctcct

SEQ ID NO: 3190 - DNA, 312 bp, Homo sapiens
  misc_feature (66)..(66): n is a, c, g, or t
  misc_feature (270)..(270): n is a, c, g, or t
tacattcggagttcctgttttgctcatcccgcaccaccccaccctccacacactaacatccctttnttccccccaccagctgtaaaagatcctatgcgaaagacactggctcttttttttaatcccccaaataaattttgcccccttttaggccatgttccattatctcttaaaattggaacctaattcgagaggaagtaagaagggtctgttctgtggctgagctaggtgaaccccggggtaggggaaagatgttaacaactttgacgncttttgggagtttgacaatgggaccagcaggtaagtttgtta

SEQ ID NO: 3191 - DNA, 347 bp, Homo sapiens
atggagagtatattcctttgtttcaaatttgggtaactctcctgtgtttcaggaacagctctccctattttttcactgccatcttcaggcttcctagccaggctccaaacaaatgtcatataagaaagaaagattaattattacatattgtgtattgagagtttgtaccctgtggttctcatcgtgctgttaattttacttttcttgccaaacaaaaataatttgacattgattatgtgctttttgatattttcaagggcaattattaaggttatgagctctttcttagggcacttgatgccttatatgttaatagcaagtgtgtcatatcattttaaaataaaact

SEQ ID NO: 3192 - DNA, 375 bp, Homo sapiens
  misc_feature (9)..(9): n is a, c, g, or t
  misc_feature (11)..(11): n is a, c, g, or t
  misc_feature (19)..(19): n is a, c, g, or t
  misc_feature (22)..(22): n is a, c, g, or t
  misc_feature (42)..(42): n is a, c, g, or t
  misc_feature (294)..(294): n is a, c, g, or t
  misc_feature (328)..(328): n is a, c, g, or t
  misc_feature (337)..(337): n is a, c, g, or t
ctcgtgccngncgcaggcntgngtaccccgttggtccgcgcnttgctgcgttgtgaggggtgtcagctcagtgcatcccaggcagctcttagtgtggagcagtgaactgtgtgtggttccttctacttggggatcatgcagagagcttcacgtctgaagagagagctgcacatgttagccacagagccacccccaggcatcacatgttggcaagataaagaccaaatggatgacctgcggagctcaaatattaggtggagccaacacaacttatgagaaaggtgtttttaaagntagaagttatcattcctgagaggtacccattttnaacctcctnaagttccgatttttaatccattttttcatcccaacatg

SEQ ID NO: 3193 - DNA, 402 bp, Homo sapiens
atgaggctccctgctcagctcctggggctgctaatgctctgggtcccaggatccagtggggatgttgtgatgactcagtctccactctccctgcccgtcacccttggacagccggcctccatctcctgcaggtctagtcaaagcctcgtacacagtgatggaaacacctacttgaattggtttcagcagaggccaggccaatctccaaggcgtctaatttatagggtttctaaccgggactctggggtcccagacagattcagcggcagtgggtcaggcactgatttcacactgaaaatcagcagggtggaggctgaggatgttgggctttactattgcatgcaacatacacactggtctccgatcaccttcggccaagggacacgactggagattaaacga

SEQ ID NO: 3194 - protein, 134 aa, Homo sapiens
MRLPAQLLGLLMLWVPGSSGDVVMTQSPLSLPVTLGQPASISCRSSQSLVHSDGNTYLNWFQQRPGQSPRRLIYRVSNRDSGVPDRFSGSGSGTDFTLKISRVEAEDVGLYYCMQHTHWSPITFGQGTRLEIKR

SEQ ID NO: 3195 - DNA, 447 bp, Homo sapiens
ctacagcccaggtccccacgcctagaagacagcggaactaagaaaagaagaggcctgtggacagaacaatcatgtctgactccctggtggtgtgcgaggtagacccagagctaacagaaaagctgaggaaattccgcttccgaaaagagacagacaatgcagccatcataatgaaggtggacaaagaccggcagatggtggtgctggaggaagaatttcagaacatttccccagaggagctcaaaatggagttgccggagagacagcccaggttcgtggtttacagctacaagtacgtgcatgacgatggccgagtgtcctaccctttgtgtttcatcttctccagccctgtcgtgcaagcgtgaacaacagatgatgtatgcagggagtaaaaacaggctggtgcagacagcagagctcacaaaggtgttcgaaatccgcaccact

SEQ ID NO: 3196 - DNA, 1532 bp, Homo sapiens
cccaaatgcttctttggatctcaggctctaggtgcaatgtgaaggggagtcactgggcagactgatccctggctcagacagttcagtgggagaatcccaaaggccttttccctccttcctgagcctccgggcaaggagggagggatcttggttccagggtctcagtaccccctgtgccatttgagctgcttgcgctcatcatctctattaataaccaacttccctcccccactgccagtgctgcccccacgcctgcccagctcgtgttctccggtcacagcagctcagtcctccaaagctgctggaccccagggagagctgaccactgcccgagcagccggctgaatccacctccacaatgccgctctcaggaaccccggcccctaataagaagaggaaatccagcaagctgatcatggaactcactggaggtggacaggagagctcaggcttgaacctgggcaaaaagatcagtgtcccaagggatgtgatgttggaggaactgtcgctgcttaccaaccggggctccaagatgttcaaactgcggcagatgagggtggagaagtttatttatgagaaccaccctgatgttttctctgacagctcaatggatcacttccagaagttccttccaacagtggggggacagctgggcacagctggtcagggattctcatacagcaagagcaacggcagaggcggcagccaggcagggggcagtggctctgccggacagtatggctctgatcagcagcaccatctgggctctgggtctggagctgggggtacaggtggtcccgcgggccaggctggcagaggaggagctgctggcacagcaggggttggtgagacaggatcaggagaccaggcaggcggagaaggaaaacatatcactgtgttcaagacctatatttccccatgggagcgagccatgggggttgacccccagcaaaaaatggaacttggcattgacctgctggcctatggggccaaagctgaacttcccaaatataagtccttcaacaggacggcaatgccctatggtggatatgagaaggcctccaaacgcatgaccttccagatgcccaagtttgacctggggcccttgctgagtgaacccctggtcctctacaaccaaaacctctccaacaggccttctttcaatcgaacccctattccctggctgagctctggggagcctgtagactacaacgtggatattggcatccccttggatggagaaacagaggagctgtgaggtgtttcctcctctgatttgcatcatttcccctctctggctccaatttggagagggaatgctgagcagatagcccccattgttaatccagtatccttatgggaatggagggaaaaaggagagatctacctttccatcctttactccaagtccccactccacgcatccttcctcaccaactcagagctccccttctacttgctccatatggaacctgctcgtttatggaatttgctctgccaccagtaacagtcaataaacttcaaggaaaatg

SEQ ID NO: 3197 - protein, 299 aa, Homo sapiens
MPLSGTPAPNKKRKSSKLIMELTGGGQESSGLNLGKKISVPRDVMLEELSLLTNRGSKMFKLRQMRVEKFIYENHPDVFSDSSMDHFQKFLPTVGGQLGTAGQGFSYSKSNGRGGSQAGGSGSAGQYGSDQQHHLGSGSGAGGTGGPAGQAGRGGAAGTAGVGETGSGDQAGGEGKHITVFKTYISPWERAMGVDPQQKMELGIDLLAYGAKAELPKYKSFNRTAMPYGGYEKASKRMTFQMPKFDLGPLLSEPLVLYNQNLSNRPSFNRTPIPWLSSGEPVDYNVDIGIPLDGETEEL

SEQ ID NO: 3198 - DNA, 1114 bp, Homo sapiens
aacggaaacctttttagggagtccaaggtacagtcgccgcgtgcggagcttgttactggttacttggcctcatggcggtccgagcttcgttcgagaacaactgtgagatcggctgctttgccaagctcaccaacacctactgtctggtagcgatcggaggctcagagaacttctacagtgtgttcgagggcgagctctccgataccatccccgtggtgcacgcgtctatcgccggctgccgcatcatcgggcgcatgtgtgtggggaacaggcacggtctcctggtacccaacaataccaccgaccaggagctgcaacacattcgcaacagcctcccagacacagtgcagattaggcgggtggaggagcggctctcagccttgggcaatgtcaccacctgcaatgactacgtggccttggtccacccagacttggacagggagacagaagaaattctggcagatgtgctcaaggtggaagtcttcagacagacagtggccgaccaggtgctagtaggaagctactgtgtcttcagcaatcagggagggctggtgcatcccaagacttcaattgaagaccaggatgagctgtcctctcttcttcaagtcccccttgtggcggggactgtgaaccgaggcagtgaggtgattgctgctgggatggtggtgaatgactggtgtgccttctgtggcctggacacaaccagcacagagctgtcagtggtggagagtgtcttcaagctgaatgaagcccagcctagcaccattgccaccagcatgcgggattccctcattgacagcctcacctgagtcaccttccaagttgttccatgggctcctggctctggactgtggccaaccttctccacattccgcccaatctgtaccggatgctggcagggaggtggcagagagctcactgggactgaggggctgggcacccaacccttttccacctgtgcttatcgcctggatctatcattactgcaaaaacctgctctgttgtgctggctggcaggccctgtggctgctggctgagggttctgctgtcctgtgccaccccattaaagtgcagttccctccggaaaaaaaaaaaaaaaaaaaaaaaaaaaaaa

SEQ ID NO: 3199 - protein, 245 aa, Homo sapiens
MAVRASFENNCEIGCFAKLTNTYCLVAIGGSENFYSVFEGELSDTIPVVHASIAGCRIIGRMCVGNRHGLLVPNNTTDQELQHIRNSLPDTVQIRRVEERLSALGNVTTCNDYVALVHPDLDRETEEILADVLKVEVFRQTVADQVLVGSYCVFSNQGGLVHPKTSIEDQDELSSLLQVPLVAGTVNRGSEVIAAGMVVNDWCAFCGLDTTSTELSVVESVFKLNEAQPSTIATSMRDSLIDSLT

SEQ ID NO: 3200 - DNA, 491 bp, Homo sapiens
gcggccgcgcggcgacaccagggcggggcccagccgcgcccgccccgccccgccccgtccccgccgcccggcgccgcacccgcctcacctcgccccgacccgccgccaccgcctcttccagctgggaggccccgccggaagtgacgccaccgcgggctgcacaggcgcaggcgcagcgcgctctcacgtgaccgcccggctggcggagggcgggggcggccgggattcccgtgcggggttggggctcgtggcggaagctccggacctccctggcccgaacggtgagcgccgccggccactgggagcggccagagcccagtaatcaggacaccaccacagggaccacgtgtgtagacccaggccccctcacctgggagtcacgtttattgaaaaagtaaaaagtgtcacagtaaaaaattcacctggggacaaagccagacctatgaggggtggcggggtcgtggagggacgggtccggccgcccctggccc

SEQ ID NO: 3201 - DNA, 456 bp, Homo sapiens
  misc_feature (116)..(116): n is a, c, g, or t
  misc_feature (325)..(325): n is a, c, g, or t
ttttttttttttttttttttttgggaaaatcatttcttttaatgacagagaaagcacaccaaatgataacagaagcctcattgggagttaccactgtacaaatcaatgcctggagncctgaactagcattagacattcacagggaagtcagctgaggttaaggaaacatccacgcagcatctctgaggatacagaagtgggaggaggaaggtgacagccgcaatgcacacgctgtgtatctgtagcttggactcttcttcaggcagttcttgttttccttccacattggatggtaggggctgggggaggtttgcaaatgatcatntggaagagaggccttgtgtatcagcctcgcagaaagagccaatactgttagacagatatcacccagatgctccatgggccatgccatgaaagcgatgtgacattgggtcctctgaacaatggttcagggaa

SEQ ID NO: 3202 - DNA, 516 bp, Homo sapiens
tttttttttttttttttcagattaaaaaagagtatataactttattttcaaacttttatttcatacacacacacacacctatgtaatgtaaaatatgagatataaaatacttctgtcaatgagacaaaaaaaagttaacaagcttttgttagcccaaatccagtatagcctagcaccatacgtgaggataaaaaactcataatatattttttacccattaattcagagactattacttaggcagccatacattctgtaagctctacaaaaaagtcaaaggatgctataaggttgttgctaaagcttatgtagaaatttttagtccaggacgtgctcctagtatcttaaacaagattctaactgcaatgctgtgccattagccatctgttgaagaaagaaatcacaggaaagctttgttcctctaagtcattcctccgtgaaatgacagaggacattacaaagggcattagatttgttcctaacttctgactccagcagcaactaccaaagaaacat

SEQ ID NO: 3203 - DNA, 385 bp, Homo sapiens
ttttttttttttttttttaatttaaagaaaacttctttattaagtaaatggacagttggtacacagatattgcaaaaatttcgaggcgggtacatgaattactgaaattcaggagacgcggggagttagcacagaagcactttcctcattcagagctcttttggctgcgagaaacagacacccaatcaaatcagcttcagcaaaatgagagaatgtatcctgacaagggacgctcacagggcctaaaggaagagtgctgggcccctggaggactgagggaagccggcaggtccctggaggcggtgcccggctgctctccaggcgcctgtgattcctctggtccctgccttgctatgcgtatcttccctctgagcagagccatttt

SEQ ID NO: 3204 - DNA, 269 bp, Homo sapiens
  misc_feature (192)..(192): n is a, c, g, or t
tttttttttttttttttttttccaagaaagataataacttctttattagggggcaattgtctgtgtacctgacaatgcatcagcgacatccatggaagagccactaggtggccacatagctaacaaaattcttgttagctagaaaactgctccaggctgctgctgtcccttttccaggtagcactaggctgncaaaatcatgactttaagtaaatttcttaaggaatttgatcaattccattcttgatgattccagatggaaatcttgg

SEQ ID NO: 3205 - DNA, 403 bp, Homo sapiens
tttactataagaatttttattaatgacagctttgcaattaaatgtacattcactaaatatggaaacaagtgagaactaacaataaaaaggagttccaagaaaattgtcacggcatgaactgaatggactcatactgggccagcactttcggtcttggcatgaacagcttcatcattccagaactttcttgatttccaaggtttgtagtaggtgcttaacaaatgccatcttgaatgaatgaagaccctttctcacagtaacaaagttgggtccaggctccttcatttttgctcagcaagatgaagctgggattaggcatgttctaaatggcagctccatcttctctttttgccacccatgtttacagaaacgagtggacaagacggcccctgccaagtgggaa

SEQ ID NO: 3206 - DNA, 297 bp, Homo sapiens
  misc_feature (257)..(257): n is a, c, g, or t
ttttaaacaaggaacaggtcttgtgccacacattgcattttaataaacttaatttaatgaagcgctgcattccacaagtacagtcagtacagtagctctcctttgggatggaaaaattacaagaagcaatgccgaggaccgtgaactgtatacagaagccttgtggatctagaaaccaacagtgtgtgaacttaggacattctcaagttttaaaacgtggccattataatatcatcacattacataaatatcacatncaccaatattcgttttgcttttttttcttttagaaccaaa

SEQ ID NO: 3207 - DNA, 1420 bp, Homo sapiens
tgaaacagcagattacttttatttatgcatttaatggattgaagaaaagaacctttttttttctctctctctctgcaactgcagtaagggaggggagttggatatacctcgcctaatatctcctgggttgacaccatcattattgtttattcttgtgctccaaaagccgagtcctctgatggctcccttaggtgaagttgggaactatttcggtgtgcaggatgcggtaccgtttgggaatgtgcccgtgttgccggtggacagcccggttttgttaagtgaccacctgggtcagtccgaagcaggggggctccccaggggacccgcagtcacggacttggatcatttaaaggggattctcaggcggaggcagctatactgcaggactggatttcacttagaaatcttccccaatggtactatccagggaaccaggaaagaccacagccgatttggcattctggaatttatcagtatagcagtgggcctggtcagcattcgaggcgtggacagtggactctacctcgggatgaatgagaagggggagctgtatggatcagaaaaactaacccaagagtgtgtattcagagaacagttcgaagaaaactggtataatacgtactcgtcaaacctatataagcacgtggacactggaaggcgatactatgttgcattaaataaagatgggaccccgagagaagggactaggactaaacggcaccagaaattcacacattttttacctagaccagtggaccccgacaaagtacctgaactgtataaggatattctaagccaaagttgacaaagacaatttcttcacttgagcccttaaaaaagtaaccactataaaggtttcacgcggtgggttcttattgattcgctgtgtcatcacatcagctccactgttgccaaactttgtcgcatgcataatgtatgatggaggcttggatgggaatatgctgattttgttctgcacttaaaggcttctcctcctggagggctgcctagggccacttgcttgatttatcatgagagaagaggagagagagagagactgagcgctaggagtgtgtgtatgtgtgtgtgtgtgtgtgtgtgtgtgtgtgtatgtgtgtagcgggagatgtgggcggagcgagagcaaaaggactgcggcctgatgcatgctggaaaaaagacacgcttttcatttctgatcagttgtacttcatcctatatcagcacagctgccatacttcgacttatcaggattctggctggtggcctgcgcgagggtgcagtcttacttaaaagactttcagttaattctcactggtatcatcgcagtgaacttaaagcaaagacctcttagtaaaaaataaaaaaaaataaaaaataaaaataaaaaaagttaaatttatttatagaaattccaaaa

SEQ ID NO: 3208 - protein, 208 aa, Homo sapiens
MAPLGEVGNYFGVQDAVPFGNVPVLPVDSPVLLSDHLGQSEAGGLPRGPAVTDLDHLKGILRRRQLYCRTGFHLEIFPNGTIQGTRKDHSRFGILEFISIAVGLVSIRGVDSGLYLGMNEKGELYGSEKLTQECVFREQFEENWYNTYSSNLYKHVDTGRRYYVALNKDGTPREGTRTKRHQKFTHFLPRPVDPDKVPELYKDILSQS

SEQ ID NO: 3209 - DNA, 388 bp, Homo sapiens
  misc_feature (11)..(11): n is a, c, g, or t
  misc_feature (44)..(44): n is a, c, g, or t
  misc_feature (134)..(134): n is a, c, g, or t
  misc_feature (307)..(307): n is a, c, g, or t
ctaactgcggnttgtaatcttggccccagtgttcagccactcgnaggggcgggggctgtggcatttcaggggctgctggtgggctgtagtggggtgggatgacctggccagagccaacgaggatactggagccnaaagtcaagtttagagaccagctgggaacgtgaatggggctcttgattttcttatcaaaatcaccactcctcccagcttggactaaatattctttctagcaagcagctttgtgagctccctgaagcccaaggaaacccttcggtggggagaaatttcatttcttgtcttgagnaggatttaagggcagcaggtgactccccctccttcgcctggccgtgttcctgcttatttttcagggcagctcttaagggag

SEQ ID NO: 3210 - DNA, 245 bp, Homo sapiens
ttttttttttttttttttttttttaggtgaaattttttttaatgatacttttgaaacccaatatatctaaaatattatttcaacacataatcaatataaaaattaaggtatttaaagttgttgtcctcttccatgcttcatacctggggtttcagagtcatgacacacttggtttggctacatctcagtagccacacatggctgggtggctgctgctgtggacagcatggacctaaagtccactc

SEQ ID NO: 3211 - DNA, 494 bp, Homo sapiens
agtaataggcaagttttaaaagaatatccttaagagagataactagttttcatttatttaacttttgcaggttggtgattttgctcattatggtcgtggagtgctgattgattcacagtagataaagctggcagtaagaaatgctaagagttgttgaagcagaaggcggctgattgtcaataagtcactacagttgcataagcagtgctgtcagaattggtttggtgcaggcaatagattttgccttcaggggttcctgtggatctgaggaaggcatcagtgttgattaacactcataactagggagtgactggtagttacttaaagcaagtaattgaccaaatggaaaaggggaagtaattaaggaaattggtaagtggaggtagtcaggaagttcttgtggttcttcacatagattttacagctttggctttcattttgtttagctaaagtcatggggacaactcttcaatttagaacttaagttgaattat

SEQ ID NO: 3212 - DNA, 478 bp, Homo sapiens
gtcggtgattggtccgcggcggaaggagctgatgccctgcaggttcttgatgaaggaggcccggtcgctgcccggtgggctgaacacctccacctggtcagagaagtgcaggccgccgtagcgccagctcagcgccacctggtccaggtagaactcgttctgcagctggctgatgaactgcggcacgaactgcttcatgtggaagagcaggatgtccgtgggggactgcatggtgacgctctccgaggtgtccagcacgaagtacacgtggatggggcagtcggtcttctctgggcagtagtagtttctctcggtagtgtccggcgagatgacctcctgctgctgggcctggatggcccccaggattccccagagcaggagcacggagcaggtgccctggagcatcttggcagcaactgtgggcctgaagtcctggtcccgaggaggctccgctcccgagcatgttgcggcaacatgg

SEQ ID NO: 3213 - DNA, 493 bp, Homo sapiens
ttggaatcttagagatttattccactggtgtgttaggaccattaaaaagacgtgggcgcccccttccgacagaggctcaccactccaggagaacctgcgggcaggctttcatcctccgcggagctacaggcttccagcggcctggggcctcgtgggtactgagctgcgtgtgggggtccaggacccgatgtcgcctgccattcggccagggcatcggcagatgtattggtccagcccccgagagacccaggaagaaggcaaggaggttcggtacgagccatctcgaatggaagaagaaggcggtcggtctgcgggagccaggccgcagagccatccgccttctgtccatgtcttctttatcttcctcgccataataattagtggtgtggacccccccacacacactttttttcggatttacttgtatggaaccgtaaacttgcaataaagcccggaggcgactgctgcggagggggcaaaagaaggtttcgtt

SEQ ID NO: 3214 - DNA, 584 bp, Homo sapiens
ttgaatttaggtgacactatagaagagctatgacgtcgcatgcacgcgtacgtaagcttggatcctctagagcggccgcctactactactaaattcgcggccgcgtcgacatacattttggtgaaagattgtcatttatgatccatggtttatttaaaaaaaaaggaaagaaaatggaaaaatatatttttaagcttacttgaatgaacaacgtaatgtgaaaaccaagactcttcctgcatgtcttttttgcattgtgttgataagattatatatagtttatagatatattatattactagtacagtgcatggtgctgtcacttggaaagcctttcaatgttgtcttcagattgttgtgatgaatatgaaacatgcagaccctcctttataaagaaaaagaccttaaaacttgaatatgagataattttacattttaaaagtttatttgattttcatattattcactttcaaagccctttcaaatagaaaaggtatgaacttttggggggataatttatgtatcgtaaacttattagaacaagatattcctgatgtattatgagttggtttaattataccacc

SEQ ID NO: 3215 - DNA, 483 bp, Homo sapiens
  misc_feature (439)..(439): n is a, c, g, or t
gagatatattttttattactgtagattacatgttgtttggctgggaatacaatacaataaactttattttgcataatgcatttcacacaagctgcatctgaaatgctttacagagcaaaactgtccaagtacaaagttttgtaataacaggagaaggaaagaaaacacaaatattagaatttgagaaagttacattggaggacattcaaaagaaactgaaatacataaagataactttaagatactaaagaagggttgggctacatatactagtaacaactaattttatatcttaattttgagatcacaataaagtcaaaagcaacaaacagtccaacagcttttcagtgaaaagatagaatagaaaatgataggtgacaaagaataacttaaatatttacagaagtgcttaaagtctaacattagagggaataatatntttgagctttagataagttatttaaattactccctcaaggagct

SEQ ID NO: 3216 - DNA, 480 bp, Homo sapiens
  misc_feature (414)..(414): n is a, c, g, or t
  misc_feature (470)..(470): n is a, c, g, or t
gaaaatttatgattggagaggtactacacaatttagaggttacatttcttgacaaatctgagttgaataaaaaagaactaaaaatataaacatagctaattcaagaatcaagatcgggtgaaactaaattaaaaacagccataaagtcccacattttccctaatttatttacctatgatattggcacatcttgttttacttaacatttgaaaaatacaaatatctcttcatatgcaaaagagcaaatgttaaatgaaaaactgaattttatatagcttcctaaatatgagccacatgcttaagcagtgaattaactttatgaatcaaatgtttaatgttaactattacaaaagcctggtatccaggtgcaatctcaccagaaaaaaatagcacctgcctttattacaataaaanaaatgggctaattccccttggacatccttaagagtggacactactttggtccagcncctaaatact

SEQ ID NO: 3217 - DNA, 380 bp, Homo sapiens
ttttttttttttttttttttttttttttttttttttttctgagtgagaatgtctttattatccttataatctgctctacaggtaaaacattaacaaattttttcccttttatttttagttgacatgtaataattgtacaaatttatggaatacagagtggtatttcaacacatgtatacaatgtatactgatcaaaccaggctaattagcatttttaatagaaccatacttatctgtggaaaggcagctacggcctaccatgcctgatgaagaaactggccggaagaagctaggtagtctgtaagcatgttactttatatcctaacagtaaggtgggatggagtgtagccaaacatccaatggaagccatcagtagcttg

SEQ ID NO: 3218 - DNA, 209 bp, Homo sapiens
  misc_feature (183)..(183): n is a, c, g, or t
cacaaactgggaggaaaactgagacctcctggtcacccgccgccggccttttagaaactcccacaagctctgccttccctccctggtcctcttcagaccccctcttagttcttcgcggctaacggctcgcgctcggggcagggtgtggagctggaacagagggctggcaaggcgcgcatcacncgaagggtggagccgctgagcacaga

SEQ ID NO: 3219 - DNA, 594 bp, Homo sapiens
  misc_feature (565)..(565): n is a, c, g, or t
aagcttgcggccgcacctggcctgtatcttgagtatttatttgtgtattttcctgcatgtggggacctctcagtggtttactggtctaacaactatatctctgaaaaaaatagctcagttttatggcatttgccaatttctgtagtgtaaatacccccactgtggcccatttcaaggggccaatgacatcaccaaatgtggagttgggaagagaggctctcttcacaatcagctttccgtggctccagcacactgtaagactccgaattttacactctcacaatgctaaggtacctctctactcctcccctctccaattcttcacatcaatgaagctttaacaagtgctggcttcctaggaaatggtttccaaaagtcagaaccagtatactaaagccaatcagtgtcactctttgaatgactgtggcacacatgttgatgtgatggaatttgccttctcaatataattaagtgaagaacttctgcatcttcctcaggcattcaaactctgactttagcattttcttccacttctcaaccttacatactacctagcacatattangaggagggaagggaagggatttttatttt

SEQ ID NO: 3220 - DNA, 459 bp, Homo sapiens
tttttttttttttttttttttttttttttgggataatcagggcttcataaaggcatcctaatttttatatctttaaagacaacctaccatgaaataagaagaatccataattataattctaaaaaccatgtaatcaacttgggtccatgaactcacgcatagcagcatcctttactcagggacacattatgttgctatgaatccttttcaaaattctttgagtttttcttcctttctacttctacctcattatatctacacctttcttaactaccttgcagtcaaaagccaaactacctgggatgctgctcctctagtttgtcttcagctaaggatagaggccaaaaaatgagggaggggaggaaaaagggagcagggataccagaaacagaaaggaagaaaaaagaatccttttattttccaccctctcttcgcccattttttttcttttcccttcac

SEQ ID NO: 3221 - DNA, 6706 bp, Homo sapiens
agcccacccgcctggctgcgcgtcccgggcccggcggctgaagaggagccgcggcgaggaacaagagtgtggtgagaggacgcggaaacacctgatatcccagcaaaggaagctgcagaggaagggtcctgccccgtgagcgaggacagcctccaggagcacagcggcttctcctaacatccccctggcagtgaattacggatgaccccgtatatgaggaggtgtggatgccgacacacggggagagctcctgagaccagcacacaggaccagtgtcctccccgtgaccttgcagttgtgtagccacaagtgggagccacagagaaggagagcccataaggggactcttttcaagacacggtgttaaatcaaggctctgaagttggggccacagccggtctcagctttctgtgttctgggggcgcggtgatatgacagcatgtgaagtgagtgggtgagcacggactcctgagagcgagggcgcacccaatacctagttatccggtactgcagagagacacctggtcagccagcgttgcaaagagggatagctagtcactcaggctgcagagagagacacctggtcacccaggctgcagaaacaaccgcagtcaactgcagctccagtcattgctggatgttggctgacgcggtcctggcgccagctggagatccattcaccaagactttctgggcagatttaaagtggctggggttcagaagttcagcaagttggacacacccctcctcgctggagaggagagggcaaaggcgaggcgggggagcagcgtgtgagattccccccttcacacacacaacaaagcgtggacacacagaagtgaaatctgatcgcgtgccaggaaaagctgtgaggctggaaaccccggagtaaggctcgaccttggccagacctgcaggctgcggaaccgggggcgcgcgggcgcagcgcagcacagcccggccatggagcacgcggtggccccctgcgtcctctacccagggactgagcccggggctgccggggagagcgagagcgagggcgccgcgtccccggcgcagacaccctgcagtctcggcgcgtccctgtgcttcagctccggggaagagtccccgccgcagtccctcgcctcagcggcggaaggcgcggccacctccccgccctccagcggtggcccgcgggtggtggagcggcagtgggaggccggcagcgcgggcgccgcgtccccggaggagctcgcgtcccctgaggagcgcgcgtgcccggaagagcccgcggcgccgtcccccgaaccgcgcgtttggcttgaggaccccgcgtcccccgaggagcccggggagcccgcgcccgtacccccggggttcggggcggtgtacggggagccggacctggtgctggaggtgtcggggcgccggctgcgcgcgcacaaggcggtgctggcggcgcgcagcgactacttccgcgcgcgcgcgtcgcgggacgtgctgcgggtgcagggagtgagcctgacggcgctgcggctgctcctcgccgacgcctacagcgggcgcatggcgggcgtgcggcccgacaacgtggccgaggtggtggccggcgcgcgccgcctgcagctgcccggcgccgcgcagcgcgccaccgacgccgtggggccgcagctgagcctggccaactgctacgaggtcctgagcgcggccaagcggcagcggctgaacgagctgcgcgacgccgcctactgcttcatgagcgaccactatctggaggtgctgcgcgagcccgccgtgttcggccgcctgtcgggcgcagagcgggacctgctgctgcgccgccgcctgcgcgccggccgcgcccacctcttggccgcggcgctcgggccggcgggggagcgcgcgggcagccggcctcagagcccctcgggggacgcggacgcgcgcggggacgcggccgtctactgcttccacgcggcggccggagagtggcgcgagctgacgcggctgcccgagggcgcgccggcgcggggctgcggcctgtgcgtcctctacaactacctcttcgtggcgggcggcgtggcgcccgcgggccccgacggccgcgcgcgcccgtccgaccaggtcttctgctacaacccggccacggacagctggagcgccgtgaggcccctgcgccaggcgcgctcgcagctgcggctgctggccctggacggtcacctctacgccgtgggcggcgagtgcctgctcagcgtggagcgctacgacccgcgcgccgaccgctgggcccccgtggcgccgctgccccggggcgccttcgccgtggcgcatgaggccaccacctgccacggcgagatctacgtgtccgggggctccctcttctatcgcctgctcaagtatgacccgcggcgcgacgagtggcaggagtgcccgtgcagcagcagccgcgagcgctcggccgacatggtggctctcgacggcttcatctaccgcttcgatctgagcggcagccgcggcgaggcgcaggcggcggggccgagcggggtcagcgtgtcccgataccactgcctggccaagcagtggagcccgtgcgtcgcgcccctgcgcctccccggcggccccacgggcctgcagcccttccgctgcgccgccctggacggcgccatctactgcgtgagccgcgcgggcacctggcgcttccagcctgcccgggaaggcgaggccggcggcgacgcaggccagggcggcggcttcgaggcgctgggcgcccccttggacgtccggggtgtgctcatcccgttcgctctcagcctgcctgagaagccgccccgaggggagcagggcgccccgtaggccggcggggtcggcgggcgtctccctcggcaggggtttgcggggcccaggtccctttgggcccgcggaggaggacgtggtggggagtcggggccgctggccacgctggtggtttggacacttcgaaggagccccgaggacgctctcagggccgctttcgctttgctttccttttgcttgtctttgcttctgggggtggatgccttgagacccaggaggtgtgcggatgggtcccttgacagacaggacacagagaaggctgtgggatccaaagggtcagcctcagggtacagtgggggttcctgaggcagcctgcagccggccccggggtgtcccgaaccccgcagagcaccgaggctgtgcgcaggagcctgggaccctcaagtaggtcgccgcgaactatcgggggaagcacgcagagaggggtcacgccttttatttttggcttgagatttaaaattataactgataagtaaagctctttctgatttagttgaaaatttcgtaccatgtgctcgctttggttggctcaactccaaaaagagtaatttaataagcattaaaggtaaaatctttgattaccagtaaggtttcttgttcaatatgcattggaagtatttccttccccacaccattgctactcaaactcacatgcctagagcagctccgtctcactgttggaccgagggggctttcatattttcagttgaaaggatgttaactgatgtagcgatgatttaccattatttaaattttaagtcttcagtggctaaatgtgaccaaacagcacatcataagtaggaaaaacttaccagggtgcttgtctatctaaaaagcaatttttgatagtccactctgtatgcccagccgctttcataatctggaacgagataaaatattcctaaaaagcggggaaaatcattttgctttgacagttctataaaaaaaagtgtaggcacattttaaacccactgtatatgatgttttcaatgtggatcgtgtagttctgatgagggagattaatttttacaatcagtattctaagtgtggccgagtgacagtgggcatagatttataacaaggaagtgacgtgcttatcaccatagatttgcaagtaaactgcatgtatttaattgtattgaattgagttccaaaataccctaatagaattaacacgaggctcactgcattgacagggtatgaggattaaaaacaaatcagttgggtcgtttctcatttaacattttacttttcaagtgtgtatacagaggacttactattatgactttgaggatgagatccatgctcacaaatagaggcgaacatttgaactccgaatccaacccattttcttactgtaagaggaaaagttactggaacgtaactagttgaaatcctgcctactttaatattatttgtttgttaatccagtaatgggaactgccatctctgtagaaatcagtgggtaattgaaaaataggttatgctttttaaagagtctgtggttatgagaggtctcagttaagtgtgtttagaagtgatcagcttgaaccttatgcatgactcgggggctggaatttatgatctgggttacggtatgttctggggacgtgtctgcttgcccatggttactcatgaactgaggggatagcttggcaacttggttaatcatcttgggaaagaaaaacagacttcatatcgcctgacttgattggccttttataggagtatactggagaaatggttgtagaaacagtatttacagcaaaaggaaacaaataatgttcattttaagcaatgtaccattcacactgtcctgccttttcctctagaattttattaatggtagaaatttttatatgaaatgggaccaggaccaggctaatattttcagtccttaaatatcaaactcatatgctgttatcactgtgattttacttgtgaaatcattcctgtaatgtttagtgtttgaaaatgaaatattgaaattaggtttccagagtaacactgtccccggaaaaggatatgagaagtggtggatgttggatgggggtggttgcacagtcctgtgcggttcccatggctttccagcgtttcatttagtgaaggaatgctcacactagatgtagcacagcttcctgtggggcccggcagcaaagccccaggtgctccctgtcacctcacaacaaaatgcactaagaaacgtaaagaataagaggaattaatacccaccattaaaggatgtccggccaacctattgtggaaatttatagaatagtatacaccacagttctgaatagtgatatcacataaaaatacatactagaggacctgccaagccatgagcagtgtttttgctttttgggggccagtccctggggtgtggagccgctagggtttgcacccatgaaacagaaaagccacaccctccaaggtgtggctttcattttgggactgctgcagggagggcagaggcattgctgagactgcctggcaacggctgatgccccaggtaggaccttttccatttcaaagtggtgttctaagtctgcgtccaacactgtgtaggaaaaaggttggtgcaaaaatattcctggtcatccacccattaaaatagttagatgaggctattgccttgatgacagctgtccacactcctcatgaaattaacccgtatgccggggcatttccaaatgtctgactcgtgaaattaacccatacgcaggggcctttccaaatgtctgaaaaggcagtggtgtcttttggggaaaatgttatgcatggaagcctgaccttttgcttagttgacagcaatcccttctgtattgccaatcaaggttcatttgagatgcagaggaatgagcttgagccttcctccttttccttccggttttattcttcctcttgggaacatccctccactccgcactgcttcctgcagctttgtagagctggatttggaacttcgggatttggtttctgagtctgtggaggcaccgacttctcctgtaagaaaatgaatgttgtggaaattctttggctacttaactaaaactcgtgactgtataagtttggctacaaataagtaagaaattaatcatctgctctgtttctgctaatttctggtgtcacttcagtaattctggtagcagccgttgaatctgtcagtctcttaggtaacttcctgtaaacgatttggaaataggatgttttcaacgttcttttgtcttttgctgaagtcaggatagattcaagacataatctcttgtaagatctaaatagagcaaatgtaaacaaaagtgcatttttgtattcttgttaattttagatgctttcctagcttacaaaaagttctatttttgggttaaaaatcaatcaactttctgatatttccccttctgcaatgttattgttcataagaaaacacgagctgaaaatggaaatctgcagttgtttcagttgtcttgaatttctttcagtggccacatcatttccacgttttccacatccgggaggaagcctggactgtgcagccttcgggcacccggcacagacactgtgctggcaggagcttcagacacgccaagtggatggatttggattgaacgcatatgaaacaggagacgggttctcatgtgagatcaaagctcctccaaagcctgttcaagctctaagcgattctcaaatgttaccatttattaaaggtaaactacacctgttgaaggccaagttcagggcagctgttgtgatctgtgtagttaatgtatttattaatgcttgacttttaaaatcctgggcataaatagtgcagagcctcgtatgtttgtcagttcatgccgagatgaaataaatcacgcagaaagtgccagtc

SEQ ID NO: 3222 - protein, 623 aa, Homo sapiens
MEHAVAPCVLYPGTEPGAAGESESEGAASPAQTPCSLGASLCFSSGEESPPQSLASAAEGAATSPPSSGGPRVVERQWEAGSAGAASPEELASPEERACPEEPAAPSPEPRVWLEDPASPEEPGEPAPVPPGFGAVYGEPDLVLEVSGRRLRAHKAVLAARSDYFRARASRDVLRVQGVSLTALRLLLADAYSGRMAGVRPDNVAEVVAGARRLQLPGAAQRATDAVGPQLSLANCYEVLSAAKRQRLNELRDAAYCFMSDHYLEVLREPAVFGRLSGAERDLLLRRRLRAGRAHLLAAALGPAGERAGSRPQSPSGDADARGDAAVYCFHAAAGEWRELTRLPEGAPARGCGLCVLYNYLFVAGGVAPAGPDGRARPSDQVFCYNPATDSWSAVRPLRQARSQLRLLALDGHLYAVGGECLLSVERYDPRADRWAPVAPLPRGAFAVAHEATTCHGEIYVSGGSLFYRLLKYDPRRDEWQECPCSSSRERSADMVALDGFIYRFDLSGSRGEAQAAGPSGVSVSRYHCLAKQWSPCVAPLRLPGGPTGLQPFRCAALDGAIYCVSRAGTWRFQPAREGEAGGDAGQGGGFEALGAPLDVRGVLIPFALSLPEKPPRGEQGAP

SEQ ID NO: 3223 - DNA, 499 bp, Homo sapiens
  misc_feature (65)..(65): n is a, c, g, or t
ttccttgtcttttgaaaagtctgtttattaaaacctaccaaaaacactgcttggaaatggcagtnttatataatcacatccacagcacccattcaatcaaagttggcaacggattgaggagagaagtccatataagtgcagcggctggtgctcagtctttctaaattcctttatctgagtcagtccagaaataaaaaataaaaaatattaataaaaaaaatattagcggtggaatctttaggcatcgtccaccctgaatggcagccgtcaaagcctgggtacgcggccgggcctggctcggcggcctcgctggctgggcccccgctctgctcccatttcgcccgcccgcccgcgacccgactcggccggggcctctcgccactcctcatcggacgttccccctctccctctgctccttcccgatccttttattttcaaagttactttgaggatactttccttttggctttgctattcagtctgttagtttcagaagctg

SEQ ID NO: 3224 - DNA, 2771 bp, Homo sapiens
  misc_feature (2658)..(2658): n is a, c, g, or t
  misc_feature (2660)..(2660): n is a, c, g, or t
  misc_feature (2753)..(2753): n is a, c, g, or t
gtactcgccacggcacccaggctgcgcgcacgcggtcccggtgtgcagctggagagcgagcggccaccgggagcccccggcacagcccgcgcccgccccgcaggagcccgcgaagatgccccggcgcagcctgcacgcggcggccgtgctcctgctggtgatcttaaaggaacagccttccagcccggccccagtgaacggttccaagtggacttattttggtcctgatggggagaatagctggtccaagaagtacccgtcgtgtgggggcctgctgcagtcccccatagacctgcacagtgacatcctccagtatgacgccagcctcacgcccctcgagttccaaggctacaatctgtctgccaacaagcagtttctcctgaccaacaatggccattcagtgaagctgaacctgccctcggacatgcacatccagggcctccagtctcgctacagtgccacgcagctgcacctgcactgggggaacccgaatgacccgcacggctctgagcacaccgtcagcggacagcacttcgccgccgagctgcacattgtccattataactcagacctttatcctgacgccagcactgccagcaacaagtcagaaggcctcgctgtcctggctgttctcattgagatgggctccttcaatccgtcctatgacaagatcttcagtcaccttcaacatgtaaagtacaaaggccaggaagcattcgtcccgggattcaacattgaagagctgcttccggagaggaccgctgaatattaccgctaccgggggtccctgaccacacccccttgcaaccccactgtgctctggacagttttccgaaaccccgtgcaaatttcccaggagcagctgctggctttggagacagccctgtactgcacacacatggacgacccttcccccagagaaatgatcaacaacttccggcaggtccagaagttcgatgagaggctggtatacacctccttctcccaagtgcaagtctgtactgcggcaggactgagtctgggcatcatcctctcactggccctggctggcattcttggcatctgtattgtggtggtggtgtccatttggcttttcagaaggaagagtatcaaaaaaggtgataacaagggagtcatttacaagccagccaccaagatggagactgaggcccacgcttgaggtccccggagctcccgggcacatccaggaaggaccttgctttggaccctacacacttcggctctctggacacttgcgacacctcaaggtgttctctgtagctcaatctgcaaacatgccaggcctcagggatcctctgctgggtgcctccttgccttgggaccatggccaccccagagccatccgatcgatggatgggtgcatctcagaccaagcagcaggaattcaaagctgcttgctgtaactgtgtgagattgtgaagtggtctgaattctggaatcacaaaccaagccatgctggtgggccattaatggttggaaaacactttcatcggggctttgccagagcgtgctttcaagtgtcctggaaagtctgctgcttctccaagctttcagacaagaatgtgcactctctgcttagtttgcttgggaaactcaacttctttcctctggagacggggcatctccctctgatttccttctgctatgacaaaacctttaatctgcaccttacaactcggggacaaatgggacaggaaggatcaagttgtagagagaaaaaagaaaacaagagatatacattgtgatatattagggacactttcacagtcctgtcttctggatcacagacactgcacagaccttagggaatggcaggttcaagttccacttcttggtggggatgagaagggagagagagctagagggacaaagagaatgagaagacatggatgatctgggagagtctcagtttggaatcagaattggaatcacattctgtttatcaagccataatgtaaggacagaataatacaatattaagtccaaatccaacctcctgtcagtggagcagttatgttttatactctacagattttacaaataatgaggctgttccttgaaaatgtgttgttgctgtgtcctggaggagacatgagttccgagatgacccaatctgcctttgaatctggaggaaataggcagaaacaaaatgactgtagaacttattctctgtaggccaaatttcatttcagccacttctgcaggatccctactgccaacctggaatggagacttttatctacttctctcttctctgaagatgtcaaatcgtggtttagatcaaatatatttcaagctataaaagcaggaggttatctgtgcagggggctggcatcatgtatttaggggcaagtaataatggaatgctactaagatactccatattcttccccgaatcaacacagacagtttctgacaggcgcaactcctccattttcctcccgcaggtgagaaccctgtggagatgagtcagtgccatgactgagaaggaaccgacccctagttgagagcaccttgcagttccccgagaactttctgattcacagtctcattttgacagcatgaaatgtcctcttgaagcatagctttttaaatatctttttccttctactcctccctctgactctaagaattctntnttctggaatcgcttgaacccaggaggcggaggttgcagtaagccaaggtcatgccactgcactctagcctgggtgacagagcgagactccatntcaaaaaaaaaaaaaaaa

SEQ ID NO: 3225 - protein, 354 aa, Homo sapiens
MPRRSLHAAAVLLLVILKEQPSSPAPVNGSKWTYFGPDGENSWSKKYPSCGGLLQSPIDLHSDILQYDASLTPLEFQGYNLSANKQFLLTNNGHSVKLNLPSDMHIQGLQSRYSATQLHLHWGNPNDPHGSEHTVSGQHFAAELHIVHYNSDLYPDASTASNKSEGLAVLAVLIEMGSFNPSYDKIFSHLQHVKYKGQEAFVPGFNIEELLPERTAEYYRYRGSLTTPPCNPTVLWTVFRNPVQISQEQLLALETALYCTHMDDPSPREMINNFRQVQKFDERLVYTSFSQVQVCTAAGLSLGIILSLALAGILGICIVVVVSIWLFRRKSIKKGDNKGVIYKPATKMETEAHA

SEQ ID NO: 3226 - DNA, 292 bp, Homo sapiens
tttttttttggatattatttcatctatctctcaggacaatcttgtaagaccatattttcctcattttagagatgaagacaaaaatgaaaacaagttgaatactttgccctaggttaatgagctagtaaacagccatttcaacaggcaggatttcaacttaggtttgctagactctaaaaaatcactctctaacctttggtttaaaactcagaccttaaaattactatgcatataaaataacatatataacatatataaatgaatgactcaaaagcacctcccacccaacata

SEQ ID NO: 3227 - DNA, 534 bp, Homo sapiens
aattgtggtttttgctacataaaaaactaatggaaatgatctgcctgttcctgtagtttacagattatatgcttcagaactgacgatatatatttaggctgcttttctgtgtggcacatttaaatgaaaatgaactcggggtgagccaccatggttgctaggcaatagagcgggttgatagagcacggtattaaactgaacccacattggtgttttacttaacatctatttgcttagcacctttgtcatctgtggtgtcatagaagggaaaggaggaggagacaggcagagtctggttatctgcagagactcaaacaagtaggagaaataatcatcccaaacaccaaagtgacatgagcattttcaaaaatttgaggttgcagcacagtcaactcatttaatgaagaacatgcaagacctgaagaaatgcataagcatagcagacatattcatggatgtggtagcaagaggaactaaagagattccccaggctgggttttgctctggtggttccagaaaaaaaaaaaaaaaaag

SEQ ID NO: 3228 - DNA, 298 bp, Homo sapiens
ttttatgctagtcctgataatcagaaaaatactttattccactacattacttaattatttcaacaagagggaaagtacagtcgcactggctgtctaacgtacacatgctggtgggcacgaaggctggaggactggaagggggcagagcgggtggctgggtgctcatctttcaggtgtcactgccccaaggtgagcaggtcccgcaggaggcatggaagtcgcggtaaaaacacaactttgtctttgaaatgacttcaaaacttcacactaaacactgcctctgcagcaggctggagat

SEQ ID NO: 3229 - DNA, 672 bp, Homo sapiens
ggcggacatttgccatctgcaaagagagtgcagtcagcacattacagaagaggaagatgatgatcctgatgtttattactttgaatcagatcatgtggcactgaaacacaacaaagattatcagagactattacagacgattgctgtactcgaggctcagcgttctcaagcagtccaagaccttgaaagtttaggcaggcaccagagagaagcactgaaaaatcccattggatttgtggaaaaactccagaagaaggctgatattgggcttccatatccacagagagttgttcaattgcctgagatcgtatgggaccaatatacccatagccttgggaattttgaaagagaatttaaaaatcgtaaaagacatactagaagagttaagctagtttttgataaaggtttacttgctagaccaaaaagtcctttagatcctaagaaggatggagagtccctttcatattctatgttgcctttgagtgatggtccagaaggctcaagcagtcgtcctcagatgataagaggacgcttgtgtgatgataccaaacctgaaacatttaaccagttgtggactgttgaagaacagaaaaagctggaacaggtactcatcaaataacctcctgaagaagtagaatctcgacgctgggagaagatagcagatgaattggg

SEQ ID NO: 3230 - DNA, 712 bp, Homo sapiens
tttttttttcttttttgcttggataactcttaggcaatccgtttccaggtcttcacattccataggtactccttcctaatctgtgtgtttaatccatgggttttcaaaacacatggattaaaattttacttatttgaggatcagagtgtattatggataaggtagtaaaaacttattttatcaagccataccatgaaatactccaattgcagtcaatcctcacaatatttcatcttataaaatactgtttctatctgctgttaacaagaaataaggaacaaatttatgatgaaaaattatagatgtctatttaaagatgtgcagggagttacataatttaaaaaacaattatttgggtctaggaacagaagagtttgaagaccactgatgtagtatatgggagatttgaaacattttttaacttttttttctttttgagacggaatgtcgcttcactgcccaggctggagtgcagtgatgtgatctcggctcaatgcaacctctgcctccagggttcaagcaattctcctgtctcagtctccctagtagctcagattgttacaggcgtgtgcaccacgctggccaattccctgtatttttaaagagacagtgtttcacatgttggacaggcagtctcgaactcctgacctcaggtgatcaacgccctcggcctcaaagtgcttgggtcacaggctgaggcaccgcacctggc

SEQ ID NO: 3231 - DNA, 341 bp, Homo sapiens
gacgcagaggtgatagatggcggcttctcaggcggtggaggaaatgcggagccgcgtggttctgggggagtttggggttcgcaatgtccatactactgactttcccggtaactattccgggtatgatgatgcctgggaccaggaccgcttcgagaagaatttccgtgtggatgtagtacacatggatgaaaactcactggagtttgacatggtgggaattgacgcagccattgccaatgcttttcgacgaattctgctagctgaggtgccaactatggctgtggagaaggtcctggtgtacaataatacatccattgttcaggatgagattcttgctcacc

SEQ ID NO: 3232 - DNA, 418 bp, Homo sapiens
ttttttttttttttttttttttttttcttatcaaaaatattttatttacaaaaaattaattatactatacatcctatactggaaatacattgaataattgctaaaataaatacaggcaattaattcaactttttataaaaatgagagaatttgacatttgaatgttatcaaagcttaacttaaaacataaatagttaaaaaggcaaactcaagttttcatctcatttattggcatggggtgttttgttttccacaagctctccaatcagggagagtcttgagtctcaaatgtacctttttgtactctgaaggtaggatgtgcagctttttcttaggcaggatagatgtaacatagatgactgcataaaaaagaggcagaaaggcaggaagcccattttttttttaacacttctccatg

SEQ ID NO: 3233 - DNA, 462 bp, Homo sapiens
ggcctgtcggggtctttggagcctcatctcagggcctcgcggccgctggcggccctgaacgccggttctgagtcccgccttgtgctgctgttggagcggccggcggccaggcaggaacgggcgcgggagccctgggaaaggcgcgtgtggaaacgcagcccctgagcccaagggccgtctccttgaggaccccacggcccacagaaagtggccggcggccaggtaggggatcttctccgctgaagagcacgggctcacctctgataactcgcccctgaatagcttttagctcattataataccaaaaaaaaaaaaaaaaacaaacaaaaaccacatccctggggagagattccagatgctaatgacacactccagcgcactagtgtgtggggtcacggtgcctgcgtgccctgaggacttcccaaaacgtgcttactagtaaggcccctgcctgggccgttc

SEQ ID NO: 3234 - DNA, 376 bp, Homo sapiens
ttttttttttttttttttaaatacagctattttgaattctctgtctgaaacatcacatatctctttttctccaggatttatccccagtgccttatttagttcacttggtgaggtcatgttttcctggatggtgttgatgctagtagatgttcttcagtgtctggacattaaaatcttgggcatgcagcaccatatgagaagtttaaaaaataaaatttaaagagagaaaaggtgagtatttattgtagtcttcactgtctgggattatttgtagctgtctttcttgggaaggcttttcacatatttgaaaagagttgggtgttgtgatctaagccatatctgctttatggggcacatatacccaataatgctgtaa

SEQ ID NO: 3235 - DNA, 679 bp, Homo sapiens
gggggaagtcttttgagaatatttgttctcttattttttgtttgtttgttgctggcaaaaaaaaaagtaactttaaaaactcagaaaagccactgaactgtattttgtgaccttatgattagttttatctttcaactgatttttattgttacttttactcaatatcaacagtacttcaatagatatttattagttatgttcaatctaatgacttaaaacagttgaaaaggaggaaaatcaactccagtccacacatacagtcatgttacattaagatgtcatgttgtatgtcacacagtttctagattgatttctcttgtgtataagttataacatcaaaaatgccaaagggtatataaaataagctacaataatattcaacagaacttaacctggaccttatgttgtaataatttattcatattagctgtagtcttctgtatttatattttcagtatttattatgaatgacatggaaattcgtgtatttattgtggctttttattgcagtgtgtatatatatataacaaataagcatttttaagtcttatccttaagtttcttttattagtggcacttgtattatgctgtactttttattacatattgtacaatatcttgtccatttgtttgcagcagagaaaaaccggtttctaagttgtaaaaaaaaaaaaaaaaa

SEQ ID NO: 3236 - DNA, 6160 bp, Homo sapiens
ctcgcgaggagagcggagcaggcgcgcggcccaggcggaggagcgccgactctggagcagccggagctggaagaggaggaggaggagaggcggcggggaaggaggaggagggggagagtcgctcccgccgggcgagcatggggcgcctggcctcgaggccgctgctgctggcgctcctgtcgttggctctttgccgagggcgtgtggtgagagtccccacagcgaccctggttcgagtggtgggcactgagctggtcatcccctgcaacgtcagtgactatgatggccccagcgagcaaaactttgactggagcttctcatctttggggagcagctttgtggagcttgcaagcacctgggaggtggggttcccagcccagctgtaccaggagcggctgcagaggggcgagatcctgttaaggcggactgccaacgacgccgtggagctccacataaagaacgtccagccttcagaccaaggccactacaaatgttcaacccccagcacagatgccactgtccagggaaactatgaggacacagtgcaggttaaagtgctggccgactccctgcacgtgggccccagcgcgcggcccccgccgagcctgagcctgcgggagggggagcccttcgagctgcgctgcactgccgcctccgcctcgccgctgcacacgcacctggcgctgctgtgggaggtgcaccgcggcccggccaggcggagcgtcctcgccctgacccacgagggcaggttccacccgggcctggggtacgagcagcgctaccacagtggggacgtgcgcctcgacaccgtgggcagcgacgcctaccgcctctcagtgtcccgggctctgtctgccgaccagggctcctacaggtgtatcgtcagcgagtggatcgccgagcagggcaactggcaggaaatccaagaaaaggccgtggaagttgccaccgtggtgatccagccatcagttctgcgagcagctgtgcccaagaatgtgtctgtggctgaaggaaaggaactggacctgacctgtaacatcacaacagaccgagccgatgacgtccggcccgaggtgacgtggtccttcagcaggatgcctgacagcaccctacctggctcccgcgtgttggcgcggcttgaccgtgattccctggtgcacagctcgcctcatgttgctttgagtcatgtggatgcacgctcctaccatttactggttcgggatgttagcaaagaaaactctggctactattactgccacgtgtccctgtgggcacccggacacaacaggagctggcacaaagtggcagaggccgtgtcttccccagctggtgtgggtgtgacctggctagaaccagactaccaggtgtacctgaatgcttccaaggtccccgggtttgcggatgaccccacagagctggcatgccgggtggtggacacgaagagtggggaggcgaatgtccgattcacggtttcgtggtactacaggatgaaccggcgcagcgacaatgtggtgaccagcgagctgcttgcagtcatggacggggactggacgctaaaatatggagagaggagcaagcagcgggcccaggatggagactttattttttctaaggaacatacagacacgttcaatttccggatccaaaggactacagaggaagacagaggcaattattactgtgttgtgtctgcctggaccaaacagcggaacaacagctgggtgaaaagcaaggatgtcttctccaagcctgttaacatattttgggcattagaagattccgtgcttgtggtgaaggcgaggcagccaaagcctttctttgctgccggaaatacatttgagatgacttgcaaagtatcttccaagaatattaagtcgccacgctactctgttctcatcatggctgagaagcctgtcggcgacctctccagtcccaatgaaacgaagtacatcatctctctggaccaggattctgtggtgaagctggagaattggacagatgcatcacgggtggatggcgttgttttagaaaaagtgcaggaggatgagttccgctatcgaatgtaccagactcaggtctcagacgcagggctgtaccgctgcatggtgacagcctggtctcctgtcaggggcagcctttggcgagaagcagcaaccagtctctccaatcctattgagatagacttccaaacctcaggtcctatatttaatgcttctgtgcattcagacacaccatcagtaattcggggagatctgatcaaattgttctgtatcatcactgtcgagggagcagcactggatccagatgacatggcctttgatgtgtcctggtttgcggtgcactcttttggcctggacaaggctcctgtgctcctgtcttccctggatcggaagggcatcgtgaccacctcccggagggactggaagagcgacctcagcctggagcgcgtgagtgtgctggaattcttgctgcaagtgcatggctccgaggaccaggactttggcaactactactgttccgtgactccatgggtgaagtcaccaacaggttcctggcagaaggaggcagagatccactccaagcccgtttttataactgtgaagatggatgtgctgaacgccttcaagtatcccttgctgatcggcgtcggtctgtccacggtcatcgggctcctgtcctgtctcatcgggtactgcagctcccactggtgttgtaagaaggaggttcaggagacacggcgcgagcgccgcaggctcatgtcgatggagatggactaggctggcccgggaggggagtgacagagggacgttctaggagcaattggggcaagaagaggacagtgatattttaaaacaaagtgtgttacactaaaaaccagtcctctctaatctcaggtgggacttggcgctctctcttttctgcatgtcaagttctgagcgcggacatgtttaccagcacacggctcttcttcccacggcactttctgatgtaacaatcgagtgtgtgttttcccaactgcagctttttaatggttaaccttcatctaattttttttctcccactggtttatagatcctctgacttgtgtgtgtttatagcttttgtttcgcggggttgtggtgaggaaggggtgatggcatgcggagttctttatcttcagtgagaatgtgcctgcccgcctgagagccagcttccgcgttggaggcacgtgttcagagagctgctgagcgccaccctctacccggctgacagacaacacagacctgtgccgaaggctaatttgtggcttttacgaccctaccccaccccctgttttcaggggtttagactacatttgaaatccaaacttggagtatataacttcttattgagcccaactgctttttttttttttttttttgcttctctgccccttttccatttcttttgtatttgttttctgtgagagcactgaaatggcagccctggaatctacaatttggctctccactgagcaccttatcttgccaccttagccttaagaatgaatatgaagaaaaatacacagccacctctgtccagggcagtaagaagggctgcaaggaaggggaggatggggacaaggaaaggatcagatacctgctccagtagttgtgaggccactgtgtctcaggggactccaggaggagcagaagagggatcccacgaagttattcttacgcagctggggccaggagggtcagagtggtgccaggtgcaagttaggctaaagaagccaccactattcctctctcttgcccattgtggggggcaaaggcattggtcaccaagagtcttgcagggggacccacagatatgccatgtccttcacacgtgcttgggctccttaacctgaaggcaaattgctacttgcaagactgactgacttcaaggaatcagaaattacctagaagcaccatgttttttctatgaccttttcagtccttcaggtcattttaaggtccactgcagggggttagtgagaaagggtatactttgtggtatgttttgctttcctaatagggacatgaaggaaacccagcaatttgctgttatgtgaatggcctgtagagcagagtcaagagcggtgtgctttgcccgactgctcccatcaggaataggagagtagacagagatcttccacatcccaggcttctgctgctgctttaaaagctctgtccttggagcctcccgctccctgaagtgtctcgccccctgcacagcactggcctttcggaagcatcccagtagggttttctgaggctcgctggtgactcatgccctaattgcaatcctctgcttttatcttgactttgaaggatctaacactgctctctcttccaaaggggaaaaaaagattcatttgttttgagcaataaactaatacaaaatgatggccattcatgtgcagctctttgtcaccatgggccggatgagttgtgctcctcctggctcaccatttccccctgctcccccacagccggttctgcacttatcaccgagtcgcccctggaagcagattcccattgagttttccccaccaaggggaccatgcacatggtagaaacattagattctgcattgacagtagcctttccttggcccgggcctgtggtgggaagacgggcaacaagtataccccaccagggcctgagtgactagaggaagaggacgaggccttgttggcactagatttgggtattttctgcatgtcataacatatcctaactgctatttcagaagaggcagcttgtaggtgattgtacaagtgagaattaaagagagaacagatatttaaacaggtgctgtattagtaacagccagtgccctttcagcccttgcatctattaaaaggagattcaggattttattggcacaggcccttcttagtaggaagaaagggtgcttagctttggacctgaccgggtgtgtgtaaaaccatggactgagtcacagcagacactcgatggtggtaaatgtgatgggtgcttacacactgtaccttttcctttcatactgatgctgcagttcagggctggagttgttaaggcattgacctccacccacctgccccatgtccactgggctgcccaagctgcatgtcacctgagggctggcaggaaggggcgagaaatcccagggcattgtaccaaggacctagttccttctagggatataaatttccaggaatgtgtatttttaatgtggtgagatgcactcttttgttgtaccaaatagggctccccaccccacccctgcgacaagtgctcttctagaacaggttcctaccagcagcactggtgtgaatgaaagagagacccagccgcgtctcacacaggtggaattgcacttcttaacaaaaaggaactttataaaagtttgggattttttttcctaatcataaaaatagccccagaaagagcctaagctatgttcagatagaagcctcgaaattcctgtaaattgtttactttatgatgtttacatacacgtttcactttgaaaaaaaatgcaaatcgactttttaacaactgttgagatgtttcatgggacagtagaactctgactcaccaactgggctaaattttaatttaaaaatgtatttatttgagtgtctttccccccctcaccctcaccatctgaggggctccctgagatcttggtagaggaggcccctcctgcccagaccttcgtttgtttccccggtggcccttgcttcttgctttgcagactgcctgcagccatgattttgtcactgacatctgtgagccaaagactgagcctttttggcaggaataataagcaatactacacaacttgctactttcagaaaacttttttttagcttcaccgatgacaacagaggaagaagggaactgggatttgggtaagttctcctccactgtttgaccaaattctcagtgataaatatgtgtgcagatccctagaagagaaaacgctgactttctttttaagtgtggcacataaggatctgcagaattttccgtagacaaagaaaggatcttgtgtatttttgtccatatccaatgttatatgaactaattgtattgttttatactgtgaccacaaatattatgcaatgcaccatttgttttttatttcattaaaggaagtttaattt

SEQ ID NO: 3237 - protein, 924 aa, Homo sapiens
REESGAGARPRRRSADSGAAGAGRGGGGEAAGKEEEGESRSRRASMGRLASRPLLLALLSLALCRGRVVRVPTATLVRVVGTELVIPCNVSDYDGPSEQNFDWSFSSLGSSFVELASTWEVGFPAQLYQERLQRGEILLRRTANDAVELHIKNVQPSDQGHYKCSTPSTDATVQGNYEDTVQVKVLADSLHVGPSARPPPSLSLREGEPFELRCTAASASPLHTHLALLWEVHRGPARRSVLALTHEGRFHPGLGYEQRYHSGDVRLDTVGSDAYRLSVSRALSADQGSYRCIVSEWIAEQGNWQEIQEKAVEVATVVIQPSVLRAAVPKNVSVAEGKELDLTCNITTDRADDVRPEVTWSFSRMPDSTLPGSRVLARLDRDSLVHSSPHVALSHVDARSYHLLVRDVSKENSGYYYCHVSLWAPGHNRSWHKVAEAVSSPAGVGVTWLEPDYQVYLNASKVPGFADDPTELACRVVDTKSGEANVRFTVSWYYRMNRRSDNVVTSELLAVMDGDWTLKYGERSKQRAQDGDFIFSKEHTDTFNFRIQRTTEEDRGNYYCVVSAWTKQRNNSWVKSKDVFSKPVNIFWALEDSVLVVKARQPKPFFAAGNTFEMTCKVSSKNIKSPRYSVLIMAEKPVGDLSSPNETKYIISLDQDSVVKLENWTDASRVDGVVLEKVQEDEFRYRMYQTQVSDAGLYRCMVTAWSPVRGSLWREAATSLSNPIEIDFQTSGPIFNASVHSDTPSVIRGDLIKLFCIITVEGAALDPDDMAFDVSWFAVHSFGLDKAPVLLSSLDRKGIVTTSRRDWKSDLSLERVSVLEFLLQVHGSEDQDFGNYYCSVTPWVKSPTGSWQKEAEIHSKPVFITVKMDVLNAFKYPLLIGVGLSTVIGLLSCLIGYCSSHWCCKKEVQETRRERRRLMSMEMD

SEQ ID NO: 3238 - DNA, 477 bp, Homo sapiens
  misc_feature (86)..(86): n is a, c, g, or t
  misc_feature (139)..(139): n is a, c, g, or t
  misc_feature (142)..(142): n is a, c, g, or t
  misc_feature (198)..(198): n is a, c, g, or t
  misc_feature (203)..(203): n is a, c, g, or t
  misc_feature (375)..(375): n is a, c, g, or t
  misc_feature (394)..(394): n is a, c, g, or t
  misc_feature (416)..(416): n is a, c, g, or t
  misc_feature (449)..(449): n is a, c, g, or t
  misc_feature (457)..(457): n is a, c, g, or t
  misc_feature (477)..(477): n is a, c, g, or t
ggttcctcttctgggtcttccagatcccggcccccttccccgagtacgtcactgacctgtgcatctgcatcaacagcagcgccaanccatcgtctacttcctggccgggagggacaagtcgcagcggctgtgggagccntcnagggtggtcttccagcgggccctgcgggacggcgctgagctgggggaggccggggnagcangcccaacacagtcaccatggagatgcagtgtcccccggggaacgcctcctgagactccagcgcctggaggaggcaggggcaggaagcggcctccaagacccttcgccttgggacaggaatgggcacctgcttctgagtccatacaggagaagaaagatctgtttactctccntcgggcctccttctcactngggctggggacttccaggggtngctgggagacttggcaaccaccagcaaacagancctgtggncctgcccgggttccccaaan

SEQ ID NO: 3239 - DNA, 456 bp, Homo sapiens
ttcgttgcaatgtcattgcaaagctcatccagtcttctgtccatgtgtccagcttgaattagttctgcatctctctttagccgtctatatctctcctgggtttcctttatcactttctttagttcttcaactcgctcagcagtcaatttccgaacaataacatcttcaacagtttccaccacttctcccttttcacctcgtttccgttttggtgtctcagtggtctctaaaagctccgagtactgggaagcacaatgtttttgagagaaccagtctggagggcggccaggttctgcaaagggcttgattgctctgctaactgatacccaattttgatcgccacttctcatgacagaagatgctaaacatagcttctctcggatggaccatggctctgtggggccagtgcttaacagcttgtgtttgcataatcccgtcgccatcttggccctcgtg

SEQ ID NO: 3240 - DNA, 930 bp, Homo sapiens
ggacaggcagcctgctctgtgtcgccacgggccggatacgccacagggttgatggcagagacggccgagtccctggtctagaacaagacacattctttaaacactgtattacttctgcctccctctaggtgacagtggcagtccgggtgccatcacgggtcctgcagatggccatgcagggctcctgcccacgcaggccaccgtatgttcaggacacgcactgggtctcagagccactggcccaggcagaagtctccttgagcccactgggtcatatgcgtgtcaccacacgtgaactagtgtggtggctgcctgcggacaccctcctgttctgagccctgggcctgtgttcttctcagacactcccagactgaggggtggtgtgtggcgggtggcagggtggctgtggagactggggatctggagcctggtgctggcacctggcctgagtttccgtgggcagctggcggggacctgtgctgctgctgctgactgtgggtgggcgggcggcgcctgggagtggctcttgctcaggaattgataggaaccctaaaaactaggataccccctcctcggcccatgaggcacgcacagtgacttatttaagacttcccccttaatttatctgcccccaggatgcgtcagtctgttcagtggtcagcaggccccccaccccccgccgactgccctcgccatcgtggtcagacccccctcccaacacaacacgctgctggtctgtgtcagcctttgtaacgtgggaggctctgccgtgtcttccgggtgaactgtatttggattgcgcgcattgtcacggtccgcccctgggctgcaggcgccccttcctctgggcacccctgcattctgcatccccacctctagacgctgtaataaacagactgttttcactcggaaaaaaaaaaaaaaaaaaaa

SEQ ID NO: 3241 - DNA, 3528 bp, Homo sapiens
tatgcatggagtggacctgtaggcgacttgcatcgtcttcaacatgaagatagccacagtgtcagtgcttctgcccttggctctttgcctcatacaagatgctgccagtaagaatgaagatcaggaaatgtgccatgaatttcaggcatttatgaaaaatggaaaactgttctgtccccaggataagaaattttttcaaagtcttgatggaataatgttcatcaataaatgtgccacgtgcaaaatgatactggaaaaagaagcaaaatcacagaagagggccaggcatttagcaagagctcccaaggctactgccccaacagagctgaattgtgatgattttaaaaaaggagaaagagatggggattttatctgtcctgattattatgaagctgtttgtggcacagatgggaaaacatatgacaacagatgtgcactgtgtgctgagaatgcgaaaaccgggtcccaaattggtgtaaaaagtgaaggggaatgtaagagcagtaatccagagcaggatgtatgcagtgcttttcggccctttgttagagatggaagacttggatgcacaagggaaaatgatcctgttcttggtcctgatgggaagacgcatggcaataagtgtgcaatgtgtgctgagctgtttttaaaagaagctgaaaatgccaagcgagagggtgaaactagaattcgacgaaatgctgaaaaggatttttgcaaggaatatgaaaaacaagtgagaaatggaaggcttttttgtacacgggagagtgatccagtccgtggccctgacggcaggatgcatggcaacaaatgtgccctgtgtgctgaaattttcaagcggcgtttttcagaggaaaacagtaaaacagatcaaaatttgggaaaagctgaagaaaaaactaaagttaaaagagaaattgtgaaactctgcagtcaatatcaaaatcaggcaaagaatggaatacttttctgtaccagagaaaatgaccctattcgtggtccagatgggaaaatgcatggcaacttgtgttccatgtgtcaagtctacttccaagcagaaaatgaagaaaagaaaaaggctgaagcacgagctagaaacaaaagagaatctggaaaagcaacctcatatgcagagctttgcaatgaatatcgaaagcttgtgaggaacggaaaacttgcttgcaccagagagaacgatcctatccagggcccagatgggaaagtgcacggcaacacctgctccatgtgtgaggtcttcttccaagcagaagaagaagaaaagaaaaagaaggaaggcgaatcaagaaacaaaagacaatctaagagtacagcttcctttgaggagttgtgtagtgaataccgcaaatccaggaaaaacggacggcttttttgcaccagagagaatgaccccatccagggcccagatgggaaaatgcatggcaacacctgctccatgtgtgaggccttctttcaacaagaagaaagagcaagagcaaaggctaaaagagaagctgcaaaggaaatctgcagtgaatttcgggaccaagtgaggaatggaacacttatatgcaccagggagcataatcctgtccgtggaccagatggcaaaatgcatggaaacaagtgtgccatgtgtgccagtgtgttcaaacttgaagaagaagagaagaaaaatgataaagaagaaaaagggaaagttgaggctgaaaaagttaagagagaagcagttcaggagctgtgcagtgaatatcgtcattatgtgaggaatggacgactcccctgtaccagagagaatgatcctattgagggtctagatgggaaaatccacggcaacacctgctccatgtgtgaagccttcttccagcaagaagcaaaagaaaaagaaagagctgaacccagagcaaaagtcaaaagagaagctgaaaaggagacatgcgatgaatttcggagacttttgcaaaatggaaaacttttctgcacaagagaaaatgatcctgtgcgtggcccagatggcaagacccatggcaacaagtgtgccatgtgtaaggcagtcttccagaaagaaaatgaggaaagaaagaggaaagaagaggaagatcagagaaatgctgcaggacatggttccagtggtggtggaggaggaaacactcaggacgaatgtgctgagtatcaggaacaaatgaaaaatggaagactcagctgtactcgggagagtgatcctgtacgtgatgctgatggcaaatcgtacaacaatcagtgtaccatgtgtaaagcaaaattggaaagagaagcagagagaaaaaatgagtattctcgctccagatcaaatgggactggatcagaatcagggaaggatacatgtgatgagtttagaagccaaatgaaaaatggaaaacttatctgcactcgagaaagtgaccctgtccggggtccagatggcaagacacatggtaataagtgtactatgtgtaaggaaaaactggaaagggaagcagctgaaaaaaaaaagaaagaggatgaagacaggagcaatacaggagaaaggagcaatacaggagaaaggagcaatgacaaagaggatctgtgtcgtgaatttcgaagcatgcagagaaatggaaagcttatctgcaccagagaaaataaccctgttcgaggcccatatggcaagatgcacatcaataaatgtgctatgtgtcagagcatctttgatcgagaagctaatgaaagaaaaaagaaagatgaagagaaatcaagtagcaagccctcaaataatgcaaaggatgagtgcagtgaatttcgaaactatataaggaacaatgaactcatctgccctagagagaatgacccagtgcacggtgctgatggaaagttctatacaaacaagtgctacatgtgcagagctgtctttctaacagaagctttggaaagggcaaagcttcaagaaaagccatcccatgttagagcttctcaagaggaagacagcccagactctttcagttctctggattctgagatgtgcaaagactaccgagtattgcccaggataggctatctttgtccaaaggatttaaagcctgtctgtggtgacgatggccaaacctacaacaatccttgcatgctctgtcatgaaaacctgatacgccaaacaaatacacacatccgcagtacagggaagtgtgaggagagcagcaccccaggaaccaccgcagccagcatgcccccgtctgacgaatgacaggaagattgttgaaagccatgagggaaaaaataaaccccagttctgaatcacctaccttcaccatctgtatatacaaagaattcttcggagcttgtcttatttgctatagaaaacaatacagagcttttgggaatggaatcactgattttcagtcttttccatttctttcctcctagaatctgtgatctgagggtataaagacatttccaccaagtttgagccctcaaaatgtcctgattacaatgctgtctgtccaactgcctgttcaataaaagtaaactcagcag

SEQ ID NO: 3242 - protein, 1064 aa, Homo sapiens
MKIATVSVLLPLALCLIQDAASKNEDQEMCHEFQAFMKNGKLFCPQDKKFFQSLDGIMFINKCATCKMILEKEAKSQKRARHLARAPKATAPTELNCDDFKKGERDGDFICPDYYEAVCGTDGKTYDNRCALCAENAKTGSQIGVKSEGECKSSNPEQDVCSAFRPFVRDGRLGCTRENDPVLGPDGKTHGNKCAMCAELFLKEAENAKREGETRIRRNAEKDFCKEYEKQVRNGRLFCTRESDPVRGPDGRMHGNKCALCAEIFKRRFSEENSKTDQNLGKAEEKTKVKREIVKLCSQYQNQAKNGILFCTRENDPIRGPDGKMHGNLCSMCQVYFQAENEEKKKAEARARNKRESGKATSYAELCNEYRKLVRNGKLACTRENDPIQGPDGKVHGNTCSMCEVFFQAEEEEKKKKEGESRNKRQSKSTASFEELCSEYRKSRKNGRLFCTRENDPIQGPDGKMHGNTCSMCEAFFQQEERARAKAKREAAKEICSEFRDQVRNGTLICTREHNPVRGPDGKMHGNKCAMCASVFKLEEEEKKNDKEEKGKVEAEKVKREAVQELCSEYRHYVRNGRLPCTRENDPIEGLDGKIHGNTCSMCEAFFQQEAKEKERAEPRAKVKREAEKETCDEFRRLLQNGKLFCTRENDPVRGPDGKTHGNKCAMCKAVFQKENEERKRKEEEDQRNAAGHGSSGGGGGNTQDECAEYQEQMKNGRLSCTRESDPVRDADGKSYNNQCTMCKAKLEREAERKNEYSRSRSNGTGSESGKDTCDEFRSQMKNGKLICTRESDPVRGPDGKTHGNKCTMCKEKLEREAAEKKKKEDEDRSNTGERSNTGERSNDKEDLCREFRSMQRNGKLICTRENNPVRGPYGKMHINKCAMCQSIFDREANERKKKDEEKSSSKPSNNAKDECSEFRNYIRNNELICPRENDPVHGADGKFYTNKCYMCRAVFLTEALERAKLQEKPSHVRASQEEDSPDSFSSLDSEMCKDYRVLPRIGYLCPKDLKPVCGDDGQTYNNPCMLCHENLIRQTNTHIRSTGKCEESSTPGTTAASMPPSDE

SEQ ID NO: 3243 - DNA, 304 bp, Homo sapiens
  misc_feature (196)..(196): n is a, c, g, or t
  misc_feature (203)..(203): n is a, c, g, or t
  misc_feature (234)..(234): n is a, c, g, or t
  misc_feature (252)..(252): n is a, c, g, or t
ctcccatcctgcccccaaaggcagacctgaccatcggcctgcacggggagtgggtgagccagcgctgtgaggtgcgccccgaagtcctcttcctcacccgccacttcatcttccatgacaacaacaacacctgggagggccactactaccactactcagacccggtgtgcaagcaccccaccttctccatctacgncccgggngccgcttacagccgcgggcggtcctctcgtncagggtcatgggaggcancgagttcgtgttcaaagtgaatcacatgaaggtcaaccccatgggatgcggg

SEQ ID NO: 3244 - DNA, 599 bp, Homo sapiens
gggtcgaggtcgacgggtatcgataagttttttttttttttttttttaaaggagcaatgacatttcctagaagttactctaagaatttccctagagggtcgggtatcatctcagccagatctttctcatccttcaaggccctgtttggtacagcttgctaggaagctgttccagactgcagcagccctctctggggtctctctaccacttcccaggcactcagaacttgtgcctcagtagactgttttgtggcactgtcccattctctgattctccatgtgagctggttttatcccatccagcatggctgtgaaatcctaaaggttcaaaccccagccactcttcacctatatttcccccaaatggctagcacgggaaagggcccaaagtaggtgctcagtgctgatgagagagtagaatttaaataccccaggaagcattgtgagttactacggaggccatgaaatgctgccacctccccaagctgattaaagagtgatactaggaaaataggtagggaagggctaatcagaaatgcctctggttcagaagatgctgagttttaaagtccagagagccaaagaaaaaaaaaaaaaaaa

SEQ ID NO: 3245 - DNA, 688 bp, Homo sapiens
tgaatttaggtgacactatagaagagctatgacgtcgcatgcacgcgtacgtaagcttggatcctctagagcggccgcctactactactactaaattcgcggccgcgtcgactggctctccaagacccacggtttactggtacaaagatggaaaattagtccaaggaagaaggttcactgttgaggaaagtggcacagggttccataacctgtttataacaagcttagtaaagagtgatgaaggagagtataggtgtgtagctacaaacaaatcaggaatggctgagagctttgcagcactcaccttaacttaaaatgtaatgttttagtgcctcagtaattattagcattgatctgagtgctttcatattttccaaattatgtggatctaataaacttccaaacaggtccaccatatttgaattcattaccttggagacccctaaagaaataatctctatgtagaaatctcatctttgtaatacatgtaaatattttgttatctgaactgtggaatcatcacttgtgtcaatcatgctgtgtaatatcaaacacaattaaatctctccttggctgcctaaaaaaaaaaaaagtcgacgcggccgcgaatttagtagtagtagtcgacccgggaattccggaccggtacctgcagggggaccagctttccctatagtgggtcgtatta

SEQ ID NO: 3246 - DNA, 404 bp, Homo sapiens
tgaatttaggcgacactatagaagagctatgacgtcgcatgcacgcgtacgtaagcttggatcctctagagcggccgcctactactactaaattcgcggccgcgtcgactttttttttttttatttccacaatatttattatgcaccaacaatatgccatgccctgttctgggcaccagggatgcacagtaaacaaaccaatctctgttcccaaggagctgacagtgtggaggcagcaaatcaacaagacgacaaacagaaagatggttgcagatggtgagacatgctggtcgacgcggccgcgaatttagtagtagtagtcgacccgggaattccggaccggtacctgcaggcgtaccagctttccctatagtgagtcgtattagagcttggcgtaatcatgg

SEQ ID NO: 3247 - DNA, 774 bp, Homo sapiens
ggctttatctgggaaccacagacagaatcatggaactgaccatcttcagtctcaaagtgctgccctcaccactacacccaagggcaggtggtcttcgggggaaaggcggttccagttccttctcccaagccagtgaggaagtcaatcctgcgaacaactgcaggaacggccttgggagtggatccttcctcagcccggctccaagacaactgcagccctgtgagaaaccctgagtggaggaccaagccaagcctcaaatcgtgacttggaactgggagacaacagatgctgttggaagccactgagctctgaagtagtttgttacacagtgacagaatctaggatctggggaaggtaaactgaggccaccagtaagcatgtgctccaggccaaggctgagtctgtgctgcatccatgtcatcagccacccaagaaaaaccagttactccacctagctcatggtggcggcatcctccctgcaatggtgcatggggggcagtcctttcccctgcagggtgtcattgccacccccatcctcatcctggaggccagtccaggctccgatatgagtgactaggggtgaggtaggggtggcagaagggagatcaaactggagcattccagatgcctactactgccctcacacaacggggcaactgtgctctccaactcctccccttggcagagaaactggtcctgcagtttcaggactagacgagcgtggggtagtggcaataaaggggcttgtatgagaagtgaaaaaaaaaaaaaaaa

SEQ ID NO: 3248 - DNA, 887 bp, Homo sapiens
gttactttaatattgaattagtagttcatcctgagagttatatttcacagaggaaaataaccaacagctgaaaacaacaataataaagctctggtgagtctgactcatactcggagaaagtttttggaatacatacacatttggtgcatataagagttgggtttccttttcccactttctgagatgtactaacctctgccagacccttaaatgattttgttatgttttgcatttttgaggccaaccttattttgtaactgaaaaaagtccagttttgcatacacagaaatttggtcattttagaagtctcacaacctgaataatttgataataattgaatatgctattaacagctttttaagaaaaggttctattagtcagttttttccttgtctgtcatattatgttggttaatgtctcttatggccaatcttagtaaacagacctaacactcactgcatccttttgtgccttactttttactttccttttgcccttttggtatgtgcgcatgtaagatggtaagtttaaggctaatgaatatatgtttgtaatttcctactcactactctgcagttaaagctaaggccttaggcaaaatctagaaatgtttatattgttttgttttttatcaagtggtgtcaacttgagaaatacaaagaaaggctatgcttaactgtataaccgtgggggattttagccatgagaatatgaagctgatgtcagcctgctaacctgttttaccaaaaggaaaagatgtttccaaaaatgttttcggtgtagactgtttaaagatgaaaataaattatataatttattatatgaaataaatttttgataagtcaaaaaaaaaaaaaaaaaaaaaaaaaaaaaaaaaagggcggccg

SEQ ID NO: 3249 - DNA, 266 bp, Homo sapiens
  misc_feature (101)..(107): n is a, c, g, or t
  misc_feature (120)..(120): n is a, c, g, or t
  misc_feature (124)..(124): n is a, c, g, or t
cagaaagactatatattgtttttsttttttaaaaaaaaaagaagaaaaaagagacagagaaaattggtatttatttttttattatagccatatttatatannnnnnnacttgtaaataantgtntatkttttataahccccacccaggaaagcaccgcacaggctggcgcggggacagcactcctaacctggggcctctgcagtggcaggcgaggctgcaggaggcccacagataagctggcaagagggagcccccaggcacatgg

SEQ ID NO: 3250 - DNA, 520 bp, Homo sapiens
  misc_feature (467)..(467): n is a, c, g, or t
gacaggctgatcaactatgccaccaatggtgccaagttcctgaagcggcacatgtttgatgtggccagtggcgcctgatgcggacctgctacaccggccctggggggactgtggagcacagcaacccaccctgctggggcttcctggaggactacgccttcgtggtgcggggcctgctggacctgtatgaggcctcacaggagagtgcgtggctcgagtgggctctgcggctgcaggacacacaggacaggctcttttgggactcccagggtggcggctacttctgcagtgaggctgagctgggggctggcctgcccctgcgtctgaaggacgaccaggatggagcagagcccagcgccaattccgtgtcagcccacaacctgctccggctgcatggcttcacgggccacaaggactggatggacaagtgtgtgtgcctattgaccgccttttccgagcgcatgctncgtgtcccggtggcgttgccgagatggtccgcgccctctcagcccagcagcag

SEQ ID NO: 3251 - DNA, 596 bp, Homo sapiens
ttgaatttaggtgacactatagaagagctatgacgtcgcatgcacgcgtacgtaagcttggatcctctagagcggccgcctactactactaaattcgcggccgcgtcgactttttttttttttcaatagtctactgtttttatttgtggaagggttggtcttataggaactattctgccattagcagaagtggaaactcagatttccatattttagaaagtattctaaaggagtgttgagaatggatctgaaatgagactagggatagagaaaccagtcaggatatatagcagccacccacggaaaaggtaatgacagttcacagaacagcagcaatcaagtgcaatgaaagtttgtatttgcaagctccagactcttaaattccaactctgcagtaaaatagctaaaaacagtctgaactaaaatatcaagagtttttggatagagatgtaggttgtggtgagaggggaggcaatgatcttgagtggtattttcctatgaagtgtgagaaggggtcgacgcggccgcgaatttagtagtagtagtcgacccgggaattccggaccggtacctgcaggcgtaccagctatccctat

SEQ ID NO: 3252 - DNA, 3424 bp, Homo sapiens
gtgatttttatgaacgcctgtcttagtagcagcattgtagagtggctggagcactggactgactaggaacctgatgacttcagctgtagtccagctttgccaccacttcaagtcatttaaccagtctgctcctccgtttctccatctgtcaaatgggagctttagacaagatgatctcaaatttccttcccactctaacagttacgatttctacagcaaatcttgtgagaaggaaatgccagcccagtaccatttcataaaaagcagctcaaaggaaatagatctgtgcttgtttctaccaatcttggcagaaatacattagcttgtcccaattttgctttggtgattggatcctgcccttccctcctttctattttccctatacttttctaatcattaggtaaactggcagttgaggatacaatttccacatcacagagaggaactagtcaggtgataaatgattaaagtgacagtggttccctgtgtgattgtgatgtaatccctcctggtgagtctccatcctgccggttgatgctcaagtctgtttcactactcttttgtgtgtctcacagcccatagctcagctgtgagctgcaatgactctgcacatctttttttccctttgggaatgcataacatccatgaaagccacatgctttgcatatagtggaggcccagtgatggttgttggaattcaaagtagtaaaggctctagaattgttggaagaatctggaaagcagattcttcccaggaaataggcatgatggggtgtgaaaggaaggttgccacaagggaaaatggctagacttgtgcaaaagaatgaatggacaaaagatcaccaaggggttttggtcccattacgaagtgagtgtttaactagtagagccactgagatggaagatacaccttacttcttgggaagtagtgagttcccatcgccagtggtttgtagataacagaccctgtttcagtccacttggaagagatactgtagcaggaattcttaagcaggattgaacgtataataagcaagatctcttccacctctaaaattctctggttgtgggtattgagagctacataataataatagcacctgacatttttcacatttctggagcatttactatgcaccaggaactgttcaagactttccatttaatcctcacaacagttgcataggtaggtgctgttattattcctccctcatatatgaggagactgcagcacagcacctaagattgcatggctgtgggtagtggaggtagaattggaacccaggctttggctgtcaggctacactctcaccctgtgtactgccgcccgagcagagcagtgtaccatcagcctcggcatccatggatttcaccaaccatggaccaaagatatttggaaaaaaaaaatgcaacaataggaacaataatacaaaatatatatatatatgtgtatatatatagcatatatatatattttgtattattgtttttataatatatatagcatatatattatatatgctaaaatatatatatagcatatatatacacacacatatatatatatacacatatatatatatatatacacatatatatatatatatatatatacacatatatatatatatatggccaggcacagtggctcatacctgtaatcccagcactttggaaggccgaggagggaggatcacttgaggccaggggctcaagaccagcctggtcaacatagcaagaaaataaaaaataaattctacaaaaaaatttttttaaatagagtataataactatttatatagtgtttacattgtcttagatattataagtaatttagagatgatttaaagtatacaggaggatgtgcataggttatttgtaaatactataccattttatatcagagatttgagcacctgcagatttcagtgtccatggacagtcctggaaccggtaccctgtggatactgcaggaggtctgtacttttttataggaaggtcaaaatctcaaactgagatggcactcctttattctgctgtagaactgtaatttgggatgtcagtgtgggattcaggaagtatcatgaatgactgctatgtaatttttctttatattcctatccttctagataatttttcattattttctagtcatggaactatatctttgttaaacttattggaaataaaatacccaagaatttttgctctctttctctctttatcagattaatagaactgaatctctgacattccaaattaatcctgctctttaaagaaattttcttttaggctcttcattacaaactattcttgctgatcaaattccacgtaatgtctgaggaaaacagattccactggcagttgcttttgttacatttgagtggagaaatttccttggtcattacaccaaaatattgaccagaaaggtcctgttgctcctcaacttcaggggaaacaatagggttcaggtctgaaactcagacttgtttgagaaagataatgtgctttctttccttcttagggtgtgagatgaactagaacatttcaatatcttgagcgtccaacaaaatgctacttgggcaatctgagccaatgattatgccaagttctttgtaggagaggaattggcttgaaaactttatcttctttctcagtgtatctatggtggaagaacactggatcaaggaactctaaataataattcttggagcagctatttcaaatcttattcttacatgctaatagaaaaaagataggattattatttcctccctcactcagaatgcagtgataactaccaaataaaccaatgtgaaagagtcagttgtcttggacaccatctctacttcagataaatctgggtgcatagcttgagccagtaatttgggctaaagtgtgtttcggacttagaaatttgtgcaatagtcaactgtctaaagcagtgttgttcaaatagaactataatgtgagacacacaagtattttaaaattttctagtagctaccttaaaaaagtaaaaagaaatgtgaaattaattttaaggacttaacccaatatgttgcaaaatataatttcaacatgtattcaatataaaaattattagatattttaggctgggcacggtgactcacgccagcactttcggagtaatcccagcactttcggaggccaaggcgggcggatcacaaggtcaggagatcgagaccatcctggctaacacggtgaaaccccgtttctactaaaaatacaaaaattagctgggcatggtggccggtgcctgtagtcccagctatttgggacgctgaggcaggagaatggcgtgaacccggagggcagagcttgcagtgagccgagatcgcgccactgcactccagcctgggcaacagagcgagactccatctcaaaaaaaaaaaaaaaaaaa

SEQ ID NO: 3253 - DNA, 3563 bp, Homo sapiens
atcgagcttcagattgtttactatttaagatgtacttttacaaaggaacaaagaagggaaaaggtatttttgtttttgttgtttggtctgttatcatcaataacctgttcatatgccaattcagagaggtggactccaggttcaggagggagaagagcaaagccgcttcctctctgtgctttgaaacttcacaccctcacggtggcagctgtgtatggaccagtgccctccgcagacagctcacaaaaccagttgaggtgcactaaagggacatgaggtagaatggatgcttccatcacagtaccatcattcagaataactcttccaatttctgctttcagacatgctgcaggtcctcatctgaactgttgggttcgtttttttttttttttttcctgctccaagaaagtgacttcaaaaataactgatcaggatagattattttattttactttttaacactccttctccccttttcccactgaaccaaaaagaaatcccatccctaaaacctgccttctccttttatgcaaaactgaaaatggcaatacattattatagccataatggtatagatagtgattgcgtttggctatgtgttgttttctttttttttaaattatgaatatgtgtaaaatctgaggtaacttgctaacgtgaatggtcatataactttaaagatatatttataattatttaatgacatttggacccttgaaacatttcttagtgtattgatatgttgacttcggtctctaaagtgctctttattaaataacaaatttcttcagtggtctagagccatatctgaaatattgctaagcaatttcagttcatccaggcacaatgtgattttaaaaatacttccatctccaatatttagatatagattgttttgtgatgtatgaggaatgtatgttagtcttccagatctttgaatgcctctaacacagctttgccttctaaagcggtaattagggatttaaaaaacaacctttagccctttatcagcatgaaatgcttgagtgatgtggttttctaatttctttggggtaattatgactcttgtcatattaaaaagacaagcacaagtaaatcattgaactacagaaaaatgttctgtggtttcatagttaagcaaaactctaaatcgccaggcttcatagcaaagacatagtcagctaaaagccgcacatgtggatagagggttcaattatgagacacctagtacaggagagcaaaattgcaccagagattcttaaccaaccagccttaccaaacaacacaacaggggaaccccaatctgccttacccaaggccccactggcagctttccacagaatttgcatttagaggagcagaatgacatcactgtcctttgggagtaggtcctctgaaaaggcagcaggttccagcaggtagctgagctgagaggacatatggcccacggggacctacagacagcctttgacatttgtatttcttacaatggagggccaaggagggcaaggggctgtggagtttggtgtctactagtgtgtatgaatttgagctagagtccttctgtggcatgcactttgaccactcctggcagtcacatggcagatttccaagtgcaaatccttaatccaaacaaggatcatctaatgacaccaccaggccaatccctgctctcctccccgaaaagtcagggtcccttcattggaatcctccacccacccaagcagaatttagcagagatttgccttcaaaccctaacggcccccttgttctctggtccttctcaaacccacctttgtaggccacccagcattgcaggacagcgtgtggggcagctggacctgtgcttcctgcctgggagtctcccttggaattcatcctgactccttctaataaaaatggatgggaaagcaaaacactttgccttctaaaggccgtataccaagtatgcttagataaataagccacttttctattacttaagtaagaaggaagtagtaattgatactatttattgtttgtgtgtggtagcttgaagcacaccactgtccatttatttgtaagtgtaaaatatgtgtgtttgtttcagcagcacttaaaaaagccagtgtctggttacacatttcaattttaattaattgacataaaaatgctaccgccagtgccagctgcatcctatttaattaaaaaggtactatatttgtacattattttttaatgttaaaagggcttttttaagtttacagtacacataccgagtgactttagggatgcttttgtgttgaaatgttactatagtggctgcaggcagcaacccagaaacactttagaagctttttttccttgggaaaaattcaagcacttcttccctccaccctcactccaaccaccccaatgggggtaattcacatttcttagaacaaattctgcccttttttggtctagggattaaaattttgtttttctttctttctttttttttttttttcactgaacccttaatttgcactgggtcatgtgtttgatttgtgatttcaagaccaaagcaaagtcttactactactgtggaaccatgtactagttcctgggaattaaaatagcgtggttctctttgtagcacaaacattgctggaatttgcagtcttttcaatgcagccacatttttatccatttcagttgtctcacaaattttaacccatatcagagttccagaacaggtaccacagctttggttttagattagtggaataacattcagcccagaactgagaaactcaacagattaactatcgtttgctctttagacggtctcactgcctctcacttgccagagccctttcaaaatgagcagagaagtccacaccattagggaccatctgtgataaattcagaagggaggagatgtgtgtacagctttaaggattccctcaattccgaggaaagggactggcccagaatccaggttaatacatggaaacacgaagcattagcaaaagtaataattatacctatggtatttgaaagaacaataataaaagacacttcttccaaaccttgaatttgttgtttttagaaaacgaatgcatttaaaaatattttctatgtgagaattttttagatgtgtgtttacttcatgtttacaaataactgtttgctttttaatgcagtactttgaaatatatcagccaaaaccataacttacaataatttcttaggtattctgaataaaattccatttcttttggatatgctttaccattcttaggtttctgtggaacaaaaatatttgtagcattttgtgtaaatacaagctttcatttttattttttccaattgctattgcccaagaattgctttccatgcacatattgtaaaaattccgctttgtgccacaggtcatgattgtggatgagtttactcttaacttcaaagggactatttgtattgtatgttgcaactgtaaattgaattatttggcatttttctcatgattgtaatattaatttgaagtttgaatttaattttcaataaaatggcttttttggttttgaaaaaaaaaaaaa

SEQ ID NO: 3254 - DNA, 355 bp, Homo sapiens
  misc_feature (5)..(5): n is a, c, g, or t
tctanaggatcccctgatcttccgtcccacaattcaaactctctgaatcagctacaaatacacgaggcagtgtgtttaaacagaagacactgcactcagccactcactcaaacacactcagtcactgctttaaatataccaaacatgctggttaataaaattttagtctctagttacctatttacactctataatataagcagtaagctccaaccacctagggcccgggggccttctttggggagaggccggaaaaaaaaacctccttttaaaaatatttaaaataaagtttaaacctggtcctgaaattcttttacctgtgacactagatgctaatttctgcacctgcaaacct

SEQ ID NO: 3255 - DNA, 1814 bp, Homo sapiens
agcctgtggagtacctcaacaaccccatcatcacccagttcttccccaccctgctgctgtggtgcttctcggccctccttcccaccatcgtctactactcagccttctttgaagcccactggacacgctctggggagaacaggacaaccatgcacaagtgctacactttcctcatcttcatggtgctgctcctaccctcgctgggactgagcagcctggacctcttcttccgctggctctttgataagaaattcttggctgaggcagctattcggtttgagtgtgtgttcctgcccgacaacggcgccttcttcgtgaactacgtcattgcctcagcctttatcggcaacgccatggacctgctgcgcatcccaggcctgctcatgtacatgatccggctctgcctggcgcgctcggccgccgagaggcgcaacgtgaagcggcatcaggcctacgagttccagtttggcgcagcctacgcctggatgatgtgcgtcttcacggtggtcatgacctacagtatcacctgccccatcatcgtgcccttcgggctcatgtacatgctgctgaagcacctggtagacaggtacaatctctactacgcctacctgccggccaagctggacaagaagatccactcgggggctgtgaaccaggtggtggccgcgcccatcctctgcctcttctggctgctcttcttttccaccatgcgcacggggttcctagctcccacgtctatgttcacatttgtggtcctggtcatcaccatcgtcatctgtctctgccacgtctgctttggacacttcaaatacctcagtgcccacaactacaagattgagcacacggagacagatactgtggaccccagaagcaatggacggccccccactgctgctgctgtccccaaatctgcgaaatacatcgctcaggtgctgcaggactcagaggtggacggggatggggatggggctcctgggagctcaggggatgagcccccatcatcctcatcccaagatgaggagttgctgatgccacccgacgccctcacggacacagacttccagtcttgcgaggacagcctcatagagaatgagattcaccagtaaggggagggaggggccctggaggccacatcctgccccaccccacccccactcccacggacactaaaacgctaataatttattagatctaaagccccttcctccccagcccctgctttcattaaggtatttaaacttgggggtttcactgctctcccccatgatggagggagggagccccccaacctcagtgaggagagccccgagccggccccggggcaaagaggggtgcagagggagttcccccagatcagtaccccccacccctccccagctagtagcatgaccaggagagggttaatgagagccaagaggagtacctggtgcacctggtgccggtggctggagacctggggggcaggtggatctggggctgttcccccccctccgttttttccaccccacagttcctcctgggatctggccctccagggaagtggagcctccagcccctaggggatgcatgaggggggagggggtgctgagtgggaggaagagtcaggctcacagctggggtggcctgggggtgggggtgggcaaggctgacactggaaaatgggtttttgcactgttttttttttggtttttttgttcttttttgttttttttcctttaaaataaaaacaaagaaaagctcaaaaaaaaaaaaaaaaaaaaaaaaaaaaaaaaaaaaaaaaaaaaaaaaaaaaaaaaaaaaaaaaaaaaaaaaag

SEQ ID NO: 3256 - protein, 367 aa, Homo sapiens
PVEYLNNPIITQFFPTLLLWCFSALLPTIVYYSAFFEAHWTRSGENRTTMHKCYTFLIFMVLLLPSLGLSSLDLFFRWLFDKKFLAEAAIRFECVFLPDNGAFFVNYVIASAFIGNAMDLLRIPGLLMYMIRLCLARSAAERRNVKRHQAYEFQFGAAYAWMMCVFTVVMTYSITCPIIVPFGLMYMLLKHLVDRYNLYYAYLPAKLDKKIHSGAVNQVVAAPILCLFWLLFFSTMRTGFLAPTSMFTFVVLVITIVICLCHVCFGHFKYLSAHNYKIEHTETDTVDPRSNGRPPTAAAVPKSAKYIAQVLQDSEVDGDGDGAPGSSGDEPPSSSSQDEELLMPPDALTDTDFQSCEDSLIENEIHQ

SEQ ID NO: 3257 - DNA, 427 bp, Homo sapiens
tttttttttttttttttttggccttggggaacatttattttctacggaaaaaccaacataagagcggctttgggactccaccctgggcaacaaggtaatgaatgtggagttaggtggtgactaaagaatttggattctttcctccaggttacaatgctcgttaaggggcagcctgtaatgaaacctgcgatatgtgctagaaccaactaaatgattattttaaaagtcacagtctgcatggggcttcataaattcacgccagggagagctgtctaatgggattgccaccttccacccccaacgcagacttcaaagctccttgctaggtctccactcaaaggcttatcccatggcccgagcaaggaaggcctttgtgtgtgaaaacacctgccacccagcttcaggagcactgagcgctttcggcatg

SEQ ID NO: 3258 - DNA, 2335 bp, Homo sapiens
caaaggggtccgggaagtggaacgggccctgcagctgcccagggagcccggagactcagcccagttcaccaaggcgctggccatcatcctccacctgctctacctgctggagaaagtggagtgcacccccagccaggagcacctgaagcaccagaccgtctaccgcctgctcaagtgcgcgcccaggggcaagaacggcttcacccctctgcacatggctgtggacaaggacaccacaaacgtgggccgctatcccgtgggcagattcccctccctgcacgtggtcaaagtgctgctcgactgcggggccgacccggacagcagggattttgacaacaacaccccgctacacatagcagcccagaacaactgcccggccatcatgaatgccctgatcgaagcaggggcccacatggacgccaccaatgccttcaagaagacggcctacgagctgctggacgagaagctgctggccaggggtaccatgcagcccttcaactacgtgaccctgcagtgccttgcggcccgggccctggataagaacaagatcccttacaagggcttcatcccggaagatctggaggcgttcatcgaactgcactgacctgcccagaacgcctgcaccctcacctctcccctctcctgctgagatgggggaaatccggctgcggcatagcagatgctcgttcttgcctccttcaggcaccaatcaggagaagggttctgcctcccatcccctctacctgcagacagggtcggaggtgttagcgagcctttggtgctagaagcctgcggggtcatgtgctaagaggacagtctttctccgggagcccgctcactcattctgagttaggaaaagacacaagaccttccccacatcctgtctgcctgggttagggaggcctttgccttgttacctagaggcggagggactgaagccattgcgttccttccctgctagaaacacaggaagaagttgaggacggtctgccttccctcgtccctttacctggccagataactccagccgctgaatacagtgttaggactgggggctcctgagatgagagtttgagattcagggaatgagaccacctctcatttcttccagcatgatcgcgccctgctcccgtgccaccgtagtccctggcagacaggcagggctctgcccagggcagcctgccacttgcatagctttcggttggtttggtgttctgtttatttaataagtgggcaggttgcaagcgttgcacagaaattctgagattttactgccttttttttttttttaagaaagttgtttgttggactccataagtgaatttcaagcagtgaggattttgtggtgcctgagatggccgagggcacagggagtgagctgtatgtgtgaggaatttggtgagcgagataaaagtccacggtgtcaacccctaaaacatgggtgaccgtacatttttatacatctccactctacggccttttacaggctttccgattttacaggcctttccaagtttccattctccttagagagagaactgtgcttccaaacagaaatcaggagtgaccacaaagcctgaaaacactttgccacccagcaaagaactggcacaattggtttgggtctgcattgccatagtgcccgagttaaaactgcaggccactctgccttgcaaacctcacgtggcctctgatttcattgtgggtgcatccacaggtggcccgagctgttctttcagctgctccaaggattgagacccaagtcatcatgaaaaaggcccaagtacagtcttaatgcgataaatccactagctaagacgtcgagtgccaagaccagccttccagccgaggtttggacaaagtctcaggttcccgtgactcagggtaaggtgctggggctgccagaggacctgccccagcaagatttttgtcaagagcgagactccatcagcccaggcagacgggagcaggttcttggccagcgtagacagcagcaaacagcagcagggaagccattctcactgcatcctccctgcagtagccacggccaggcccttaggaggagcagtgaccgggggtgtccagaaatatcctgtccctggatggaaactaggtctcgtttggatttttttttttttttttttgccgtgttaggaaattatttattaatttacaagacaggttttaactcagccgaggtgggaaatggtgtccctgtccctcccaaagcacagagcacagaaatgaggccgtttacatggcgagtctccgtgctggtgtttaagtcattaaaaagatactcaaagaaaaaaaaaaaaaaaaaaaaaaaaaaaaa

SEQ ID NO: 3259 - protein, 200 aa, Homo sapiens
KGVREVERALQLPREPGDSAQFTKALAIILHLLYLLEKVECTPSQEHLKHQTVYRLLKCAPRGKNGFTPLHMAVDKDTTNVGRYPVGRFPSLHVVKVLLDCGADPDSRDFDNNTPLHIAAQNNCPAIMNALIEAGAHMDATNAFKKTAYELLDEKLLARGTMQPFNYVTLQCLAARALDKNKIPYKGFIPEDLEAFIELH

SEQ ID NO: 3260 - DNA, 418 bp, Homo sapiens
  misc_feature (399)..(399): n is a, c, g, or t
  misc_feature (409)..(409): n is a, c, g, or t
aaacaggttaagtagcaggttgggtttttatgatagtgcaaggaatgactcatgcctctgagcttctaaactgaagctgctgtaactaaaggaatctgaaaagaacaaccctgaagcagaggcctttattgtcttggttgccagtagtaccttgttttgccatgtagcagacaacacacaaaataatgcagttgtggtgtgccatgctatgtgcacagccccttggattactttgttttaaaaagcatcagagttgggggtactttaggggaaacctttgcttaccttgttttgccagtgataagagcagtgggttgggagggcacttgggccagttttctgtttcagcttttccagttgaatgtaccccctttaaggttccaggactttaaacttccnttaaaaagtnggcctttgt

SEQ ID NO: 3261 - DNA, 590 bp, Homo sapiens
  misc_feature (7)..(7): n is a, c, g, or t
  misc_feature (38)..(38): n is a, c, g, or t
  misc_feature (42)..(42): n is a, c, g, or t
  misc_feature (156)..(156): n is a, c, g, or t
  misc_feature (159)..(159): n is a, c, g, or t
  misc_feature (542)..(542): n is a, c, g, or t
  misc_feature (548)..(548): n is a, c, g, or t
  misc_feature (577)..(577): n is a, c, g, or t
  misc_feature (589)..(589): n is a, c, g, or t
gcgagtngcggaggggaggtcgtgatggcggcgcggangtgntttctgtcctcagccgcagtccctgatttggagtggtatgagaagtccgaagaaactcacgcctcccagatagaactacttgagacaagctctacgcaggaacctctcaacgcntcngaggccttttgcccaagagactgcatggtaccagtggtgtttcctgggcctgtgagccaggaaggctgctgtcagtttacttgtgaacttctaaagcatatcatgtatcaacgccagcagctccctctgccctatgaacagcttaagcacttttacccgaaaaccttctccccaggcagaggagatgctgaagaagaaacctcgggccaccacttgaggtgagcagcaggaaatgccaacaagccctggcagaactggagagtgtcctcagccacctggaggacttctttgcacggacactagtaccgcgagtgctgattctccttgggggcaatgcctaaagcccccaaggagttctatgaactcgacttgtctctgctggnccctanagcgtggaccagagcctgagcacagcagntttttttgcgcng

SEQ ID NO: 3262 - DNA, 204 bp, Homo sapiens
tggtgagtccgggctcccgtggccgcgtgctgggaggagactggagcccggttaggaagaatggagttggcgactcgctaccagatccctaaagaagtggctgacatctttaacgcccccagtgatgatgaagagtttgttggcttccgagatgatgttcccatggaaaccctctcgtcagaggagagctgtgatagttttgac

SEQ ID NO: 3263 - DNA, 384 bp, Homo sapiens
  misc_feature (4)..(4): n is a, c, g, or t
  misc_feature (27)..(27): n is a, c, g, or t
  misc_feature (310)..(310): n is a, c, g, or t
  misc_feature (364)..(364): n is a, c, g, or t
  misc_feature (371)..(371): n is a, c, g, or t
taangcgacaaaataaatttagatcanggaatttttaccaactgtttcagacatgcacaagaagttgtgtttgaagccctaccaacatactcaaatatatatattatttttaaatatatatttgaggatacatatatagtgcatgtatatatgtatatgcacaaatacatatacacacacacacatatatgttttttaattggaaaagcactcgtatctactcacaaccagtgtctttgaggcggttgatggcattggaaagaagacgaacacaaccgagaaatccagcaccttgtttcttatggatctncttgtgattccatacactgatcgtaactgaatcagactttccaatatacctgtnatatttnaaaatgctgtagg

SEQ ID NO: 3264 - DNA, 1007 bp, Homo sapiens
aattttcagtagttttattgaaaaatgcctcttttgtttcagaaataaataatataaggcagtgaaattcacaatctgcagttaaaatataaaagcagcaattctatgttcatagtcttgcaaatgttttccaactacttttgataactaagaaatattatattctgaaaaaagttcatactaaatatacaacacaaacatgcaattccctctctgcagaataatctgcaatttggtataaatgttagtgtgtctaaaacaaggaggtttaaggcaatatggaactgtatcccgttgatgcactaacttcatctacatggcttaaggtttgtggttgttaaagagatgtatacgagcattctatgccccggcgtataaccgagatggaggaggaagataagtaattgcaatggagttgacgtttccctcctttttggttttaggaggggaattatttgaatcgtggtgtaattgaattgaaaataagtatagcaaaagataaactgcccgctcgaaatacacagcagctctgggttccaggacttaactgcttaacctaagagtttcactgaggctgcccgctgtgctaactaaaggcacacggcatgttctctctttgcggctttgttaacaagtattttgcagcatttcagggccaaggcaaatgtctacgactgcgtgcttggactagcttccgcagaacaagttctcacaacagaaaggtactcgggagagcacgctggagaacactccgaaagacggtccgcccatctgaccgaaagggaattcacactccccaacccggcgcgcgcgatctcgggtcacgccggtccttggcaggcccccagcgggtgggctcagaggtccttaggtcattggcgtagcccgattccgcgcgtcggtcacggccagaaggccgctcaaagaagcgcctcggcgagggccgcgataacttcattgggcgttgaggccccacaccccggaagtatatccggggggatccgtaa

SEQ ID NO: 3265 - DNA, 1624 bp, Homo sapiens
gagggatgcaggccagccagggatccagcgtcttccccatcgtcactctccatggcctccgtctacacacagtgttcgtctgcacagcttgtcagcgcgttatcatgacttctatttggcaccggcccgtctgtccactgtcctggcttgttccaagcgctgccttctccaactggggtcctggctgcagagctgtctgctccccacgttgggcaactccagccaagattcctacacccaaatgtgaccgtgttgctcacgaagaaggctcagctttgcgtgtgcccagccgtgtgcacagctcgtcccaactcctgcgggtggcacctgcctctcccacctccagtctttcccctgtgatgagcagatgaccaccgccctccagggtcagcgtttggctgtttgtgtgcctgcccacccgcctccctgtgcctgggcctgccctgtgcctgcacacaggagtggctcatggcgtttgccctacacggatgggctgtcctgggagctactggacagtcaccttggtgggaatgccagaggcatgggcattaggtccccccggccagcctccgttgccacatgggctatttttgtccatcgcgtgggacaacctagtattgggggaaaactcagtccactctaaagaagcatcggcgttttggatggacgaatgctgcttcatgcgtctccatgtcaatggactattttattcaactcgggtatttatgagtgtctcctctgtgccagccacgtgtgaaagaagaactccaagttactggacaccaggacaaaccaggtagatcactgcatccggttcctcctctttctgccgactctcccgggcaaccgttctgattcctggcatggagttgggggcgagctcatcagtacccagagcgcctggtgtgcagccaaaggcccccattttattagtcggtgtgttcagtatcacgctcaagacaagggccaacctattacttcacacacctcaaatacaaaaagtgcctgggaacgtcgatgaggtattaaaggaaaccactggtcttgtcagtcatgtacacacagaaaaaaaaaccagtcatttttatttttattttttgagacagagtttcgctcttgttgcccaggctggagtgcaatggtgcaatttcagctcactgcaatctctgccacccggattcaagcaattctcctgtctcagcctcccgagtagctggaattgcagacacccatcaccacgcccagctaattttatgtatttttagtagagatggggtttcaccatgttggtcaggctggtcttgaactcctgacctcaggtgatccacccacgtcaggctcccaaagtgctgagattacaggcatgaaccactgtgcccagccgaaaacaaccaagaattttttaacaataaaatgaccagcaagtaaacttgaaacaaaaatggacaaatatctaaaatatttttaaatgtatgtattttaattggcaaataatacttgtatatattgtttacaacttgttttaaagtatgaatacattgtgaaaaaaaaaaaaaaaaaaaaaaaaaaaaaaaaaaaaaaaaaaaaaaaaaaaaaaaaaaaaaaaaaaaaaaaaaaaaaaaaa

SEQ ID NO: 3266 - DNA, 270 bp, Homo sapiens
  misc_feature (98)..(98): n is a, c, g, or t
  misc_feature (144)..(144): n is a, c, g, or t
  misc_feature (153)..(153): n is a, c, g, or t
  misc_feature (163)..(163): n is a, c, g, or t
  misc_feature (208)..(208): n is a, c, g, or t
  misc_feature (252)..(252): n is a, c, g, or t
gttgggcagagagggggcttaaggcccctgggcacaggctgggatcagggcagtgagcgaagggcagctgtgtcctgccctcccttctggaggctggnggggagaggtcaagcccttggaaaatgtagcaaatgtctggatgtngcataagtncgtgtatgtncgggacaggccccgagaagctagtgactcctgcacacccccattncacaaatgaaatcacagcccaggagggagtgtagcttggcactngctgagaaatagagctct

SEQ ID NO: 3267 - DNA, 2195 bp, Homo sapiens
cgtccacggcagagccaaggggtcctggaggccgtgggggagactcggaaaccagagggtgggcggtgccagggtgcacacagcaaaccggggctgagccaggcctgggacaccgagcccagcctctcccctgcggtgtgactgtgggtcccagggtggacgtgccggggcccccagccagtgcaggagaggcctttgagcagcttacctgagaagggcccatggggagctgggacctccggcctccgtcgcaagggcctgcgctgctctgagggcccgtcggcagctgggtcagggccacggggagctgggacccccggcctccgtcgcacgtgcctgcgctgctctgagggcccgtcggcagctgggtgcccagggtcccgaaggctcagggtggccctgaggaggctggagctccaccgcatttttcatatgaggaacccagcacgtcccgcctgcctccggcccctggaggctttctcagtgacaaaccgtttctgtttctgtcttgttttctcagacaaacgagggagcaggagacaccccctgactttttttatttctctgactacgagaggcacaatgcggagattgctgccttccacctggacaggatcctggacttccgccgggtccctcccgtggccggcaggatggtcaacatgaccaaggagatccgggacgtcacacgggacaagaagctctggaggaccttcttcatctctccagccaacaacatctgcttctacggcgagtgttcctactactgctccacggagcacgccctgtgcgggaagccagaccagatcgagggctcgctggcggccttcctgcccgacctgtccctggccaagaggaagacctggcggaacccttggcggcgttcctaccacaagcgcaagaaggccgagtgggaggtggaccctgactactgcgaggaggtgaagcagacaccgccctacgacagcagccaccgcatcctggacgtcatggacatgacgatcttcgacttcctcatgggaaacatggaccgtcaccactacgagacttttgagaagtttgggaatgaaacgttcatcatccacttagacaatggaagagggtttgggaagtattcgcacgacgagctctccatcctggtgccgctacagcagtgctgcaggatccggaagtccacctacctgcgtctgcagctcctggccaaggaggagtacaagctgagcctgctgatggccgagtctctgcggggggaccaggtggcacccgtgctgtaccagccgcacctggaggccctggaccggcggctccgcgtcgttctaaaggccgtccgggactgcgtggagagggacgggctccacagcgtggtggatgacgacctggacactgagcacagagccgcctcggcgaggtagtgtccgccggccgctgcgctgcccgggacagagacagaggggccggacctcccagcaagcgcatgcgcccgtcgtgaattcagtgaattcagaggcaggacgggatcatccggagtcgggagctgctgccacaggaggcgaggctccccaggtctcataggacacattttgtcagtgtttgaccagaaaagcttgggaaggaagcgctgtctgtgctcacggacagaggcggccggcgccggaggcattccatcctttctgtagggaaaggagcctttatttactattttgtatttatatttgatgaataagtatataaacagagacgtgtacacagatgccaatcacctaccaaaccaaacacgaggaccgccctccctggttctgggggcccctcaaggccaagctcacccctcaagtgctctcacactcgggacctaattcaagtaaaaaccctttctccttcctggggcctcggctcctggagggctggagggtctcgtctgaggacgggaggaggctctcgctggacgtctggcctgtgcgctggtggacggatgcctacgcggttttggaggacccgatgaccaggcgtcctgcgagtccgcccgctggcctgcagcacccacctcggacttggctgtggacggttggtgcaagtgcatcctgcagggctggctgtgcgcagctgtgggctgacctttgcagagttttgtggaatagtttgcaatgtcataaaagtgcaataaaggtacagcagatgtgaaaaaaaaaaaaaaaaag

SEQ ID NO: 3268 - protein, 311 aa, Homo sapiens
FLSDKPFLFLSCFLRQTREQETPPDFFYFSDYERHNAEIAAFHLDRILDFRRVPPVAGRMVNMTKEIRDVTRDKKLWRTFFISPANNICFYGECSYYCSTEHALCGKPDQIEGSLAAFLPDLSLAKRKTWRNPWRRSYHKRKKAEWEVDPDYCEEVKQTPPYDSSHRILDVMDMTIFDFLMGNMDRHHYETFEKFGNETFIIHLDNGRGFGKYSHDELSILVPLQQCCRIRKSTYLRLQLLAKEEYKLSLLMAESLRGDQVAPVLYQPHLEALDRRLRVVLKAVRDCVERDGLHSVVDDDLDTEHRAASAR

SEQ ID NO: 3269 - DNA, 466 bp, Homo sapiens
ggggggagttctaatgtcactatggcaacaagggacatggatttggggctctgcaaagaggggagccgaatgtgagacttgaataaagtgaggtctctcaaagggaacagaagcagaaaggtttcccactagcacagatgagtctgggctctcgaactcagccagaaaagctcctatgaaacccaagagagctcctacacagagaaggagaagcaagcacttaaggtaggctgaagccagcagttaatgcctgcaagttggtcaccatggaaacaacacaagaaaatctccctccactacctcattctttaatatctgaaattctaaatttacaaaattaagatacaaagaatcaatcatgaagttgaagtttatatgagtgctttctgctgttgcatgttgctcaaggtacagtaaaaccttaacatcgggttgacgactgtaactttaaaaaaaaaaaaaaaaa

SEQ ID NO: 3270 - DNA, 528 bp, Homo sapiens
  misc_feature (301)..(301): n is a, c, g, or t
  misc_feature (332)..(332): n is a, c, g, or t
tttttccaaaagaggcgaaaccgtttatcaagtcggcgccggggcggtatctacagtatctacagtatctacatgtatctacaccgcctgcaggcggggctctcgggctgtctacactgcaactgccggccgggccgcgggcgacgcggtctcggggagaacaataaatatcacttccttccgcctccgaccgggcgctttggcactggcgggcggggacccccttggccctcggggccggggaaggacccgcggtggctccagggactggggaaccggatacttcgatagcccaaggggnctggggtggggcgagggcccccatggcttcnaggctggggaaggggagagccgcggtggcccctggggctgggggaacgtattccttgcttgcccttggggcagggtggccgggcccggcgaacttcggggctgtgcaggaccggggcgggagcgcgacagggcccgtgttatctggggcaatagtcgtaggagcccggcggcgcggctccggccgaccctcgtgcc

SEQ ID NO: 3271 - DNA, 376 bp, Homo sapiens
tttttttttttttgtgtttttttttttaagtcaaatcaataggtctttatttcatatctgtaatggtttagctctgcgggaagtgttagcagctatatgaattaggaagaatttagaagacaatccctaaacacatgaaatgtccaagtaagaagataacatatttatccaaatatttaaagtgaaatgctccagatatgggaagcttacagttttcaagcaaagctttttagaaaaaattatggaactattttaaagagagctaaacatttctttgccttaggcagaatatacagaacacagattcaccttttctgtacatctctagatgatcacgaatgtcaaatatcacactacactgtgatatggggattcc

SEQ ID NO: 3272 - DNA, 475 bp, Homo sapiens
ttttttaacatttaatattttttgcctagtgtcatggcagggaaagtagtatacggtttcaccccacatatgcatattccacattataggggctttctagtttccggtcatcaatttcccaacgaatgcccttccctatacctatccatcccaagccaatttctacattgtgctgcaatgcttagtaacgtcagtgaaatagtattcaaagtaaaaatcacgactcctcccatctccctgcccaatctaaaaataggtgcatgacagtgaattgctgaccaggcatttttttttctgagtaaaacaccttctgggcctgctgtcatccttactccgaatggtgctgcaagccagagtcaaaacatgtgaaataatacatgaataggtctataatactttttaacagctctttacaatatacggtcacttataaaaccagcgttaatatagagacctttgtgtgtgataatattct

SEQ ID NO: 3273 - DNA, 347 bp, Homo sapiens
gtcgacagggcagcgggtaaggttccccagccagccccaacacccttcccacttggcacccagaggggcatgtgggtggaggcctgactccaggctcatcctgcccacaccctctgggctgagttccttctttcccttggacgcccagtgctggccttggaggacggtcagctggaggatggcggtgggggaggctgtctttgtaccactgcagcatcccccacttctccacggaagccccatcccaaagctgctgcctggccccttgctgtaaagtgtgaagggggcggctgagttctcttaggacccagagccagggccctcaacttccatcctgcgggaggcct

SEQ ID NO: 3274 - DNA, 366 bp, Homo sapiens
tttttttttaatatatggagatgagggtctcagtttgttgcccaggctggtctcgaactcctggattcaagggatcctccggcctcggctcccaaattgctaggattacaggcatgagctactatgcctggccacatttttttaagttttgaatcatgcaaaccttttttagaatttcagaataagaatataaaaaatcacatcctaacactgaatatcaacagaaacaaatgtatctaactatatatataactctaactagatacccttaatggactatagtctaagtgcaaaaacaatgtccaaaaaaaaaaaacagttgtactaagtagtttgctgttggtagcagtattagtattgttatgc

SEQ ID NO: 3275 - DNA, 5547 bp, Homo sapiens
aagttttggagcgccggacaagctgaggtccgcgactcgtcgctaagattccccaaaactgagatttcaagaaaattcaccctttccgctttctttggcgcccttcaaccgtgaaggaaatgaaggttgagaacctggaacccgcttccaaagaccaagccctttctctgtgcctcacaacagtcttgcgctgtagctgtttttattacccctattttactactggggaggagatttgaggtcctgaaagtgaagtgacttgctggacgtcacttagcagaggagatggcgaaacctggattagaggcgatgccttctaactcccagcgtggacttgcctcctttcctgggggtgactgaatgcccagccagggacgcgacgtctctggccagcagaaatacggcctcctccccgccgactgggcaaagggggaccttgcggccaaggagggattcgcaggcgggccgggggtgggagcgggggccggagccggagccttggcccgcccccgggcggcgctgtgattggccggccgctccggcgggcgtcgcgattggccgtcctgcagccgttgagatttgaactcggtatttgtggctttgcccgcgcgttgccagactcagaggcggccctttgcctctgcctgccggggattggccggattctccgccgacttgaaaactgccttgctaattggtgcgtgttgtgcacgcgtgttttttccttttcatttcagcctgactgccggaatcagagccgcgggtgagatccccagccctgtgagcctgtaggagtagaatggctccccaaatgtatgagttccatctgccattatccccagaggagttgttgaaaagtggaggggtgaatcagtatgttgtgcaagaggtactgtccatcaaacatcttccaccacagcttagagcttttcaggctgcctttcgagctcaggggcccctggctatgctgcagcactttgatactatctacagcattttgcatcactttcgaagtatagatcctggcctcaaagaagatactctggaattcctgataaaagtggtatcccgccactcccaggagcttccagctatcctggatgatacaactttgagtggatcagatagaaacgcccatctaaatgccctcaaaatgaactgttatgctctgatacgtctcctggaatcctttgagaccatggccagccagacaaaccttgtggacctggaccttggtgggaagggtaagaaagctcggaccaaggcagcccatggctttgactgggaagaagagaggcaaccaattcttcagcttttaacacagctacttcagttggacatccgtcacctgtggaaccactcaataattgaagaagaatttgtcagtttggttactggctgttgctaccgccttctggagaatcccaccattaatcaccagaagaaccgccccactcgggaagccataacacacctgcttggtgtagccttgacccgttataaccatatgctcagtgctacagtgaagatcatccagatgctgcagcactttgaacacctggcacctgtactggttgcagccgtgagtctatgggcaactgactatggaatgaagagcatagtgggagagattgtaagagagattggacaaaagtgtccccaagagctgagtcgagacccttcagggacaaagggctttgcagcattcctgacagaactagcagaacgtgtcccagctatcctgatgtccagcatgtgcattttgctagatcacctggatggagaaaattacatgatgcgtaatgctgtgctggcagccatggcggagatggtgctgcaggttctcagtggcgatcaactggaagcagcagcccgagacaccagagaccagttcttggatactttacaagcccatggccatgatgtcaactcctttgtgcggagccgtgttttgcagctcttcacccgaattgtccagcagaaggctctccccctgacacgtttccaggcagtggtggctttagctgtgggacgtctggcagacaagtcagtgctagtatgtaaaaatgccatccagctgctggccagttttctagccaataatcctttctcctgcaagcttagtgatgctgaccttgccggaccactgcagaaggagacccagaaattacaagagatgagggcccagaggcgaactgcagcagcttctgcagtgctggacccagaggaggagtgggaagccatgctgccagagttgaagtctaccctgcagcagcttctacagcttccccagggagaggaggagattcctgagcaaattgccaatacagagacaactgaagatgtgaaaggacgcatctatcaactgcttgccaaagctagttacaaaaaggccatcattctcactcgagaagccacaggccacttccaggagtccgaacccttcagtcatatagacccagaggagtcagaggagaccaggctcttgaatatattaggacttatcttcaaaggcccagcagcttccacacaagaaaagaatccccgggagtctacaggaaacatggtcacaggacagactgtctgtaaaaataaacccaatatgtcggatcctgaggaatccaggggaaatgatgaactagtgaagcaggagatgctggtacagtatctgcaggatgcctacagcttctcccggaagattacagaggccattggcatcatcagcaagatgatgtatgaaaacacaactacagtggtgcaggaggtgattgaattctttgtgatggtcttccaatttggggtaccccaggccctgtttggggtgcgccgtatgctgcctctcatctggtctaaggagcctggtgtccgggaagccgtgcttaatgcctaccgccaactctacctcaaccccaaaggggactctgccagagccaaggcccaggctttgattcagaatctctctctgctgctagtggatgcctcggttgggaccattcagtgtcttgaggaaattctctgtgagtttgtgcagaaggatgagttgaaaccagcagtgacccagctgctgtgggagcgggccaccgagaaggtcgcctgctgtcctctggagcgctgttcctctgtcatgcttcttggcatgatggcacgaggaaagccagaaattgtgggaagcaatttagacacactggtgagcatagggctggatgagaagtttccacaggactacaggctggcccagcaggtgtgccatgccattgccaacatctcggacaggagaaagccttctctgggcaaacgtcacccccccttccggctgcctcaggaacacaggttgtttgagcgactgcgggagacagtcacaaaaggctttgtccacccagacccactctggatcccattcaaagaggtggcagtgaccctcatttaccaactggcagagggccccgaagtgatctgtgcccagatattgcagggctgtgcaaaacaggccctggagaagctagaagagaagagaaccagtcaggaggacccgaaggagtcccccgcaatgctccccactttcctgttgatgaacctgctgtccctggctggggatgtggctctgcagcagctggtccacttggagcaggcagtgagtggagagctctgccggcgccgagttctccgggaagaacaggagcacaagaccaaagatcccaaggagaagaatacgagctctgagaccaccatggaggaggagctggggctggttggggcaacagcagatgacacagaggcagaactaatccgtggcatctgcgagatggaactgttggatggcaaacagacactggctgcctttgttccactcttgcttaaagtctgtaacaacccaggcctctatagcaacccagacctctctgcagctgcttcacttgcccttggcaagttctgcatgatcagtgccactttctgcgactcccagcttcgtcttctgttcaccatcctggaaaagtctccacttcccattgtccggtctaacctcatggttgccactggggatctggccatccgctttcccaatctggtggacccctggactcctcatctgtatgctcgcctccgggaccctgctcagcaagtgcggaaaacagcggggctggtgatgacccacctgatcctcaaggacatggtgaaggtgaaggggcaggtcagcgagatggcggtgctgctcatcgaccccgagcctcagattgctgccctggccaagaacttcttcaatgagctctcccacaagggcaacgcaatctataatctccttccagatatcatcagccgcctgtcagaccccgagctgggggtggaggaagagcctttccacaccatcatgaaacagctcctctcctacatcaccaaggacaagcagacagagagcctggtggaaaagctgtgtcagcggttccgcacatccctaactgagcggcagcagcgagacctggcctactgtgtgtcacagctgcccctcacagagcgaggcctccgtaagatgcttgacaattttgactgttttggagacaaactgtcagatgagtccatcttcagtgcttttttgtcagttgtaggcaagctgcgacgtggggccaagcctgagggcaaggctataatagatgaatttgagcagaagcttcgggcctgtcataccagaggtttggatggaatcaaggagcttgagattggccaagcaggtagccagagagcgccatcagccaagaaaccatccactggttctaggtaccagcctctggcttctacagcctcagacaatgactttgtcacaccagagccccgccgtactacccgtcggcatccaaacacccagcagcgagcttccaaaaagaaacccaaagttgtcttctcaagtgatgagtccagtgaggaagatctttcagcagagatgacagaagacgagacacccaagaaaacaactcccattctcagagcatcggctcgcaggcacagatcctaggaagtctgttcctgtcctccctgtgcagggtatcctgtagggtgacctggaattcgaattctgtttcccttgtaaaatatttgtctgtctcttttttttaaaaaaaaaaaaggccgggcactgtggctcacgcctgtaatcccagcactttgcgataccaaggcgggtggataacctgaggtagggagttcgagaccagcctgaccaacatggagaaaccccatctctactaaaaataaaaaattagccgggcgtattggcgtgcgcctgtaatcccagctactcaagaggctgaggcaggagaatcgcctgaacccagaggcggaggttgtagtgagccgaaatcacaccattgcactccagcttgggcaacaatagcgaacctccatctcaaattaaaaaaaaaatgcctacacgctctttaaaatgcaaggctttctcttaaattagcctaactgaactgcgttgagctgcttcaactttggaatatatgtttgccaatctccttgttttctaatgaataaatgtttttatatactttt

SEQ ID NO: 3276 - protein, 1401 aa, Homo sapiens
MAPQMYEFHLPLSPEELLKSGGVNQYVVQEVLSIKHLPPQLRAFQAAFRAQGPLAMLQHFDTIYSILHHFRSIDPGLKEDTLEFLIKVVSRHSQELPAILDDTTLSGSDRNAHLNALKMNCYALIRLLESFETMASQTNLVDLDLGGKGKKARTKAAHGFDWEEERQPILQLLTQLLQLDIRHLWNHSIIEEEFVSLVTGCCYRLLENPTINHQKNRPTREAITHLLGVALTRYNHMLSATVKIIQMLQHFEHLAPVLVAAVSLWATDYGMKSIVGEIVREIGQKCPQELSRDPSGTKGFAAFLTELAERVPAILMSSMCILLDHLDGENYMMRNAVLAAMAEMVLQVLSGDQLEAAARDTRDQFLDTLQAHGHDVNSFVRSRVLQLFTRIVQQKALPLTRFQAVVALAVGRLADKSVLVCKNAIQLLASFLANNPFSCKLSDADLAGPLQKETQKLQEMRAQRRTAAASAVLDPEEEWEAMLPELKSTLQQLLQLPQGEEEIPEQIANTETTEDVKGRIYQLLAKASYKKAIILTREATGHFQESEPFSHIDPEESEETRLLNILGLIFKGPAASTQEKNPRESTGNMVTGQTVCKNKPNMSDPEESRGNDELVKQEMLVQYLQDAYSFSRKITEAIGIISKMMYENTTTVVQEVIEFFVMVFQFGVPQALFGVRRMLPLIWSKEPGVREAVLNAYRQLYLNPKGDSARAKAQALIQNLSLLLVDASVGTIQCLEEILCEFVQKDELKPAVTQLLWERATEKVACCPLERCSSVMLLGMMARGKPEIVGSNLDTLVSIGLDEKFPQDYRLAQQVCHAIANISDRRKPSLGKRHPPFRLPQEHRLFERLRETVTKGFVHPDPLWIPFKEVAVTLIYQLAEGPEVICAQILQGCAKQALEKLEEKRTSQEDPKESPAMLPTFLLMNLLSLAGDVALQQLVHLEQAVSGELCRRRVLREEQEHKTKDPKEKNTSSETTMEEELGLVGATADDTEAELIRGICEMELLDGKQTLAAFVPLLLKVCNNPGLYSNPDLSAAASLALGKFCMISATFCDSQLRLLFTILEKSPLPIVRSNLMVATGDLAIRFPNLVDPWTPHLYARLRDPAQQVRKTAGLVMTHLILKDMVKVKGQVSEMAVLLIDPEPQIAALAKNFFNELSHKGNAIYNLLPDIISRLSDPELGVEEEPFHTIMKQLLSYITKDKQTESLVEKLCQRFRTSLTERQQRDLAYCVSQLPLTERGLRKMLDNFDCFGDKLSDESIFSAFLSVVGKLRRGAKPEGKAIIDEFEQKLRACHTRGLDGIKELEIGQAGSQRAPSAKKPSTGSRYQPLASTASDNDFVTPEPRRTTRRHPNTQQRASKKKPKVVFSSDESSEEDLSAEMTEDETPKKTTPILRASARRHRS

SEQ ID NO: 3277 - DNA, 631 bp, Homo sapiens
tagaggcagggttttgctatgttgcccaggttggtcttgaacccctgggctcaagcgatctgtccacctcagcctcccaaagtgctggaactacaggcatgagccactgtgcctggttgacttttcctttccaaatgaacaagtttgggttgagttttcagtcactgagaccaaactggtcccaatgagtacaccagtaatcttagcctcagaggtgtgcatctactcacagaagggctcagtggcttccagtgttcaaggttactggattgcacaggagctgttataggacaagccccgtggatactggtggctcagaggtcttacagatgaggtttcactgggaaccaatcagaactcccttatttgcaagtaacagacaccaaactcgaatggacttgtgagaatatgttggctcatgtaattgaaaaagccacttggggctgggcgcagtggttcacacctgtaatcccagcactttgggattataggcatgagccactgtacctggcctcagctaagtatcttcatgggtggctctttcctttaatttatttaataataataaaaatttttatttttgggggagaaaggggccccatattttgcctaggctgcccttgaaactaag

SEQ ID NO: 3278 - DNA, 404 bp, Homo sapiens
  misc_feature (392)..(392): n is a, c, g, or t
tttttttttttttttttttttttctgttcaaaaaaattttattcctggggccctctggggtcccttgactcagccaaccccttccctgactcctttggggctggctttggtgcttgtgagggcctgggcaccaggacggttccatgggtcctcacgtgccccactctgtgaccctcctccatgctagtgcctgacccagtatgtaccacggaggacctcctccttccccactgcctggtccttgccaggaaggaagccaagtccccgagtcccaagagtaaagtgcggtgcctatttgccgggctggcatcagccatcaggcaattgagactgggggacactaagtccatggtcctctcaaaagcgggtgtccaggaaggaggtggagcctngttggggcctgg

SEQ ID NO: 3279 - DNA, 508 bp, Homo sapiens
ttttttttttttggtttgttgagttcaaagctgcggggtgggggagtcttccctggcattcaacaaccctggggttgcatttctctttaaagggctatttaggaaaacacaaggaacggattttaaaaagaagacagaaagaaatccagctcccagcttgcagcagcactgagaggttgtacattctaaaggacctggtcatttacagcaaagcctatggagggataattcccatttcagccgcatccaccttaacaaatgtggttcccactgctggcttcttagaactgtacagcaaagcctgtggggggataattcccatttcagccgcatccaccttaaacgtggatcccactgctggcgtcttagaactggagcggtgtctgctaaccagcctgctggaccctctgtctataggtaccgggtggtgacctgcaaatccagccttggagaatgaccgtccgaatctgcagcctgacacctcgccacctcggctttgaaaatggca

SEQ ID NO: 3280 - DNA, 381 bp, Homo sapiens
ttttttataaatatctcgttatattaaaaaaaaaaaaatgtccagggcccacctggctctgctcctgcacagaaagggttcatcttcactttgtgatctcacaggtcatggagtgagggtggtagagaggggcagaaatttcagggggaggggtggctgggaaaaagtaaaggggacaagccaatgtgtaactagcgctctccaagacatgcagaggagtgggggtggcctgtcaggggctgaaaagaaaagccagtgctgtacctggggggttgtctcactcctgtccccacaatccctgatactccggagtgatctgtcctttcagacacccactgtgaggtcccaatatcggggtttatcctttcctcagtcccagcc

SEQ ID NO: 3281 - DNA, 166181 bp, Homo sapiens; identical to SEQ ID NO: 1452

SEQ ID NO: 3282 - DNA, 467 bp, Homo sapiens
acgttttttttttttttttttttttttatgtaaaactgacttttattacaattaaaaaagaacaaagacaatttgataagtgcctttaattacaacatacctgctatttacatgtaatcatacttttatatatagcttgaataagttttattacatgtaaactataagatattacaagttaaactccagtcttttctggatattcaattgaaatactactggcagaaacatacagaaaacaaatacccatttcagttcctcaggtaccattactggttgaatgatcaagatctggccacagaagagaagtggaaatatgcatcaaaacaaaacttattcttaacatgactaacagtattgttatttaaaccctaaacataattaataattggatcattaaaaacacaacttcaatttatatagcacctttcttccgaagagttgaaagcattcgtgcttatctctat

SEQ ID NO: 3283 - DNA, 866 bp, Homo sapiens
gggacgggagaaaacttaggctaggtcgaggcctggtgttagacgccaggacatggtggcgagaccgtgcggggtgggggacgtgtcgcgcggcgggtggcctcggtcggtaccctgggcgcggagcagctgcctcattagtattcgtacccacgaggcggcgcagcgggccctcggggacagcgagcgtcgcggcatggcttatcactcgggctacggagcccacggctccaagcacagggcccgggcagccccggatccccctcccctcttcgatgacacaagcggtggttattccagccagcccgggggatacccagccacaggagcagacgtggccttcagtgtcaaccacttgcttggggacccaatggccaatgtggctatggcctatggcagctccatcgctcccatgggaaggacatggtgcacaaggagctgcaccgttttgtgtctgtgagcaaactcaagtatttttttgctgtggacacagcctacgtggccaagaagctagggctgcgtggtcttcccctacacacaccagaactggggaagtgcagtacagtcgtgatgctcctctgccccccccgggaagacctcaacgcccctgacctctatatccccacgatggccttcattacttacgtgctcctggctgggatggcacttgggcattcagaaagaggttctccccgggagggtgctgggcctgtgttgcaagcacagcgctggtgtgggtggtgatggaggtggctggccctgctcctgggcctctacctgggcacgtgcgcagttgacctgagcacctttcactggctggctaaaggggttacaataccgtgggaatgacctccagggtggcacgg

SEQ ID NO: 3284 - DNA, 347 bp, Homo sapiens
  misc_feature (2)..(2): n is a, c, g, or t
  misc_feature (297)..(297): n is a, c, g, or t
  misc_feature (311)..(311): n is a, c, g, or t
tnagtcttcaggatatcacaccacgtcttttcaaaaactaaagagaattcaaaaagggctgatggtaggctttgaacatggggttggctgtttccagtaaaactggaattcctgtcgttactgtttccttatcaaagaaggggcaagctcttttgccttttaggcagacatagcaaacgctttataattggcatagacataaaggataaaaggaaaataaccgtctgccgatggtccgtacttcttaaaaaacataggtaatagaaaatatacacaagtcagaatgtgaaatttaantaattggttggacnggaaatttcaaaccaggctctttcccatttttaagg

SEQ ID NO: 3285 - DNA, 470 bp, Homo sapiens
tcgaccgccccttggcttctgcactgatggtgggtggatgagtaatgcatccaggaagcctggaggcctgtggtttccgcacccgctgccacccccgcccctagcgtggacatttatcctctagcgctcaggccctgcgccatcgccgcagatccagcgcccagagagacaccagagaacccaccatggccccctttgagcccctggcttctggcatcctgttgttgctgtggctgatagcccccagcagggcctgcacctgtgtcccaccccacccacagacggccttctgcaattccgacctcgtcatcagggccaagttcgtggggacaccagaagtcaaccagaccaccttataccagcgttatgagatcaagatgaccaagatgtataaagggttccaagccttaggggatgccgctgacatccggttcgtctacaaccccgccatggagaatgtctgcggatac

SEQ ID NO: 3286 - DNA, 114 bp, Homo sapiens
ttctttctgtacataaaagtgacttaataaacagtgaatttcatacaggtaaaccctattataccctcagttctaaccattggcctatctcttgcgttttgttctaatgagatc

SEQ ID NO: 3287 - DNA, 486 bp, Homo sapiens
ctgcagaaaccacgactgtaatagtatttacctaatgggttaataatatctaccagcacaggtgggaatacaaaataaccaaaacacaagttatcctttcaaataaaatgctttgggaaaaagaacatcttttactaacagaaatttcttagcctctggaaggctatttgattcggtaacatatgccaggagacttcagcaatatcctgctccattgtagaaaacagcaatctgatccttttctctcctcaatcattaacgagattatgcatttggggtgtgataatcctccagggacaagtattctcaaatcatacgtttcagtttcttcttaaggtgcttaacaaagtctcgtctcatacatcttgctgcttccttgatgatggattcaaaaaatcgcttcctgactgcagtaggtccttgcactccttcaagcatttcgaagattttttcatatttttgtccaacgcatcggagttccttcac

SEQ ID NO: 3288 - DNA, 338 bp, Homo sapiens
tttttttttttttttttttttccggaaaaacgtttaacttttatttgatgcttctgaacataataaaataaatgaacctaaaacagcgctttaggcagcttggaagggaagatacattccatttaggttaaaatacatgggaacgatatgtacatttgggcagatattctgaactctactgggttaatggttatgcctgtacttgagcacatcagtgagaagtttcccatcacattttatctgaaatgaacaagatgtcagggcaatctgctagcaaaacctgcgctcggggtcagcgatgcttctccctctggaacactcatcatgcccgtccctag

SEQ ID NO: 3289 - DNA, 377 bp, Homo sapiens
ttttttttttaaagcctcagtagaagagtgcagagttacactgtcctgtttggggtgcccccctcccccttccgacctaagtgctgccaaggcttgtcagctctcagtccctgccactgtcattttcatcctcccacagcgtcataccactttctgttttttcaaacccatcacataagtgctggagcttggtaacgtttttagtggcttaatgttctcttttagaaattccagcacttctgtcacatatcaaataatacattcttcaaatacacacataataataatacattcttcaaataaatctcaagacatccaaagccagggaacctataagccaaaagctgagatctaaggcaggaccaggccccaatcaa

SEQ ID NO: 3290 - DNA, 575 bp, Homo sapiens
ttttttttttttttttttttttttgccatttttttctctttattataaaggttatatatgaacaagaatatataaaatatatatgtataaagagtattttaaaagtgaacatccatgcaatcaccacccaagacaagaaatagaacattgccagcatcccagaagcaccaggtgccactccccaatcacactgctgtacttctccacagaggaaatcattattctggttctggggacagcaaaacacttgcttttctttacagttgtatctcatatatataactatatacccttaaaacaatatagttgttcagtttatactgttttaaactttatacaaatggaatcatgttgatggcatccttctgtgatttgcttcttttgctctatgctatgtctgtgatattcatctatgttgtggttagctatttccttcattttcaccactgtgtagaattctactgtttcaatataaatgccatggtacaatttaaccattctaccattgctgaatatttggttcatttctaacttttggatattgcagtgctgctatgaacattaaaaaatttttt

SEQ ID NO: 3291 - DNA, 374 bp, Homo sapiens
tatgccacttgctattcacctgtaggctgctactgagaaattccattcaacagcctggctcataacactatatggcatttgtataaaacatctaggcttgatacatgtaacactactggtattgcataggactacccccgtagataatgcactgaaactaactttataacattgcttcttgggaaaacattggtatcaagtaacagtaacttcccaataccgtatttctttcttaaaaataaatcccacaagtttgctgaaataaacccccatttaaatgacccataatgggccgtttaatgctatgggtatcaaatctccaagaatattggctatttttcatgtccctaaaaaaaaaaattttgttaggtttg

SEQ ID NO: 3292 - DNA, 643 bp, Homo sapiens
cctcggaagatgttccggcacacggacagccctctttcccatcctactgcagacgttatctggatgaatcggatgaggtgatcctgaacgacctggaggtgctgttgcgagcataatcgcttcctcccccgcaggccagatctggatcgacccaggccccctcgatggccctgacctccaggccagccactcagagctccaggtgcccacccctggctagagccggtcctactgatacacctctggtaccaaaggctcagaatgttctccttcaactcccaccatgaattcttacgttcaataagttcatgatccacaccttctccaagagattcacgcagcgcgaactggcaagctcctgcgaggtcacgatggccctttcatcatcaggcagctgtgcctcctgctgactgcggagaacatcttccactcacatggcatgacatcctgctgcgcggaggaggcacctcatagttcgcctcgatccatggtccactgccctcagacatccatcctgctgacctccacgagagctcttccagctgaggaaccaggctgaaggacctgcagacctggagagccgaacctgtctgctgcctgtcccgctcctggtgcccaagccagtccccaccggtgtccctcg

SEQ ID NO: 3293 - DNA, 356 bp, Homo sapiens
  misc_feature (309)..(309): n is a, c, g, or t
  misc_feature (320)..(320): n is a, c, g, or t
  misc_feature (340)..(340): n is a, c, g, or t
tcaaatctccaaaaaaaaaagtttatttataaaatactgacagtttgacaggacacgggacttcttgtggtatatatttcaaatcaatttctttcttacctttcatttaaaaaataaacctgctaacacgctatatgacatagagatatatattttttttcttacagacagacacctgccataatgaatactctccccataattttttgttatatcttttaaatcaaaaaataaagatttgtgttgatttttgtttctggagtctagatggatggagaaaggtaacacgtttaaatgcttttggttatnctgatgggaancaaagagaaggggggtgggncccgagggggcacctg

SEQ ID NO: 3294 - DNA, 749 bp, Homo sapiens
tgctggtggccagtggagaggcgctggccgcacttcccgtcggggagagagtgtaatatggcgaagacctacgattacctgttcaagctgctgctgatcggggactcgggggtggggaagacctgtgtcctgttccgcttctccgaggacgccttcaactccacttttatctccaccataggaattgactttaaaattaggaccatagagctcgatggcaagagaattaaactgcagatatgggacacagccggtcaggaacggtttcggacgatcacaacggcctactacaggggtgcaatgggcatcatgctggtctacgacatcaccaacgagaagtccttcgacaacatccggaactggattcgcaacattgaggagcacgcctctgcagacgtcgaaaaagatgatactcgggaacaagtgtgatgtgaatgacaagagacaagtttccaaggaacggggagaaaagctggccctcgactatggaatcaagttcatggagaccagcgcgaaggccacatcaatgtggaaaatgcatttttcactctcgccagagatatcaaagcaaaaatggacaaaaaattggaaggcaacagcccccaggggagcaaccagggagtcaaatcacaccggaccagcagaagaggagccagcttttccgatgtgttcttctggtgaggaacacggcttatctgagcctcgcttcagcccagtgatgtgctgtctggtgagcctatcaacggggc

SEQ ID NO: 3295 - DNA, 269 bp, Homo sapiens
tttgttcttttttttaaccttttcaaatagacttaaccctttgagcactgagtttattttgagtgttctttgatttctaataaatacctttaaaaatcatgtgcaaaatagttctgatgcctgccagggatgtctttcccggtctcgtttattcagactgctcaaaacaaatgacaatatgatgctaataaatatgtataatttaaacatggaacctctatcaatatagatgtactgtataggcaaaacaaactatcatactttgcttt

SEQ ID NO: 3296 - DNA, 234 bp, Homo sapiens
atttactgtaggactagtggcagtgagtctcatattgctgtcatataaaaggtaaaccttccagaagaactttgaaaatttcagtagcctaaagaccacgctttgagaaactcgtaaaggtttgtcatagaggttttaaaagtctgatcaaataattttaagctttagttgcctactaaaaagtaggatgcagtacaagtttgtcctttacttggtaaaaaaaaaaaaaaaaaa

SEQ ID NO: 3297 - DNA, 489 bp, Homo sapiens
tttttttttttcagtgaacatgtttttattgaacaccaacttaatttcaggaacatttcaggtacattgtcagaaataaagactcttaagaatgtattattatgtacccaatactggtttcaggcctttacatgtattctcatgaaactctatgaagtagatattattatcaatattcctactttacagatgaggaaacccaggcctggagaggtcaagcaacttgctcaagtggcacagctggagagtggggagctgggacttgagcccaggtagtgtgtccccagcaccttcaactaaactccattctgtgctgccctttggaacacccactcaatggccttcacactccatgtcctacttgggaggacatgtgatctcaacagcactcacaaatgaaggctttcagacaggatattgaagatggtaagatcagtctcatgtataaagcattttttaaaagtaaagcatattatatgctagtcatat

SEQ ID NO: 3298 - DNA, 373 bp, Homo sapiens
  misc_feature (268)..(268): n is a, c, g, or t
  misc_feature (352)..(352): n is a, c, g, or t
  misc_feature (363)..(363): n is a, c, g, or t
ttttggtgtgtgataatttttagttgagtgccagacatcaagcatagaagagcagtagagactgaggtaaatagtatttacggctggaaatcaacatgcctcttcttctgtgaagttgtcagcatggaggtgagaaggctgagtcaatctcaggggttgacctgagtttgagttttgttgttacttccagtgcaccacagccttcacattcttacaaaggtagactgcggttatcttgaactttgagttggagctggggtgccagggntttttgtgtgagtgttcttgacctccctcaacttccagccatcctgcatgcctgggccttaaatgaggtaattctccatgctcngactcttctcncagcagtggc

SEQ ID NO: 3299 - DNA, 401 bp, Homo sapiens
  misc_feature (38)..(38): n is a, c, g, or t
  misc_feature (51)..(51): n is a, c, g, or t
  misc_feature (76)..(76): n is a, c, g, or t
  misc_feature (96)..(96): n is a, c, g, or t
  misc_feature (119)..(119): n is a, c, g, or t
  misc_feature (126)..(126): n is a, c, g, or t
  misc_feature (133)..(134): n is a, c, g, or t
  misc_feature (146)..(146): n is a, c, g, or t
  misc_feature (228)..(228): n is a, c, g, or t
  misc_feature (236)..(236): n is a, c, g, or t
  misc_feature (252)..(252): n is a, c, g, or t
  misc_feature (273)..(273): n is a, c, g, or t
  misc_feature (283)..(283): n is a, c, g, or t
  misc_feature (285)..(285): n is a, c, g, or t
  misc_feature (287)..(287): n is a, c, g, or t
  misc_feature (301)..(301): n is a, c, g, or t
  misc_feature (304)..(304): n is a, c, g, or t
tttttttttttttttttttttttttttttttttttttnccaggggcaaatnataaggaagtttttattgggccctntacagaagagaaatgctccnttgtcaaaaaactacaaaggganccctggntctgggnntgctatgaaganaactccctccccagtgagcccagggaacaggctggatgctggacaaagtttgggagggagctccaggcccagggtcctccanttggggtntccccctttatgtttntaaaaaccgcagattggagtntttagaggantntntccccctgcaagtnttnccgttggatatgaaacacacagaggcaaaaccccaaggtgacaaatgagttgaaaaccttaagggtgacaagtgggacagacggccccccagttggg

SEQ ID NO: 3300 - DNA, 369 bp, Homo sapiens
  misc_feature (203)..(203): n is a, c, g, or t
aaactttaaaatatactgaaaacataagggactaagcttgttgtggtcacctataatgtgccagataccatgctgggtgctagagctaccaaagggggaaaagtattctcatagaacaaaaaatttcagaaaggtgcatattaaagtgctttgtaaactaaagcatgatacaaatgtcaatgggctacatatttatgaatgantgaatggatgaatgaatattaagtgcctcttacataccagctattttgggtactgtaaaatacaagattaattctcctatgtaataagaggaaagtttatcctctatactattcagatgtaaggaatggtatattgcttaattttaaaccatccagactttactgg

SEQ ID NO: 3301 - DNA, 198 bp, Homo sapiens
agacacttcattttcctagtccatccctcatgaaaaatgactgaccactgctgggcagcaggagggatgatgaccaactaattcccaaaccccagtctcattggtaccagccttggggaaccacctacacttgagccacaattggttttgaagtgcatttacaaggtttgtctattttcagttctttactttttacat

SEQ ID NO: 3302 - DNA, 278 bp, Homo sapiens
cgccaggtataaattgttcagtctcatgcatttccaattagctgatcattgttggagatgaggacaaaatcctttgtcctcactagtttgctttacatttatgaaaagtattatttttgtccaagtgcttatcaactaaaccttgtgttaggtaagaatggaatttattaagtgaatcagtgtggcccttcttgtcataagattatcttaaagctgaagccaaaatatgcttcaaaagaagaggactttattgttcattgtagttcatacattcaaag

SEQ ID NO: 3303 - DNA, 495 bp, Homo sapiens
ctcaggtggatcgccgcggcccctcctcccagagcggcagccttttcccgcgcgtgctgccttcgccgctcgggccgcccgggggaaaacatggcgtctgccctggagcagttcgtgaacagtgtccgacagctctcagctcaagggcaaatgacacagctttgtgaactgatcaacaagagtggggaactccttgcgaagaacttatcccatctggacactgtgctcggggctctggatgtacaagaacactccttgggcgtccttgctgttttgtttgtgaagttttctatgcccagtgttcctgacttcgaaacgctattctcacaggttcagctcttcatcagcacttgtaatggggagcacattcgatatgcaacagacacttttgctgggctttgccatcagctaacaaatgcacttgtggaaagaaaacagcccctgcgaggaattggcatcctttagcaagccattgacaagatgcagatgaataca

SEQ ID NO: 3304 - DNA, 455 bp, Homo sapiens
ttttttttgctcctgaaataaaatcacagcatcttattgcatatactacatcatccaaggtcaaaaccctttcatagagacatttaaaactataaccaagtaaaagagaaaatagatgcaaatttgcttttacaaaatttgaaaatcaaccaaaagagtaaggcacaagatgcagtcagctacaaagcacttcagagaacagcgctttgctctcaggtctgggacccaccccctgggcaaggccgcctggcagcaggcaggaaccaaacccctgccaccttcactcactcccagggttcctctttgcaggatggtggggagcgcaggcaccaaggcaggaaggccagggcaggaagatgccccgcgtccttcactttccctcagtgtgagcacaccaagttccctctaaccaggagaacaggaccctaggcaccaaaagtcaagcatgagggact

SEQ ID NO: 3305 - DNA, 243 bp, Homo sapiens
ttttttttaatagatagagaagtttttactcatgcatttgtcagaattctttcagttgcaagtaagaaaagaccacttcaagccagcttgagcacagagggaactgattggcacacatccatgaaatgtctagaggtgatccaccagcttcagacatagctggatccagggatggatctgatgcccttgtggctcagtctctctccgtctcagcaatggtctcctgtcttggctgtccattct

SEQ ID NO: 3306 - DNA, 3158 bp, Homo sapiens
cctcgctcccggaccccacggctgcaaactgatctggcgcgcggggaggaggagagcgcaggcgagcgaacccgcgagagagggagagagcgagcgagcaacagcgagagcgagagcgagagagccgggaggcagagggagtagtgaccgccttccggagccgggattcatgcctgtcctcgggaccagcgaaggggactttacggctgagtatgagccaggctgctaggagccaggtacccccacgcctgcagtccccgcgccgtgcccggaatgcgagctggacgcagggctctcccaagttcccaccgagccgaataaaaagcgtccgcccgcagctctccgccaaagacggacattgactccaggactccacagaatggagcaagaatgagaggaaaaaggccggcagaaaagcatgaactggaggtttgttgagctcctctacttcctgtttatatggggccgtatctcagtgcagccctcccaccaggaaccagctgggacagaccaacatgtctccaaggaatttgattggctcatttcagacagggggcctttccaccactccaggagctacctatcctttgtggaaagacaccgtcaaggatttacaaccagatataaaatatacagggagtttgcccgttggaaggtgaggaacacagccatcgagaggagagatctggtccgccatccagtgcccctcatgccggagtttcaaaggagcatccgcctgcttggcaggagacctaccactcagcagttcatcgataccatcatcaaaaagtacggcacccacctgctcatctcagccacattgggaggggaggaggctttgaccatgtatatggacaaaagtcgcctcgacaggaagtcagggaatgccactcaaagtgttgaagctctgcaccagctcgcatcatcctactttgttgaccgtgatggtaccatgaggaggcttcatgagatccagatatcaactggagcaatcaaggtcacagagacacgcactgggcctctgggctgtaacagttatgacaatctggactctgtgagttccgtccttctgcaaagcacggagagcaaactgcaccttcaaggtcttcagataatctttcctcagtatctgcaagagaagtttgtccagtcggccttgagctatatcatgtgcaatggggagggggagtacctgtgccagaacagccagtgtcgctgccaatgtgccgaggagtttccgcagtgcaactgccccatcacggacatccagatcatggagtacacgctggccaacatggccaagtcttgggccgaagcttataaggacctggagaattcagatgagtttaaatcatttatgaagcgcctccccagcaaccacttcctgaccatcggaagcatccatcagcactggggcaatgactgggacctgcagaaccgctacaagctcctgcagagtgccacggaggcacagagacaaaagatccaacgcactgcccgcaagcttttcggcctcagtgtacgctgtcgccacaatcccaaccaccagctgcctagagagaggacaattcagcagtggcttgcaagggtccagtcactcctctactgtaatgagaatgggttttggggaaccttcctggagagccagcggagctgcgtgtgccacggcagcaccacgctgtgccagcgccccatcccctgcgtgataggcgggaacaacagctgcaccatgtgcagcctggccaacatctccctctgtggctcctgcaacaagggctacaagctgtatcgaggccgctgtgaaccacagaacgtggactcggagcggagcgagcagttcatcagctttgagactgacctggacttccaggacctggagctgaagtacctgctgcagaagatggactcacgcctctacgtccacaccaccttcatcagcaacgagatccgcctcgacaccttctttgaccctcggtggcgcaagcgcatgtccctcactctcaagagcaacaagaaccgcatggacttcatccacatggtgatcggcatgtccatgcgcatctgccagatgcgcaacagcagcctggaccccatgttctttgtctatgtcaacccctttagcgggagccattcggagggctggaacatgcccttcggggaatttggctacccacgctgggagaagatccgtctccaaaacagccagtgctacaactggactcttttgctgggcaatcggtggaaaacatttttcgagacggtccacatctacctacgtagtcggactcggctacctaccctactgcgaaatgagactggccagggccccgtggacctgtcggatccctccaagaggcagttctacatcaagatctcagacgtgcaggtgtttgggtatagcctgaggttcaacgccgacctcctgcgcagtgcagtgcagcaggtcaaccagtcctacacacagggcggccagttctattcctcttcgtcagtgatgctcctcttgttggatattcgggaccgaattaatcgcctggcccctcctgtggccccggggaaaccccagctggacttgttctcctgtatgctgaaacaccgcctgaaactgaccaacagcgagatcatcagggtgaaccacgccttggacctgtacaacacggagatcctcaaacagtcggaccagatgacagccaaactctgctaacccgggactccttgccatggacttttcctgttgttgtacacacacaacagaacaaaatgaagcaaaacaaaacaaaaaaacccacaaaaatttgtaaaatgtaattaatattcaaagaaaaggaggaaaatcttcatttgttggaaatgaaaacgttctagcaactgtataaaagcgttgggcatgtttgttatttctatactcactctgtcatgaagaagggtctcagccttttgtggagcattgagggagttgcttcttaggcctcaggtgctgtattgggggagaagggagaaagcatatgcaatgaattgtaaagatctctgctgtgcaggtgctaagattaaacactaaaaagaaagagagatatatgtaatgtacaactgacactgccatttttcctttttggaggaaatggacatagataaagaagatatttcttcggttaagattt

SEQ ID NO: 3307 - protein, 761 aa, Homo sapiens
MNWRFVELLYFLFIWGRISVQPSHQEPAGTDQHVSKEFDWLISDRGPFHHSRSYLSFVERHRQGFTTRYKIYREFARWKVRNTAIERRDLVRHPVPLMPEFQRSIRLLGRRPTTQQFIDTIIKKYGTHLLISATLGGEEALTMYMDKSRLDRKSGNATQSVEALHQLASSYFVDRDGTMRRLHEIQISTGAIKVTETRTGPLGCNSYDNLDSVSSVLLQSTESKLHLQGLQIIFPQYLQEKFVQSALSYIMCNGEGEYLCQNSQCRCQCAEEFPQCNCPITDIQIMEYTLANMAKSWAEAYKDLENSDEFKSFMKRLPSNHFLTIGSIHQHWGNDWDLQNRYKLLQSATEAQRQKIQRTARKLFGLSVRCRHNPNHQLPRERTIQQWLARVQSLLYCNENGFWGTFLESQRSCVCHGSTTLCQRPIPCVIGGNNSCTMCSLANISLCGSCNKGYKLYRGRCEPQNVDSERSEQFISFETDLDFQDLELKYLLQKMDSRLYVHTTFISNEIRLDTFFDPRWRKRMSLTLKSNKNRMDFIHMVIGMSMRICQMRNSSLDPMFFVYVNPFSGSHSEGWNMPFGEFGYPRWEKIRLQNSQCYNWTLLLGNRWKTFFETVHIYLRSRTRLPTLLRNETGQGPVDLSDPSKRQFYIKISDVQVFGYSLRFNADLLRSAVQQVNQSYTQGGQFYSSSSVMLLLLDIRDRINRLAPPVAPGKPQLDLFSCMLKHRLKLTNSEIIRVNHALDLYNTEILKQSDQMTAKLC

SEQ ID NO: 3308 - DNA, 434 bp, Homo sapiens
gactgtcctgtgacaccaaggctccagtctgacttaatccagccttgagtcatcacctgacactggacactttgtttatccaagcaaaagtcaggatttctgttagcaagcaaaggaactgctcatggataagaaattaacagtgtgtgccataattgcagattgccgccaagcatcttctcaggctgacactgtgccaaacaagggattatagagatgaagatgcagcttccatccctgaaagctcacagtccattctctcagggcaatcccggtaacctcctcatcacaatcatccatccagatcatggaagtccctttactccccaaataagaaggagtagcaggaaaaagtgacctcatcaagctgactcgagtttttccaaaagcaaataaataaataaataactttttaaccgtgcaaaaaagaaaag

SEQ ID NO: 3309 - DNA, 564 bp, Homo sapiens
  misc_feature (29)..(29): n is a, c, g, or t
ctccttgcggctccatcattcaggcctgntcatctctcacctggactgctgtgaccttcattcattcccaggagaagtccagaaatggcttcagacatacctggatctgtgacgttgcccgttgcccccatggcggccaccggacaggtgaggatggcgggggccatgcctgcccgtggaggaaagcggcgttccggaatggacttcgatgatgaagatggtgaaggccccagtaaattttcaagagagaatcatagtgaaatcgaaaggcgcagacggaacaagatgactcagtacatcacggagctctccgacatggtccccacatgcagcgcactggctcggaagccagacaagctcaccatcctccgcatggccgtctcgcacatgaagtccatgaggggtacagggaacaagtccaccgatggcgcgtacaagccttccttcctcacagagcaggaactgaagcatctcatccttgaagcagctgatggatttctgtttgtggtggctgctgagacagggcgagtgatttatgtgtctgactccgtcacccctgttctg

SEQ ID NO: 3310 - DNA, 472 bp, Homo sapiens
ttttttaagatttggggctttcccctcccccaccccgtagtgagaaggttggaaggagagatggtgaggatgggatggatggaggggcatcctgctcttgtcaatatgccaaggctagtcaatggagggtgcagcacaagccggtcaccgaagtgactacaaagaagaagtgccagggaatcgcagcatggaccttcctgggtttgggttatcgtgattcgtgtttaaaccagaaagactaattttgccctgcaccaaaaccagcatctcccctcttcactactcattcatgtaagaaataggaatgagaatttcagagcccttcttgcttagcatcaaaggatgaggtcggggaaaatcaactcaagaaattgagcatgtgacttcaaagcttctcctcccattaatcccagtctgatgggatggtatttggtaaggaaaggtgagcctggggatcaaccccactaatgct

SEQ ID NO: 3311 - DNA, 684 bp, Homo sapiens
ggagatcagcaccaaatccacagaggcatctgagaagtcagctggggagactctgtgaaagtaatgaaggtcatcaatgcggagagaccttgagccagactgcgaaccttcttgtgcacaagagttaccctaccgaagctaaaccctctgagtgcactaagtgtggcaaagccttcgagaatcggcagagatctcacactggacagagaccgtgtaaggaatgtgggcaagcctgcagctgcctctcctgccaaagccctcctatgaaaacgcagactgtagagaaaccctgtaattgccaggactcaaggacagcatctgtgagatacgtgaaaagtctcagcagtaaaaagtcttatgaatgtcagaaatgtggaaaagctttcatttgtccctcatctttcaggggacatgtgaatagtcatcatgggcagaaaacccatgcatgtaaagtatgtgggaagacctttatgtattactcctaccttacacggcacgtaagaactcacacaggagagaaaccctatgagtgtaaggagtgtgggaaagccttcagctgtccctcgtactttcgagaacatgtcagaacacacactggagagaaaccgtatgaatgtaagcattgtggaaaatcattcagctgttactcctcctttagagatcacgtgaggccacactggagag

SEQ ID NO: 3312 - protein, 227 aa, Homo sapiens
RSAPNPQRHLRSQLGRLCESNEGHQCGETLSQTANLLVHKSYPTEAKPSECTKCGKAFENRQRSHTGQRPCKECGQACSCLSCQSPPMKTQTVEKPCNCQDSRTASVRYVKSLSSKKSYECQKCGKAFICPSSFRGHVNSHHGQKTHACKVCGKTFMYYSYLTRHVRTHTGEKPYECKECGKAFSCPSYFREHVRTHTGEKPYECKHCGKSFSCYSSFRDHVRPHWR

SEQ ID NO: 3313 - DNA, 385 bp, Homo sapiens
aacatggtaattattactttttattaatttagagcatttgaagtataaaaataaaaggcttttgacatactgtatatacatacatagccttctgttgtacatcctttccaacgtgttttttaaaatttatatttcagtccaatattcaataaaagggtcattaaaaacaaaacaaaattgtgaaaaaaaagaaataagaatgtgtctctgttgcacaactgcattctatccttgcaggtaatattcttacatccaatgagagcgctgcctgcatagaggtcatgaaattgaacctttaacctctccatgtggatcagatagaaaaggatttctgaagagtgcatttgccagtttaaaagcaacacttttaccatctatgagatag

SEQ ID NO: 3314 - DNA, 801 bp, Homo sapiens
gaattccgcaaaccatttatagccaccctcgccctttgagtacaagagaaaacatacaacatactgtaggtttatttttattcaaaaagttactgtctcaagacataaatacaaatcagaaaacagtacaattaggacaatagaatgtggaggacaacaggttagagtaatatataaaacatttttagctggttgaaaacaaagctgtaagaactgctttcacaaagaagtactcctttccaagagtgagaaaaaaaatccaaacttaggtttaaaatcatatatacagtcctctcagccagttctagttattgcagtggtgtgtaaaacaacataggcaatacttttgcacataacaatatttgttgatggaaaatctgttagacaagtctggattcatttgttattaaccatgacttaataaaataattgtatcatgatctttttagctaacctatggtttttggctaccacagcccaatgcttgatttctgactaaaaactgaaagccttttggtattcacccatctgaagatattcttgtattgcaagcatattaaggcatggaatgattaaaataatatacctcaagaactgagagacgactgacaatagatagatacacatgtaatataagttaatattttgttttaaacgatgtctagctgcctaagccttgcaaaatgagttgatgtcaaaatggcaagtagccactttctgttttaaactaatttatttgtgaaaggacataaaatgaagtttaaagcttagctttcaaagaatattatgggttatgaattc

SEQ ID NO: 3315 - DNA, 459 bp, Homo sapiens
  misc_feature (278)..(278): n is a, c, g, or t
  misc_feature (391)..(391): n is a, c, g, or t
  misc_feature (412)..(412): n is a, c, g, or t
  misc_feature (453)..(453): n is a, c, g, or t
ttttttttttttttttttttttttaaatctaaaggagtttaattgagcaacaaaccatttgtgaatcgggcagcccctagaatcacaacagattcacagacactccaggggtgcctcacggtcagaacaaatttatagacaaaaaaggtcaagtgacatacaggaattggaagtgaggtacagaaacagtgaaattggttacagctcggcatttgccttatttgaacgcagtttgaacattcagcagtctatgagtggttgaagtatggccgctgggnttggccaaaactcaactattgttataggtgcatactactaagttaggttttcaattttgtctgactattaagctaggttacagttcatccacaaggacttatatatataaggnaaggagtcctttcttaggccntagttagttttgctttaacattccccccttttagcaaaggnttgaac

SEQ ID NO: 3316 - DNA, 593 bp, Homo sapiens
tttttttttttttttttaataacacacagtcaaggggcaagtctcccactctttactaattcaactatatgcttaatcaactaatagttgaagcacattgattccaaaactcccaccaatcagcctagcttccagtgtcatcctattttctctatactcctgagtcttcaccgtctccattctgttcatttatagaatcacattatccaaggctaatgagtcctcattgagcttagcacatcctgattcatttctaaactcaccagaatcattgcttgtgagactgtttccagaaacaaatggcttgcgcactgcagatggcacaccacagacagtcccatgtgccacccactaaagctaaaaagtcacctggtaatggagttcaggccgtttcctctaatgacagaagtctatgattttttaaaataactggttaattcaaggcaagagtttgttcttttaccgacacaaaaagaaattaagagttattatatgagagccttaaacttaggcacttaaacctcaaatcccatcatttgttgtattggggctaagaactaaaactcatcttcaaacgtcatcttccaacacat

SEQ ID NO: 3317 - DNA, 2061 bp, Homo sapiens
gcagtcactgccgaccggctggctgggccttgcggcgtgaggaccccggcggcgccgcagtcccgcgagccatggcccagtccggcggggaggctcggcccgggcccaagacggcggtgcagatccgcgtcgccatccaggaggccgaggacgtggacgagttggaggacgaggaggagggggcggagactcggggcgccggggacccggcccggtacctcagccccggctggggcagcgcgagcgaggaggagccgagccgcgggcacagtggcaccactgcaagtggaggtgagaatgagcgtgaggacctggagcaggagtggaagcccccggatgaggagttgatcaagaaactggtggatcagatcgaattctgcttttctgatgaaaacctggagaaggacgcctttttgctaaaacacgtgaggaggaacaagctgggatatgtgagcgttaagctactcacatccttcaaaaaggtgaaacatcttacacgggactggagaaccacagcacatgctttgaagtattcagtggtccttgagttgaatgaggaccaccggaaggtgaggaggaccacccccgtcccactgttccccaacgagaacctccccagcaagatgctcctggtctatgatctctacttgtctcctaagctgtgggctctggccaccccccagaagaatggaagggtgcaagagaaggtgatggaacacctgctcaagctttttgggacttttggagtcatctcatcagtgcggatcctcaaacctgggagagagctgccccctgacatccggaggatcagcagccgctacagccaagtggggacccaggagtgcgccatcgtggagttcgaggaggtggaagcagccatcaaagcccatgagttcatgatcacagaatctcagggcaaagagaacatgaaagctgtcctgattggtatgaagccacccaaaaagaaacctgccaaagacaaaaatcatgacgaggagcccactgcgagcatccacctgaacaagtccctgaacaagagagtcgaggagcttcagtacatgggtgatgagtcttctgccaacagctcctctgaccccgagagcaaccccacatcccctatggcgggccgacggcacgcggccaccaacaagctcagcccgtctggccaccagaatctctttctgagtccaaatgcctccccgtgcacaagtccttggagcagccccttggcccaacgcaaaggcgtttccagaaagtccccactggcggaggaaggtagactgaactgcagcaccagccctgagatcttccgcaagtgtatggattattcctctgacagcagcgtcactccctctggcagcccctgggtccggaggcgtcgccaagccgagatggggacccaggagaaaagccccggtacgagtcccctgctctcccggaagatgcagactgcagatgggctacccgtaggggtgctgaggttgcccaggggtcctgacaacaccagaggatttcatggccatgagaggagcagggcctgtgtataaataccttctatttttaatacaagctccactgaaaaccaccttcgttttcaaggttctgacaaacacctggcatgacagaatggaattcgttcccctttgagagattttttattcatgtagacctcttaatttatctatctgtaatatacataaatcggtacgccatggtttgaagaccaccttctagttcaggactcctgttcttcccagcatggccactattttgatgatggctgatgtgtgtgagtgtgatggccctgaagggctgtaggacggaggttccctgggggaagtctgttctttggtatggaatttttctctcttctttggtatggaatttttcccttcagtgactgagctgtcctcgataggccatgcaagggcttcctgagagttcaggaaagttctcttgtgcaacagcaagtagctaagcctatagcatggtgtcttgtaggaccaaatcgatgttacctgtcaagtaaataaataataaaacacccaactgggagtgctg

SEQ ID NO: 3318 - protein, 491 aa, Homo sapiens
MAQSGGEARPGPKTAVQIRVAIQEAEDVDELEDEEEGAETRGAGDPARYLSPGWGSASEEEPSRGHSGTTASGGENEREDLEQEWKPPDEELIKKLVDQIEFCFSDENLEKDAFLLKHVRRNKLGYVSVKLLTSFKKVKHLTRDWRTTAHALKYSVVLELNEDHRKVRRTTPVPLFPNENLPSKMLLVYDLYLSPKLWALATPQKNGRVQEKVMEHLLKLFGTFGVISSVRILKPGRELPPDIRRISSRYSQVGTQECAIVEFEEVEAAIKAHEFMITESQGKENMKAVLIGMKPPKKKPAKDKNHDEEPTASIHLNKSLNKRVEELQYMGDESSANSSSDPESNPTSPMAGRRHAATNKLSPSGHQNLFLSPNASPCTSPWSSPLAQRKGVSRKSPLAEEGRLNCSTSPEIFRKCMDYSSDSSVTPSGSPWVRRRRQAEMGTQEKSPGTSPLLSRKMQTADGLPVGVLRLPRGPDNTRGFHGHERSRACV

SEQ ID NO: 3319 - DNA, 196 bp, Homo sapiens
  misc_feature (23)..(23): n is a, c, g, or t
  misc_feature (36)..(36): n is a, c, g, or t
  misc_feature (107)..(107): n is a, c, g, or t
  misc_feature (167)..(167): n is a, c, g, or t
  misc_feature (173)..(173): n is a, c, g, or t
atccgtgaatgctgaggtaactntgggaacaaaatnacagcttagagcagccatgggtgatgtttggtggtaaaaaacctacaggcgtttggggtcccatgattgtnccagaccatgactcttcctggttgtgggtttgttacagagcaggagaagcagaggttatnacagtnatgcagactttccccctcctttt

SEQ ID NO: 3320 - DNA, 621 bp, Homo sapiens
  misc_feature (19)..(19): n is a, c, g, or t
  misc_feature (309)..(309): n is a, c, g, or t
  misc_feature (332)..(332): n is a, c, g, or t
tttttttcagtttccaagncattttattcagaattttgtgtttgtttcctgaatcaataaatactatacaaaacaatgtaaaaatggctaccattttctctcccctgcttccccccacctggggacaaccccctgggcaacctcacttaggggttttaggggttctccctccagatttggtccagcaaatgaggctgagtgacatagtcccttgaatcactttcaaaggagctcagctgaggtgaggagagcctctgggatctggaggttactaggttagggaaatggattagtgtttttttttttggnagaagagccggcgcctggggcangagcctaccccaaagaaaagggtgtctaaaatgttcacggttccttcttttgcctcaaaaagtgacatttattcaaagaaaaaaaatgacaagatgtccatcccttggctcccttccctcccccctcctgctgctcctcagcccccagagattgagccctggctggggctgggtggcaggacagcccctcagatgagtcagcaacatttggggcattttctcaatgaggggttggagaggtctcaatgtctcaagagtccttttgcttcttcttcaccatgtaatagcc

SEQ ID NO: 3321 - DNA, 412 bp, Homo sapiens
  misc_feature (13)..(14): n is a, c, g, or t
  misc_feature (27)..(27): n is a, c, g, or t
  misc_feature (31)..(31): n is a, c, g, or t
  misc_feature (241)..(241): n is a, c, g, or t
gcagacacctaanntatacgtcgaagntgtntaaaaagttgttttttttttttaatggaaaatatccaagaagcagcccaggagtatctgacatggtggaatggaatcagttagaaagcgaagaaatcactaaaaaaagttacttctttttttccccaccagttataatcttcaaccttactagtttataacagtttaatgtcctatagaaggatcctccactaaagttataattttaagnatagtcatatagagagatccctaatcccctgggtaatctagatactaaaggtggggaagaacagtcatattgacattctttaatccaaaaccactgtttggaaattagtaaggatatttttcaggcattcccaaaaacatgttattagcacgttggagctggaaaacgttt

SEQ ID NO: 3322 - DNA, 491 bp, Homo sapiens
attttttttttttttttttattttcagaatctgtgagaggggaaaaaaaaagatgattctcttcagagccaaagagtctccaggaatgcattattttaaaatgcatgatggatatgatggactacataatttcctagtttgcttccacatcaataaaacaattttctaaaaagactattggtttattttacacatacactatcaagcgaaatacggtatcttgttcacttgtctggctcattgctgactgttttccttaaaagctgggaaggctgtgggtcaattcagctcgccacctgtttctgtactgcccacaagctgagaatgaattttgtacttttaaatggttggggggaggggagaatattttctgacacaagatatatgacattcacacttgagtgtcaaagtctttaggaacacagccacgcccatttgtttacactttactccttccactttacaatgaagaggtatgaggagctgctaca

SEQ ID NO: 3323 - DNA, 275 bp, Homo sapiens
tattttgatttggagggggggccataggaagacactgcttttataatacaaaaaatgataaatgaataacacaatcaatgaaaacagatgtaaacaattttttttttttgccatctcccttttttatttgtttctttttaaatgtctaatcaatgtctacccattcatggttgttctgcttgttaggtgatgtttttgtagtatttcaagtatgggaacttgtcaaaagtaatgtttccaatcatcagttcacattcttacaatatgtgttcacc

SEQ ID NO: 3324 - DNA, 445 bp, Homo sapiens
tttaggtaagatacacatctttactgtgtatatgcgtgtacaagaaggaaaacttgcttttttttttttaagtagatgttacgaaggatggttttttttttttttcaacttgcaaaatctcttgaaggttggagcagagccgccggttacctttgagcatcgaaataccgcaagttatcccgtttccttttcccctcaggaaagatgggtgcagggttgagatgttacaagagaattaaaagagagccaccagcttggcatagtagaagaaacaaacccaaaatgaaaacacccggattttaagcgcggatcctgcgaggccggtttgcactggccgaacgcctgcgttaaccctttgggcgccgcagctgggatccccggtgtttgcggacccgaccggcaggaacagagatggagtgtcccgcgcccgcatggggagtgagct

SEQ ID NO: 3325 - DNA, 301 bp, Homo sapiens
  misc_feature (83)..(84): n is a, c, g, or t
  misc_feature (280)..(280): n is a, c, g, or t
taataatagaataaagggttgagtaacttagaactgaaaatgatctcttttaaaaagaaattaaatcagacaccacatggtgnncctttggatctcactgtgcagaattagcagtgtataaccatcttctctttcatcttgttccaattctctcctctttcctttccattctgctttaagctcacgtgtcagggcagactttaccagagtgtcagacattacctaaaacacatacgttagccatgctgctgggtatgggaggaaattcccacaccctggnttatttggcctccttttaagc

SEQ ID NO: 3326 - DNA, 232 bp, Homo sapiens
tttttttttttttttttttttttttttttaaatgttttaggactttaatgttctttacatattcaacataaaatactgacaatagataaacaataggggaaagacttttcagcaaagtatcactctcgtagtcataccttacaaaaaaaacatagagaacaaaggatagggtaatttaacagaaatgtttagtttaatggcctaattgaaaaacaaccaacccatcaacttt

SEQ ID NO: 3327 - DNA, 553 bp, Homo sapiens
gagagctttactacttagtctcattcacttttgcacgcaccgagcccaaggtgaatactgttcactccatgaaaggaaatgattgagaaatgaaagggagagtcaaggtaaaaagtggcaaaagaaatacagtgtgagaagggaacagagctgaaggcagaacagaaaggcaagagcacatatgattataacccagcagctggaactaggccaggtccttgtctcacttgtcttggcagctcatgttataggcaaatgcacctctcatagcaaggactaaattcatatttacaaaatgaataaactaaatgatctcttaccttagatggcctatgattaatatcattttcatgttactgatgtacacatttactggaggtctggcacttaattttgatgaatattctatgttaataccacattttagatacatattcagattgctgaatttagtcatttctatgtactttactcacatatgtctatgaagatcgtctttactgcactacaagctctcgaaaggtacaaaatcccctaaataacgacctaatgg

SEQ ID NO: 3328 - DNA, 284 bp, Homo sapiens
  misc_feature (86)..(86): n is a, c, g, or t
  misc_feature (132)..(132): n is a, c, g, or t
  misc_feature (156)..(156): n is a, c, g, or t
  misc_feature (218)..(218): n is a, c, g, or t
ggtcaagaatagacccttaacaaaaattaatagtgtaaagctgaattctctgccatctgaatatgagagtgggtcagcatgcactnctcagactgtgcactacagaccaatcaacttgagcagttcagagancaaaatagtcaatgttagcctggnagatcttagaggtggaaatcgcgccaatacagggcccttatacacagaggccgatcgagttntacagagaacaaattcaatgcagcagttggaacagtggcttaaaatccagaaggggaggggtcatg

SEQ ID NO: 3329 - DNA, 7773 bp, Homo sapiens
atgcaatctgagcaaatccggaagcttcgtagggaactggaatcatcccaggaaaaagtggccaccttgacgtctcagctttctgccaatgctaatctggtggctgcttttgagcagagcctggtgaatatgacatcccgcctgcgacacctggcagagacggccgaggagaaggacactgagctgctggatttgcgagaaaccatagactttctgaagaaaaagaactctgaggcccaggcagtcattcagggagcccttaatgcctcagaaaccacacccaaagaacttcggatcaagagacaaaactcctcagatagcatctcaagcctcaacagcatcactagccattccagcatcggcagcagcaaggatgctgatgcgaaaaagaagaaaaaaaagagttggcttcgaagttccttcaacaaagcgttcagtataaaaaaggggcccaagtcagcttcctcatactcggatatagaggagattgctacacccgactcttcagccccctcatcccccaaactacagcatggttctacagagactgcttcaccctccatcaagtcctccacctcgtcctccgtgggcactgatgtcaccgagggccctgctcacccagccccccacactaggctgttccatgcaaatgaggaggaggagccagagaagaaggaggtatcggagctgcgctctgagctatgggagaaggaaatgaagcttacagacatccgcttggaggccctcaactctgcccaccaactggatcagcttcgggagaccatgcacaacatgcagttggaggtggacctgctgaaagcagagaatgaccgactgaaggtagccccaggcccctcatcaggctccactccagggcaggtccctggatcatctgcattatcttccccacgccgctccctaggcctggcactcacccattccttcggccccagtcttgcagacacagacctgtcacccatggatggcatcagtacttgtggtccaaaggaggaagtgaccctccgggtggtggtgaggatgcccccgcagcacatcatcaaaggggacttgaagcagcaggaattcttcctgggctgtagcaaggtcagtggaaaagttgactggaagatgctggatgaagctgttttccaagtgttcaaggactatatttctaaaatggacccagcctctaccctgggactaagcactgagtccatccatggctacagcatcagccacgtgaaacgagtgttggatgcagagccccccgagatgcctccttgccgtcgaggtgtcaataacatatcagtctccctcaaaggtctgaaggagaaatgcgtcgacagcctggtgttcgagacgctgatccccaagccgatgatgcagcactacataagcctcctgctgaagcaccggcgcctcgtcctctcgggccccagcggcacgggcaagacctacctgaccaatcgcttggccgagtacctggtggagcgctctggccgtgaggtcacagagggcatcgtcagcaccttcaacatgcaccagcagtcttgcaaggatctgcaactgtatctttccaacctagccaaccagatagaccgggaaacaggaattggggatgtgcccctggtgattctattggatgacctgagtgaagcaggctccatcagtgagttggtcaatggggccctcacctgcaagtatcataaatgtccctatattataggtaccaccaatcagcctgtaaaaatgacacccaaccatggcttgcacttgagcttcaggatgttgaccttctccaacaacgtggagccagccaatggcttcctggttcgttacctgaggaggaagctggtagagtcagacagcgacatcaatgccaacaaggaagagctgcttcgggtgctcgactgggtacccaagctgtggtatcatctccacaccttccttgagaagcacagcacctcagacttcctcatcggcccttgcttctttctgtcgtgtcccattggcattgaggacttccggacctggttcattgacctgtggaacaactctatcattccctatctacaggaaggagccaaggatgggataaaggtccatggacagaaagctgcttgggaggacccagtggaatgggtccgggacacacttccctggccatcagcccaacaagaccaatcaaagctgtaccacctgcccccacccaccgtgggccctcacagcattgcctcacctcccgaggataggacagtcaaagacagcaccccaagttctctggactcagatcctctgatggccatgctgctgaaacttcaagaagctgccaactacattgagtctccagatcgagaaaccatcctggaccccaaccttcaggcaacactttaagggttcggcaatcactgtcacccccggacagcagaacgctggcatcagctatcttagctcctcctctcccctctcctctttcagagcactggctctccagccccaggaggagaacaggagggaggaggagatgaaagaggagggacaggttcttggtgctgtacctttgagaacttcctaggaaggaatggtggggtggcgtttgggaacttgtgccccctaaacacatttactggcctcctctaatgactttggggaaaagatgattctgggtctttcccttgacttcttgtttcaattacaaactcctgggctttctggggaggggttcagaaaacatcaaaacactgcagcagttcctaaatgattctcacaagcaaccctgagagagacagtcttgtgagggagatctgggggaggcaggaagctcctcagattttctcacagacccttcccaattccatcaccactgccaacaactcctcccccagagatctggctggagcccagaaaaagaagcatgtggtttaaaaaatgtttaaatcaatctgtaaaaggtaaaaatgaaaaacaaaaacaagcaaacaaacaaaaaacaatggaaaagatgaagctggagagagaggaaccagttgccaaggtagagagctgcccgctcctgccctctggatgacataggggacatcaacaagacggctgccaacctgagaagtcaccaaaccacaaaaataaccttacagccttcagggaaagactaccagctctgtctttctaccctctaatttaacaatgcataagagtcaataaaccctacttttttatttttggtttttattttgttttcatttttttctcccatttgcctatttatttttttgtttcccttttttttttctttttccgtttttccatttcctcacatgtccacgagatgcttgggttgcttttccaggggctagtttggcttttccaagtgggttttctttggagaatctgatgccatgcaattggcatgacacctgccatgccactatctttggcatccatggggcttatatgagacatgaagcattggctcagaagtagagggagaagaggaacccagttcccttgacttcccttttgagagcacacgttctgctgggtagctcaattgccagcctctgtcatgagaaggtatagccccatcttgatagaagagttactccgagctttatcatggaccagaggaaaaccagaaaactgaaaacattcctctgtcttgtggccagtttggcctttcactgcactattctgatggtgcctgactgaatccaaatatcctagctggctcttactatttttcacaaatgagtattcacatataagagatgaacatccatgtgagatcatcccaatcagaatataagactcaaggagtttgacttggtggccaatacctgccttccaaagagatcctacctttgcagatttgctcctttcccattgccttgaaggtctggcaatccctgttctttcatttgacaagtacttactgagtactcactatatacaaatcattaggttaaaacagacacacacacacacacacacacacacacaagacctgggcccttaagtttacagtccagcaggaaatgttaacctccattcagctacgcccccttgttatctagaccttcgggatcatctaagaaatgtagctgaaacccaaggagccagctagaaagaagcttttgattagatgcacaatacattgggggcagaagatctgggatcaattaagatggagcctgaaggactatggaatcttgcttgtcaggaatgggcaagtctacttcctgccatttctgaaagccccgcgggaccagcttctaggctgagctgcctagtaggctgaagcttcaggactctgcaggtcaaggatatgtgatgagcaccggcctaagtgtttgctcttcagattcctaagtagcacaagactttatcagaatctataggcataccaacctggatcactcttccacccaaccgaggagtagatgcatctgaatcttcatatcggtatattaagtccaaaagatggtccgggctgcccctcacaaaagcttctgcatccacatggtaagctcccatggatgacagggttctgtatgatggagactattattgctattgctgctaattccatgagctgtgaagatccctaaccaactcagctgtaacatatgcaattctgtggtgggaagaggctgtgtgtccaaggatggtgctgaaatcactgccttaaggtctctgctgtgcagaatgaggaggcccccgagctggctgttctaacttagaaggaagagaagactggatgggcctgcttgggatctaggcctcttctaaaccctatcctaagctccagttccatggcaaggctcagacttttaatgccatcttaatctgatggttgagcgcttcactctattttctggtgctgcccagccagtgccttctgccatggatgttactggctacttgagaaaaaggagaggggagaaccccttctttcattccaactgcctccgaccccaaagggattcttggctctctggtaaccatggataccaccatgaattttatttggatcctcagcaggttgattctggaggcctcatgctatgactttttatttctcttcctgggatccaccaccctctactctcagctgactgctgcatttaggccaggtctccaattgctttcctccagaaagtgtgttcccgtctagtgaggtagtattgaagcctcggctttccctctggagcctgggaccctgtttacagttgcacatctgggcccctcactgtggggattgatcattctcatgaaggaatcacagttatatggcaactgcagaaggctgagcctcctcatggtgctataaccccttgggacactcatccagacttctctgaagcagaaaacctgagctccccactcactgccctagaatttatggcaaggagcaaatctacagcattctctcccacctacgtcctgcttcttggttgagactactgggatccttcagaaaagaaacactgggtcccatagctaaattctcaaccgccaggcaccttcagaagaatccagcctaatactggaatttgtgctattatcttcctctccagccccccaactccatccctcaccacagttgtctaggaaatgacatgaattcaatatctaatgtcaaccaatggggagagccacaactccaggagaggttcctgagctgagtcccttaatttctggatgaagaagaccaacaagttttgtccaatgtatttgtttctcagaccttgcctaggcactaaaaataaaatactaggtcattggaggctaatgtgggacctgatgtctgcgtgtgtgtatgtgtgtgtgtgtgtgtgtgtgtctccctctctcacacacacaagagcagtttgctgttgctgtttcctaccttctgaggcttcaaagtattttttaaaatctatgctttgtggcagctctacggtgcttatctctgtctttgtgtcaatccttaagtacccatgtctttttcatgtctaaccattgggaaggtagaggctggcagggaagacaaatctgctacaagtccatgggaagaccctacaatgaaatgttcattggttggtatactgttttagtcttgaattgccaactttccaactgatctatccatattccttaagtactaaagacaaaatagagggcttctttttctctcttaatgtcttgccttctggttttcctggtttgcaagactaagtgtacctaatctcaccatctcttcacttctagctctctgaaacaagggtcacactactcagagggataaccccttacagtggtctgaggagtaactatttcctaaagtattctaaaagagtaggaagagagaaatggtagcctgctgcttctcacagacacctcacatcctcacttgggatggcatccacatagaaaccctgcatttaggtaaaatttgcctgactgaaggggactcagtcctccaaatcaaggtcaagaagatatctgcatgagaccttaagaactctttattgccattatttggagagggcgggggaattgtcctaatcacacatttaacacagggaataagtgctgaagtgacccagatcaccaagcgcagttcctcatcatactttatttttgctttccttattccttggcactgactaagctaaagttaagaagccgacttcataagccaacccctgtgatgggatggaaaaatgggcttttgcagagggtttattaatagagatggatatactactcacaagttgtggctcatggctccactgagaaggccatagtaataaaatgatcttatgaacactgttccccaaaggccaaagcctgaagatattgccccttataatccaatcagccttatattttaataagtcctgaatcaacctgactacggatatatggggccaccagggtgcatgggtgcatgtctgctcagcctagccctggaagtgagcactgccggccacagatcctgggaaaggtggtagtaacccagaagatgtagccttgaagggaggatacctatcaaaatgccaaagctgcagggacacgaagacggttgaaaattcaacctatgtatactagatccttccagtttgatggtttggtcattcttcttcatgattataccatggagaattttctgtgacaagggtggtcatggaagtaagtgagtgatcccctggtttctcattccttaaagcagtggttcgcaaagtatggcacaagaccagcagcatcagcagcctttgggaacttgttagaaacgaaaattctcaatcccatcccagatctgctgaatcagaaactctaatgagaggacccggcaatccacgttttaataagccctcctggtgattctgatgcacactaaattcaactgttttaaagggaaagccctttatagtattggagttcccacactgagaggctttggggcccaaaataagaaggttctaggttgtcattcagactttaacattaatttcaaagtcacctttctcatgcttccttgtgtttctgtttttccatttatgattttaacaaagaaaggtatgtgtgcttttgggtggaagttaggagaatgtttgtgtctttcctagttgaatacaaccttcagagaaaaaccttatgccttggaaattactacctggcacacaaaggggcttcaacaaggaaaagcagttggaggtctcttccagattgctcttctgccgaattatttgtatctattccgagctgattatgtaataggatggaaaaagt

SEQ ID NO: 3330 - protein, 797 aa, Homo sapiens
MQSEQIRKLRRELESSQEKVATLTSQLSANANLVAAFEQSLVNMTSRLRHLAETAEEKDTELLDLRETIDFLKKKNSEAQAVIQGALNASETTPKELRIKRQNSSDSISSLNSITSHSSIGSSKDADAKKKKKKSWLRSSFNKAFSIKKGPKSASSYSDIEEIATPDSSAPSSPKLQHGSTETASPSIKSSTSSSVGTDVTEGPAHPAPHTRLFHANEEEEPEKKEVSELRSELWEKEMKLTDIRLEALNSAHQLDQLRETMHNMQLEVDLLKAENDRLKVAPGPSSGSTPGQVPGSSALSSPRRSLGLALTHSFGPSLADTDLSPMDGISTCGPKEEVTLRVVVRMPPQHIIKGDLKQQEFFLGCSKVSGKVDWKMLDEAVFQVFKDYISKMDPASTLGLSTESIHGYSISHVKRVLDAEPPEMPPCRRGVNNISVSLKGLKEKCVDSLVFETLIPKPMMQHYISLLLKHRRLVLSGPSGTGKTYLTNRLAEYLVERSGREVTEGIVSTFNMHQQSCKDLQLYLSNLANQIDRETGIGDVPLVILLDDLSEAGSISELVNGALTCKYHKCPYIIGTTNQPVKMTPNHGLHLSFRMLTFSNNVEPANGFLVRYLRRKLVESDSDINANKEELLRVLDWVPKLWYHLHTFLEKHSTSDFLIGPCFFLSCPIGIEDFRTWFIDLWNNSIIPYLQEGAKDGIKVHGQKAAWEDPVEWVRDTLPWPSAQQDQSKLYHLPPPTVGPHSIASPPEDRTVKDSTPSSLDSDPLMAMLLKLQEAANYIESPDRETILDPNLQATL

SEQ ID NO: 3331 - DNA, 722 bp, Homo sapiens
acagtcttgtcggctgggtttaatcggccagggctgcgcggcgttgcggcgccccgctgcctctttccggctgtgaccctcctcgccgccgccgcttggctgcgtcctccgactccccgcgccgccgagaccaggctcccgctccggttgcggccgcaccgccctccgcggccgccccctggggatccagcgagcgcggtcgtccttggtggaaggaaccatgaactggcatctccccctcttcctcttggcctctgtgacgctgccttccatctgctcccacttcaatcctctgtctctcgaggaactaggctccaacacggggatccaggttttcaatcagattgtgaagtcgaggcctcatgacaacatcgtgatctctccccatgggattgcgtcggtcctggggatgcttcagctgggggcggacggcaggaccaagaagcagctcgccatggtgatgagatacggcgtaaatggagttggtaaaatattaaagaagatcaacaaggccatcgtctccaagaagaataaagacattgtgacagtggctaacgccgtgtttgttaagaatgcctctgaaattgaagtgccttttgttacaaggaacaaagatgtgttccagtgtgaggtccggaatgtgaactttgaggatccagcctctgcctgtgattccatcatgcatgggttaaaatgaaccgggtttgttgcatctgtgcccg

SEQ ID NO: 3332 - DNA, 2855 bp, Homo sapiens
cgcccgggcaggtcggagacggaggaaaggtggcagccagattacttagagaggcacagaggagagagatcggggtgagtcgccatggggactcccagggcccagcacccgccgcctccccagctgctgttcctaattctgctgagctgtccctggatccagggtctgcccctgaaggaggaggagatattgccagagcctggaagtgagacccccacggtggcctctgaggccctggctgaactgcttcatggggccctgctgaggaggggcccagagatgggctacctgccagggcctccccttgggcctgagggaggagaggaggagacgacgaccaccatcatcaccacgacaactgttaccactacggtgaccagcccagttctgtgtaataacaacatctccgagggcgaagggtatgtggagtctccagatctggggagccccgtcagccgcaccctggggctcctggactgcacttacagcatccatgtctaccctggctacggcattgagatccaggtgcagacgctgaacctgtcacaggaagaggagctcctggtgctggctggtgggggatccccaggcctggccccccgactcctggccaactcatccatgcttggagaaggacaagtccttcggagcccaaccaaccggctgcttctgcacttccagagcccacgggtcccaaggggcggtggcttcaggatccactatcaggcctacctcctgagctgtggcttccctccccggccggcccatggggacgtgagtgtgacggacctgcaccctgggggcactgccacctttcactgtgattcgggctaccagctgcagggagaggagaccctcatctgcctcaatggcacccggccatcctggaacggtgaaacccccagctgcatggcatcctgtggtggcaccatccacaatgccaccctgggccgcatcgtgtccccagagcctgggggagccgtagggcccaacctcacctgccgttgggtcattgaagcagctgaggggcgccggctgcacctgcactttgaaagggtctcgctggatgaggacaatgaccggctgatggtgcgctcagggggcagccccctatcccccgtgatctatgattcggacatggacgatgtccccgagcggggtctcatcagtgacgcccagtccctctacgtggagctgctgtcagagacacctgccaatcccctgctgttaagccttcgatttgaagcctttgaggaggatcgctgcttcgcccccttcctggcacatggaaatgtcactaccacggaccctgagtatcgcccaggggcactggcaaccttctcgtgcctcccaggatatgccctggagccccctgggccccccaatgccatcgaatgtgtggatcccacagaaccccactggaacgacacagagccggcctgcaaagccatgtgtggaggggagctgtcggaaccagctggcgtggtcctctctcccgactggccccagagctatagcccgggccaagactgcgtgtggggcgtgcacgtccaggaagagaagcgcatcttgctccaagttgagatattgaatgtgcgggaaggggacatgctgacgctgttcgacggggacggtcccagcgcccgagtcttggcccagctgcggggacctcagccgcgccgccgccttctctcctctgggcccgacctcacactgcagtttcaggcaccgcccgggcccccaaatccaggcctgggccagggcttcgtattgcacttcaaagaggtcccgaggaacgacacgtgccccgagctgccacctccggagtggggctggagaacggcatcccacggggacctgatccggggcacggtgctcacctaccagtgcgagcctggctacgagctgctaggctccgacattctcacttgccagtgggacctgtcttggagcgccgcgccgcccgcctgccaaaagatcatgacttgtgctgaccctggcgagattgccaacgggcaccgcaccgcctcggacgccggcttccccgttggctcccacgtccagtaccgctgcctgccagggtacagcctcgagggggcagccatgctcacctgctacagccgggacacaggcacacccaagtggagcgatagggtccccaaatgcgccttgaagtacgagccgtgcctgaacccgggggttcccgagaatggctaccagacgctgtacaagcaccactaccaggcgggcgagtctctgcgcttcttctgctatgagggctttgagcttatcggcgaggtcaccatcacctgtgtgcccggccacccctcccagtggaccagccagcccccactctgcaaagttgcctatgaggagctcctggacaaccgaaaactggaagtgacccagaccacagatccatcacggcagctggaaggggggaacctggccctggccatcctgctgcctctaggcttggtcattgtcctcggcagtggcgtttacatctactacaccaagcttcagggaaagtcccttttcggcttctcgggctcccactcctacagccccatcaccgtggagtcggacttcagcaacccgctgtatgaagctggggatacgcgggagtatgaagtttccatctgaaccccaagactacagctgcaggacccaggacgcccctcccctcctcattcgggcagagggaaatacgggacccggtctctgcctcctggctgccctcctccctggctgtgtaaatagtctccctatcccacgagggggctttgatggccctggagatcctacagtaaataaaccagcatcctgccgcccaaaaaaaaaaaaaaaaaaaa

SEQ ID NO: 3333 - protein, 853 aa, Homo sapiens
MGTPRAQHPPPPQLLFLILLSCPWIQGLPLKEEEILPEPGSETPTVASEALAELLHGALLRRGPEMGYLPGPPLGPEGGEEETTTTIITTTTVTTTVTSPVLCNNNISEGEGYVESPDLGSPVSRTLGLLDCTYSIHVYPGYGIEIQVQTLNLSQEEELLVLAGGGSPGLAPRLLANSSMLGEGQVLRSPTNRLLLHFQSPRVPRGGGFRIHYQAYLLSCGFPPRPAHGDVSVTDLHPGGTATFHCDSGYQLQGEETLICLNGTRPSWNGETPSCMASCGGTIHNATLGRIVSPEPGGAVGPNLTCRWVIEAAEGRRLHLHFERVSLDEDNDRLMVRSGGSPLSPVIYDSDMDDVPERGLISDAQSLYVELLSETPANPLLLSLRFEAFEEDRCFAPFLAHGNVTTTDPEYRPGALATFSCLPGYALEPPGPPNAIECVDPTEPHWNDTEPACKAMCGGELSEPAGVVLSPDWPQSYSPGQDCVWGVHVQEEKRILLQVEILNVREGDMLTLFDGDGPSARVLAQLRGPQPRRRLLSSGPDLTLQFQAPPGPPNPGLGQGFVLHFKEVPRNDTCPELPPPEWGWRTASHGDLIRGTVLTYQCEPGYELLGSDILTCQWDLSWSAAPPACQKIMTCADPGEIANGHRTASDAGFPVGSHVQYRCLPGYSLEGAAMLTCYSRDTGTPKWSDRVPKCALKYEPCLNPGVPENGYQTLYKHHYQAGESLRFFCYEGFELIGEVTITCVPGHPSQWTSQPPLCKVAYEELLDNRKLEVTQTTDPSRQLEGGNLALAILLPLGLVIVLGSGVYIYYTKLQGKSLFGFSGSHSYSPITVESDFSNPLYEAGDTREYEVSI

SEQ ID NO: 3334 - DNA, 315 bp, Homo sapiens
ttttttttttttttttttttttactttaaaattaccttttatttctctttatgaatatttgctttttgttttttgtaaaaaaaaaaaaggttcattttacatcttcttcaagagtcttgtgcctcctggtaagggcattggtttgtttcacagtactctccacgaccaaggacggttcttattgctggaaggagtgagtggatgtccaccccagggcggggctggaggacataaaaagaatcggggccctggcaggaagcctggggcctgtgctccaacaagagcaaggaggctgaaggagcaaaccggggctca

SEQ ID NO: 3335 - DNA, 330 bp, Homo sapiens
  misc_feature (18)..(18): n is a, c, g, or t
  misc_feature (22)..(22): n is a, c, g, or t
  misc_feature (153)..(153): n is a, c, g, or t
  misc_feature (303)..(303): n is a, c, g, or t
ggcagggtttggtttggntgtnttcagatttccttgtcttgaggtcctcacaattactctacagctcagaacaccaactgctgaggctgccttgggaagaggatgatcctaaacaaagctctgctgctgggggccctcgctctgaccaccgtnatgagcccctgtggaggtgaagacattgtggctgaccacgttgcctcttgtggtgtaacttgtaccagttttacggtccctctggccagtacacccatgaatttaatggagatgaggagttctacgtggacctggagaggaaggagactncctggcggttggcctgagttcagcaaa

SEQ ID NO: 3336 - DNA, 193 bp, Homo sapiens
  misc_feature (153)..(153): n is a, c, g, or t
  misc_feature (159)..(159): n is a, c, g, or t
  misc_feature (179)..(179): n is a, c, g, or t
  misc_feature (190)..(190): n is a, c, g, or t
atcagcaatcaaggtacaagtaaatagaggcaaaatgagggtttgaactgtgagcagttggtcctggaaaagaaagaaaccaagagattatggggactcaatgggcttcttaagagagaataagttgaaatcaatgaccagaagaccctgatngaagtngatgagaatcatctcaggcnaactttttgtnttc

SEQ ID NO: 3337 - DNA, 363 bp, Homo sapiens
ttttttttttggtccacaatcctccactctcaccccccatttcatcagaagtgagctcttccaatttactgaacattggaaaaaatcgaggagggcagtggttagcatggccaggggcaaggcaggagagaagcagcaaggaacacatacagatggttgaaaataaaagtttcagttatggaatttccgatcaagaggtaaatacatatctcagcagccagggaggtaaatttgtaccaagagataatttgactgagaagtttaagctgacttttccaggtcaagaaaagaatcaagaagaagtgagggaagataaagctacatttattctactattgagttggaaggagccttaaagatcct

SEQ ID NO: 3338 - DNA, 7296 bp, Homo sapiens
gaggttcgctacccaccgatcctgcactgtgccttccttggggcccaaggcctcttcctggactgcctctgctggagcacccttgcctacctggtgcctggcccccctggctccctgatggtgggcgggctgactgagtctttcatcatgacacagaactggctggaggagctggtggggcgactgcgctggggccctgcccctctgctgaccccccgggggatctgggaggctgaggtgacccgggcctttggggccctggtctggatccgtggtgaccagcatgcaggggacctactgcagctgcccccagcggtccaggagctgctgctgagcctggtgcgggatgctgcgggcaaggaagacatcatcgagtggctcagccgcttcggcatctctgactcccactccgatccggaggttctaatctgccctccccagcagcagaaggaagccccagccatggtgtccgtgggagagagtcctggaccctttgtggacatggggaccctccagaacaggggcccagaaaattcaaagagattatctagcctgggagccactgggtccctgatcacagcccagagcacaccgcaggaggcagcaaaccagctggtacgggtcggttccaacaaccaagatggtatggacagtgctcaagaggaagggacagtgcaagccaccagcagccaggactccacgaaccacacacaagccttgttgaagcaaaggcaggtccagaagatagaagataaactcctcttccaacctccagtatcagccctgggtgtgtgcccaccctggaaggcctggaccccggggccagcctttgggccattgtggccgggggctattgctgcaaccttctggaggatcaatgagctgcattctctacatctggcctggctcctgtcccaggcgtgcttcaatttccccttctggcagagacctctgggccccattcagttgaagctgccagggcagaatcctttgcccttaaatctggagtggaagcagaaggagctggctcctctgcctagtgcagaaagcccagctggtagaccagatggggggctgggaggagaagcagccctgcagaattgcccaaggccagagatttccccaaaagttacgagtttattggtggtccctgggagctcagatgtaaaagacaaagttagctcggatctcccacagatagggccacccttgacctctacaccccaactacaggctggaggtgagccgggggatcaagggagtatgcagttagattttaagggactggaagagggacccgctccagtgctgccaacagggcaagggaagcccgtggctcaaggggggctgacagatcagtcagtacctggagctcaaacagtgcctgaaactctcaaagtgcccatggctgcagcagtgcccaaagctgaaaatccctccagaactcaagtgccatctgcagctcccaaactgcctacatctcgaatgatgctggcagtgcacacagagcctgcagctcccgaagtgcctttggctccaacaaagccaacagctcaactgatggccacagctcaaaaaacagttgtgaatcaaccagtgttggtagctcaagtggaacccacaactccaaaaactccccaggctcagaagatgcctgtagcaaaaacatcacctgcaggtcccaaaacacccaaagctcaagccgggcctgcagctacagtttccaaagcacctgcagcttccaaagcacctgcagctcccaaagtacctgtgacccccagagtctccagagctcccaaaacacctgcagctcagaaggtgcccacggatgcagggccaaccttggatgtagccagacttctgagtgaggtccagcctacatcaagggctagtgtctccttactgaagggccaggggcaggctggaaggcagggtccccagtccagtggcaccttggccctcagcagtaagcaccagtttcagatggaggggctcctgggggcttgggagggggccccaaggcagccacctcgccacctgcaagcgaacagcacagtgaccagcttccagaggtaccacgaggccctgaatacacccttcgagctgaacctgtcaggggaacctggaaaccaggggttgcggcgagtggtcatcgatggcagcagtgtggccatggtgcatggcctgcagcacttcttctcctgccgaggaattgccatggcagtgcagtttttctggaaccggggacaccgagaggtcactgtgtttgtacccacctggcagctgaagaagaaccggagggtgagagagagccactttctgacgaagctacactcgctcaagatgctttcaatcacaccctcccagcttgagaatggcaagaagatcaccacctacgattataggttcatggtaaagctggcagaggagacagatggcatcattgtcaccaatgagcagattcacatcctgatgaatagttccaagaaactgatggtcaaagatcgcttgctgcctttcacctttgcggggaatctcttcatggtgcctgatgaccccctgggccgtgatggccccaccttggatgagtttctgaagaagccaaacaggttggacactgacattggcaacttcctgaaggtgtggaagacccttcctcccagctcagccagtgtcactgagctgagtgatgacgctgactctgggcccctggagagtctgccgaatatggaagaagtcagggaagagaaggaggagaggcaggatgaggagcagagacaggggcagggcacacagaaggcggctgaggaggacgaccttgactcttcgctggcgtcagtgttcagggtggagtgcccgtccctttcggaggagatcctgcggtgcctcagcctccatgatccccctgatggggccctggacatcgacctcctgccaggggcagcttctccctacctgggcatcccctgggatggaaaggctccctgccagcaggttcttgcccacctggcccagctcaccatccccagcaacttcaccgcactctccttcttcatgggcttcatggactcccacagggatgccatccctgactatgaagccctagtgggccccctgcacagcctcctcaagcagaagcctgactggcagtgggaccaggagcatgaggaggccttcctggccctgaagcgagccctggtgtctgccctctgcctgatggcccccaactcccagctgcccttccgcctggaggtgaccgtgagccacgtggccctgacggccatcctccatcaggagcactcagggaggaagcaccccatagcctatacctcaaaacccctcctccctgatgaggagagccagggcccccagtcagggggtgacagcccctatgctgtggcctgggccctcaagcatttttcccgctgcattggagacaccccggtggtcctggacctttcctatgcctcccggaccactgcggaccctgaggtgcgggagggccgcagggtttccaaagcttggttgatccgatggtccctcttggttcaggacaaaggcaagagggccctggaattggccctcctccagggcctgctgggggagaaccgcctgctcacccccgcggcctccatgcctcgcttcttccaggttctgccgcctttctctgacctgtccacgttcgtctgcatccacatgtcgggctactgcttctaccgtgaggatgagtggtgtgctggctttggtctctatgttctatcgcccaccagcccccctgtctccctttccttctcctgctccccttacacgccaacctatgcccacctggcagccgtggcctgcggcctggagcgctttggccagtccccactcccagtggttttcctcactcactgcaactggatcttcagcctcctgtgggagctcctgcccctctggagggctcggggcttcctctcctctgatggggctccactccctcacccaagcctgctctcctacattatatccctcacctctggcctctcatcccttccgtttatctaccgaacctcctaccggggctctctgtttgctgtgacagtggacaccctggccaagcagggtgcccaggggggtgggcagtggtggagtttgccaaaggatgtgccagcccctacagtgagtccccatgccatgggcaagaggcccaatttgctggcattacagctgagtgacagcaccctggccgacatcattgccaggctgcaggctgggcagaaactgtctggctcctcaccgtttagttctgcctttaactcactcagcctcgacaaggagagtggcctgcttatgttcaagggagataagaagcccagggtctgggtagtcccgacgcaactccggagggatctgattttctctgtgcatgacattcccttgggggcccaccagaggcccgaagagacctacaagaagttgcgtttgctggggtggtggcctgggatgcaggagcatgtgaaagattactgcaggagctgcttgttctgcatcccccgaaatctcataggcagcgagttgaaggttattgagtccccatggcccctcaggtcgaccgccccctggtcgaacctgcagatcgaggtggtgggcccggtcaccataagtgaggagggccataagcatgtacttattgtggctgacccaaacaccaggtgggtggaggcattccccctgaagccctacacacacacggctgtggcccaggtgctgcttcagcatgtgtttgcaaggtggggtgttcctgtgaggctggaggcagcccaggggccccagtttgcccggcacgtccttgtgagctgtgggctggccctgggagcccaggtggcctccctgagtcgggacctccagttcccctgcctgacgagctcaggggcctactgggaattcaagagggccctcaaggagttcatcttcctgcatgggaagaagtgggcggcctccctgcctttgctgcacctggccttcagggcctcctccactgatgccacaccgttcaaggtcctgaccgggggtgagtcaaggctcacggagcccctgtggtgggagatgagcagcgcaaacattgaagggctcaagatggacgtcttcctgctacagctggtgggggagctgctggagctccactggagggtggctgacaaggcgagtgaaaaggccgagaacaggcgtttcaagcgggagagccaggagaaggagtggaatgtgggtgaccaggtccttttgctgtccctccccaggaatggcagcagtgccaaatgggtgggtcccttctatatcggggaccggctgagcctgtcactctataggatatggggcttcccaaccccagagaagctggggtgcatctatcccagcagtctgatgaaggcctttgccaagagtggcaccccgctgtccttcaaggtcttggagcagtgagcgggagcagcgggggtgccccctgccccagggccgtgggtttctgctgctaggcctccccctgtcccagcagtgctctcagtccactgggggccctcagttgtgccttttgtagagaacttgcttcataaagctttgctgaattgccttgaactagggaccagcatccccatggaaacatccccagtttggggtacttggagaatttgccaaaggctgtcagatatgggtccctggcagttttacactgggaaatagagtgctcctctaggctataccaggctcagtgtcttctccccaagtatcctctttccccttcacatgtaggtgtgtggtggtgtgcacacacactcacgaaagaatctatcttggccatgaaactgtggctgttgaccttggaattggaaccacagtcctttcccatacagaaaccccaaatgtgggctcctccctccaacctgttcttttggggaccctttgcccttagagctgtcacagatgacataagcctgggcaggctgtggggaggccgctgcctcctagcctcacggtcagctttctcaagccaggtgtggcctgcacagctgtcagggcagggctggccatcctcccaggcctcaagggcagtgtcttggagtgggaggatggccagccacaagccaccagcttgtcagcatgggaagggcaagggggaaatgggttggcctacctcatttgactccagccaatggagacaattcctgacccctgctttgatggtgttgaccccacaggaatcaaggatcttgatgccaagtgtggcatctctacctgaagagctgcttctgttagacccaggggccccggcctctgttttaagggggcagggcgtctgcaacaggagtggcacacggtgaagtgctggcatggctctacctcccaacccctcccaaccccatcccaaagcctacagtcctctgctccttctacctccactgtatcctgcatcccagaccctacagattgtgtgattgcttcatctgtatcaccccccgagtcctgtggacctgccttctgtgtagagcaaaacccaggctccctcacagccattctttgcagagatcacccttgcagtgagtgtgagttccttccaggtgtgtgcgcgtacactcaccctctgaattgctgccgctgccaaggaagtgggctccaggtgaaggccagtgccacgtcactctggctggccttcttagtagtttcatttctccggaagctgagccagtctcctggtctagcccaggttgccagaacgcttggcattgcagagtgctagagccagtggagaacttgccaacttgattgttttacagcagaggaaagaggatcacagagggaaagtgattcacccaaagtcacacagcaagttcatggctgagctgagaccaggattaagcttcctgactcccagttcaccatgaaaagggttctggcaacaggttcaagctggagaatccttcaaaatgctacacccacattctctccaactcttcatctccctgatcttccagacaaactacctggatgttgcccttaaaccatttctagctgttaaccctatccagaaaaatgattgagtgatagctgagaagtggaaagtgtgggatttttggcaggtgctctctttcctccgccccccgcgccatcctttctcttcctcctctctgtaatggtatgtccagcctcactctccctccctggtgctgtatgcgttccccctgttagctacatttgtgatcacatacccttcttttaagtgaatttttttcatttgatttgtcaataaacgaatcaaactgg

SEQ ID NO: 3339 - protein, 1819 aa, Homo sapiens
EVRYPPILHCAFLGAQGLFLDCLCWSTLAYLVPGPPGSLMVGGLTESFIMTQNWLEELVGRLRWGPAPLLTPRGIWEAEVTRAFGALVWIRGDQHAGDLLQLPPAVQELLLSLVRDAAGKEDIIEWLSRFGISDSHSDPEVLICPPQQQKEAPAMVSVGESPGPFVDMGTLQNRGPENSKRLSSLGATGSLITAQSTPQEAANQLVRVGSNNQDGMDSAQEEGTVQATSSQDSTNHTQALLKQRQVQKIEDKLLFQPPVSALGVCPPWKAWTPGPAFGPLWPGAIAATFWRINELHSLHLAWLLSQACFNFPFWQRPLGPIQLKLPGQNPLPLNLEWKQKELAPLPSAESPAGRPDGGLGGEAALQNCPRPEISPKVTSLLVVPGSSDVKDKVSSDLPQIGPPLTSTPQLQAGGEPGDQGSMQLDFKGLEEGPAPVLPTGQGKPVAQGGLTDQSVPGAQTVPETLKVPMAAAVPKAENPSRTQVPSAAPKLPTSRMMLAVHTEPAAPEVPLAPTKPTAQLMATAQKTVVNQPVLVAQVEPTTPKTPQAQKMPVAKTSPAGPKTPKAQAGPAATVSKAPAASKAPAAPKVPVTPRVSRAPKTPAAQKVPTDAGPTLDVARLLSEVQPTSRASVSLLKGQGQAGRQGPQSSGTLALSSKHQFQMEGLLGAWEGAPRQPPRHLQANSTVTSFQRYHEALNTPFELNLSGEPGNQGLRRVVIDGSSVAMVHGLQHFFSCRGIAMAVQFFWNRGHREVTVFVPTWQLKKNRRVRESHFLTKLHSLKMLSITPSQLENGKKITTYDYRFMVKLAEETDGIIVTNEQIHILMNSSKKLMVKDRLLPFTFAGNLFMVPDDPLGRDGPTLDEFLKKPNRLDTDIGNFLKVWKTLPPSSASVTELSDDADSGPLESLPNMEEVREEKEERQDEEQRQGQGTQKAAEEDDLDSSLASVFRVECPSLSEEILRCLSLHDPPDGALDIDLLPGAASPYLGIPWDGKAPCQQVLAHLAQLTIPSNFTALSFFMGFMDSHRDAIPDYEALVGPLHSLLKQKPDWQWDQEHEEAFLALKRALVSALCLMAPNSQLPFRLEVTVSHVALTAILHQEHSGRKHPIAYTSKPLLPDEESQGPQSGGDSPYAVAWALKHFSRCIGDTPVVLDLSYASRTTADPEVREGRRVSKAWLIRWSLLVQDKGKRALELALLQGLLGENRLLTPAASMPRFFQVLPPFSDLSTFVCIHMSGYCFYREDEWCAGFGLYVLSPTSPPVSLSFSCSPYTPTYAHLAAVACGLERFGQSPLPVVFLTHCNWIFSLLWELLPLWRARGFLSSDGAPLPHPSLLSYIISLTSGLSSLPFIYRTSYRGSLFAVTVDTLAKQGAQGGGQWWSLPKDVPAPTVSPHAMGKRPNLLALQLSDSTLADIIARLQAGQKLSGSSPFSSAFNSLSLDKESGLLMFKGDKKPRVWVVPTQLRRDLIFSVHDIPLGAHQRPEETYKKLRLLGWWPGMQEHVKDYCRSCLFCIPRNLIGSELKVIESPWPLRSTAPWSNLQIEVVGPVTISEEGHKHVLIVADPNTRWVEAFPLKPYTHTAVAQVLLQHVFARWGVPVRLEAAQGPQFARHVLVSCGLALGAQVASLSRDLQFPCLTSSGAYWEFKRALKEFIFLHGKKWAASLPLLHLAFRASSTDATPFKVLTGGESRLTEPLWWEMSSANIEGLKMDVFLLQLVGELLELHWRVADKASEKAENRRFKRESQEKEWNVGDQVLLLSLPRNGSSAKWVGPFYIGDRLSLSLYRIWGFPTPEKLGCIYPSSLMKAFAKSGTPLSFKVLEQ

SEQ ID NO: 3340 - DNA, 7028 bp, Homo sapiens
ccggacatgaagcgctacctgtgggagcgctacccgggaggcgaagagaagcacagaagaattggttccttccattatgagcaacttgttgaatccagatgccattttctcaaacaatgaaatgagcctgtcagacattgaaatctatggcttcgattatgattacaccttggtgttttattcaaagcacctccacacgctgatatttaatgctgcacgggaccttctcatcaatgaacaccggtatccagcagaaatcaggaagtatgagtatgacccaaattttgcaattcgtggacttcattatgatgtacagcgggcagtattaatgaagatcgatgcttttcattatatccagctgggaactgtctacagaggcctcagtgttgtccctgatgaagaagtcattgaaatgtacgaggggtcccacgtgcccttggagcagatgagtgacttttacggaaagagctctcatggaaacacgatgaagcagttcatggacatcttctccctgcccgagatgaccctcctgtcctgcgtgaatgaatacttcctcaagaacaacatcgactatgagcctgtgcatctgtacaaagatgtcaaggattcaattcgagacgtccacatcaaaggaataatgtacagagcaattgaagcagacattgaaaagtacatctgctatgctgagcagacccgcgcagtgttggccaaactggctgatcatggcaagaagatgtttctcatcaccaatagccccagtagctttgtggacaaagggatgagttatatcgttgggaaagactggagggacctgttcgatgtggtcattgttcaggctgagaagccaaacttctttaatgataagcggaggcctttccgaaagatgaatgagaaaggtgtcttactctgggataaaatccataagttgcagaaaggccagatatacaagcagggtaatttatatgaatttttgaagcttactggatggagaggatccagagtgttgtattttggtgaccatatatacagtgacctggcggatttgaccctaaagcatggctggaggactggtgcaatcatcccagagttgagatctgagctcaaaatcatgaacacggagcaatacattcaaaccatgacctggctgcagaccttgactggcttattggaacagatgcaggttcacagagatgctgagtcacagctggttttgcaggagtggaaaaaggaaaggaaggagatgcgagaaatgaccaagagtttcttcaatgcccagtttggaagcctgttccgcacagaccagaacccaacctacttcctaaggcgcctgtcgcgcttcgctgacatctacatggcgtctctgagctgcctcctgaactatgacgtcagccacactttctacccccggaggactccactgcagcacgaactgcccgcctggtcagaaaggccccccaccttcggaacccctctcctgcaggaggcccaggccaagtagccaagggcaaaaactagaaactgtaactgcccctgattgggcaggcatgatggggttgacttcatgtgggtctgagtgttgcttttggaaaagatacagataagccttttgatatttattttgtaccttacggagaataattctcccaatgattaagacaggagctagcagcccacccctccagcctttccccccatgcagggctgaaaggcaagcttcacattggaactctgattttgcctttttgtttactgaggtcctggaacatcaggtttcctgggataggtagaccacttgatgccatgtctgtattctagcaggtcaagcttgaaaccgttcttgactcctccatggaacatttcctgaacatttacgggctatgcattgggaactgcaggggcacagtgatgggcaaagattagctgcttccagaaggctgatttcgtgggctccacaatggtaaaacgctgctgtgagtggcagagaggttccccaggtgatggccagttcccaaatcatttggtactaaggctttgacattctggcacatcacatcaaatagaacacagcctccctggaaggacttaagtgagaaagaacaagagaagctgcaactcctggacccttttgtcctcagtgtgtggttcctgcgtccttccccagggcaggagagaggagatgagagctctggtcaaaacctgccagctagtggaacagccttctatagagccttctgcaagaaacgagtgggtttgaagaaccaaaacatttgtggtaggtctcccaggagcttgttaaacctggaaacaccacctgagttggtttcatctgctcattggaagaaagaaaatgaaccaggaaaaagcatctttgtcatgaaatgctatgccatgccacccacccagttgaattggaatcctgttaaaacatgagatttaccagaaacagtcctttgtctagatggaaacaaacaagatcctggcttctctctaatgagttaccaactgagaggtgcttggattggccaggggaggaggaagatggccaccacaacttagccatgtccagccttctcttagatttcactcctgtgatgtttgtgcgactatttgggagtttgtatagtttgtttttttttttttgttttgttttgtttttttttagatgtctaagatgggaaagggcgaaggacattgaagctaaggaatagatatgacctagctaaccaagcttttctcatttctttctgttttgttttgttgagatggagttttgctcttattgcccaggctggagtgcagtggcacaatctcagctcactgcaacctctgcctcccgggttcaagcgattctcctgcctcagcctcccaagtagctgggattacaggcatgcactaccacacccagctaattttgtatttctagtagagatggggtttctccatggtggtcaggctggtctcgaactcctgacctcagataatctgcccgccttggcctcccaaattgctgggattacaggtgtgagccaccgcacctggcctgcttttttcatttctttctaggggcaatgcaagtggcatgtattccttttgttggagggaagaatccttaattgcacctggatttgtagtatccttcaatgtaaagtgcatatttactgcactctctgagtgctatgggaatgtctgctgttattagttatggggctgctaatactgttttaattgcatatgctatatcaatacttctgttcagattagcctgatctagtattgctaaaactcattttaagcttttgcggtaacttgtatatattcttaaatctaaaggatggcaggaacatgaggggagcttgtggagagtgcttgcttattcaacatttttattgtgataaatgtatgtaaccatctattgatgaaatccaagtctggcattccatgggctccttgccagatggcagaaacttaatgagttatatagcatcctttgtaatgctgcttgttatagttggaatgtacttgtgatatttggctgtatttaactataatggtgaaggtgaccctttagatccaataaggcttctccccatcttttcttctacattttgttatgaacacagtaaggcacagtagtatgttctttttttggaacagggtaggcattttgtttattgtttgcttgcttctaggtgttttcgccatcagggtgtattggaggctgacacttaatgggtgtgtgttacgcccagaactgctcggtgtcggggttctaaaagaatgcgctggtgttcttggcttcaagtttctgctttggagaagcagattcaggaagtaggtgttgcttaaaaataattcttggtttttatctaatcagatattcattgattacctaccaggtgccagttatagggtgttttgtttactcaagaatgaagtagaactatttttaaaacctgtttccatgagtgttcacgttaggtgacctaagctttgaaggagaaaaacattttctgggtatgaataatgagttttgtaatcaattcccagttagaagaatttcagtctctgggccattgagcttggcagtgttgagatctcccatgtgacagaagcctggcatctgggccaccaaggctcactgactgtgtaccttgcagactgtagacccatgtcgtggcggtaacggggccaaacacagtcattcccatgtgaacgatggaggcacatcccactttattattaatccttgtatatactcagtcaggacagattttaacttgtcgctgtcatgactttttttttttttttttgaggcaaggtctcgctctgttgcccattctggagtgcagtggtgtgatctcggctcactgcaacctcttgcctcccaggttcaagcaattttcgtgcctcagcctcccgagtagctgggactactggtacatgccaccaggcctggccaagttttgtagttttaatagagatggggtttcaccatgttggccaggctggtctcaaactcctagcctcaagtgttctgcccacctcagccttccaaagtgctgggattctgggtgtgagccactgtcatgcctggcctcgtcatgactcttttctctttttttttttttttttttttgagatttagttttgctctttttgcccaggccggagtgcaatggcacgatcttggctcactccaacctccgcctcctgggttcaagtgattctcctgcctcagcctcccgagtagctgggattacaggtgcccaccaccacatccagctaatttttttgtatttttagtagagacggggtttcaccatgttggccaggctggtctcgaactcctgaccttgggtaatccacctgccttggcctcccaaggtgctgggattacaggcatgagccaccgtgcccagcctatcatgactcaactgggatctggcacactgcactgggtgttttgttctctgatgtgcacattgatgaatgcatattggtacaagggaaacgaatctgttttcagccatttaaaaaattgtgttgtaaagcaaacaaaaatagcttgaacatttaaaaattactgtttaatattgtttgactgattttctaagaattatgtgaacaatgatgagtccagggcagcagccatcacaaatatgacagtccagcaaggcccatggaggtccctttggaagggacttgcacagctgattttctttttccagtgttgtttttacgggtgaaacgtggcttttgaaatactttagttgtttggcttagagctcccactttccccctaacatagtgcctgtctgttttttaaaacattttacccttcggcactattttctgctattcccattaatattatgtaacataaaccacttgctactgatttgggcatattacagactacaattactagttgctttgaatgcattggcactcttaattattgcaaaggagaattgaaaagtagtcttgtggtcctagttaatttagctttgggcaaactaagtggcttttcttctgtcctcttctcaaaaggccttttaagcagcagagactgggctaaatactggaactgaattccacttttctgcctgctcatttgctgccaaagaccacttggggctccttgtctagaatgctctaagacgaaatttggccagacacagggttccttgattgttctgttcaactaatagagaacctacattttgccttcttaatatcgactttcttttgtaccaggtttttctttctttcttttttgccttaggagcttagctcaaagttcagctaacctttgacactactagtgtcatttagtaacagtaatctttgacactactagtgtcatttaggagcttagctcaaagttcagctaacctttgacactgctagtgcgttcaagaaagggtagggaatgaagtacccttaatgcagggtcagcaaacttttcctgtaaaaggccagataggaagtatttttggctttttgggctgtttgcttttgctactactactgtgggaatgaccatggtcatggctgtgttccagcacaacttgatttaccaagacaagctgtgggctgtatttggtcctcaggctgtggcttgctagcccctgctctaatggattgtgttggcggcaatggcaagattcccttgctgagaacatgcagatgaataaccttatagctgggatgcagagaggagaaagttctgtaggtaataagtgcactgtattccctctgagctacttcctgggcatagttacatgtatggccagtgtgtgtacttgagccatcaggctcagacacttgttgaatatacctctcattgcattagtttgtaattgtgctagtgctgggtgctgagctcagctgcccggatgacctttccagactgaaggacatactcccctaacagctgggagtgctgctggctggccatttacttccagcccttatgaggagtttcccctgctgaagagccctgcctgccccagatcatacccccttcctgcctgtaacccttaccggctccatatggggtacaaaggtctggcctcctcaccccaacttgggaaaccctctggggccatcccagctccagagccccttgtggggtcagtgagacctcattgtggccacattacagcccagtgcctctccctgacaagcctgtacccagccggctcagcccacagcactgtcctatgaaccttcctgcacgccattctccacctcagtatctgctttcggggaacccaacctgcgacagtgcttctgtgtgttttcagtcctgcaggtttgaactctgactttggagacttttccagttatctcgtggaatgacagattgtgcctgtatgatatcaggcacaattaatgcaaattaggcagacctatttattctagatgtgaatttgctatttattttaaatgttgattttatgtgttatgtgactctgaacttattgccaaataaaagtttgaattgtaaaaaaaaaaaaaaaaaa

SEQ ID NO: 3341 - protein, 473 aa, Homo sapiens
MSNLLNPDAIFSNNEMSLSDIEIYGFDYDYTLVFYSKHLHTLIFNAARDLLINEHRYPAEIRKYEYDPNFAIRGLHYDVQRAVLMKIDAFHYIQLGTVYRGLSVVPDEEVIEMYEGSHVPLEQMSDFYGKSSHGNTMKQFMDIFSLPEMTLLSCVNEYFLKNNIDYEPVHLYKDVKDSIRDVHIKGIMYRAIEADIEKYICYAEQTRAVLAKLADHGKKMFLITNSPSSFVDKGMSYIVGKDWRDLFDVVIVQAEKPNFFNDKRRPFRKMNEKGVLLWDKIHKLQKGQIYKQGNLYEFLKLTGWRGSRVLYFGDHIYSDLADLTLKHGWRTGAIIPELRSELKIMNTEQYIQTMTWLQTLTGLLEQMQVHRDAESQLVLQEWKKERKEMREMTKSFFNAQFGSLFRTDQNPTYFLRRLSRFADIYMASLSCLLNYDVSHTFYPRRTPLQHELPAWSERPPTFGTPLLQEAQAK

SEQ ID NO: 3342 - DNA, 273 bp, Homo sapiens
tttttttttttttttttttttttttttttttggttttcaaaaattttattaaaaataaggcatatgacagtcacccctaaagcacagggctttatttttgggggtgagggaataccctttgaaaagcattggatacaaaagcgcagccaacaaaaaatttggagcagggtccctttgccctgccacagggctcctgccaggggggtttgaagccctgcacatcccccattcaagggtggcatgtccaggaaaaggggcttggagacccccggt

SEQ ID NO: 3343 - DNA, 5059 bp, Homo sapiens
cgaggggggaggcggaggcgccgggagccgcgcgaggagccgccgccgccgcgccatggagcccgagtgagcgcggcgcgggcccgtccggccgccggacaacatggaggcagcgccgcccgggccgccgtggccgctgctgctgctgctgctgctgctgctggcgctgtgcggctgcccggcccccgccgcggcctcgccgctcctgctatttgccaaccgccgggacgtacggctggtggacgccggcggagtcaagctggagtccaccatcgtggtcagcggcctggaggatgcggccgcagtggacttccagttttccaagggagccgtgtactggacagacgtgagcgaggaggccatcaagcagacctacctgaaccagacgggggccgccgtgcagaacgtggtcatctccggcctggtctctcccgacggcctcgcctgcgactgggtgggcaagaagctgtactggacggactcagagaccaaccgcatcgaggtggccaacctcaatggcacatcccggaaggtgctcttctggcaggaccttgaccagccgagggccatcgccttggaccccgctcacgggtacatgtactggacagactggggtgagacgccccggattgagcgggcagggatggatggcagcacccggaagatcattgtggactcggacatttactggcccaatggactgaccatcgacctggaggagcagaagctctactgggctgacgccaagctcagcttcatccaccgtgccaacctggacggctcgttccggcagaaggtggtggagggcagcctgacgcaccccttcgccctgacgctctccggggacactctgtactggacagactggcagacccgctccatccatgcctgcaacaagcgcactggggggaagaggaaggagatcctgagtgccctctactcacccatggacatccaggtgctgagccaggagcggcagcctttcttccacactcgctgtgaggaggacaatggcggctgctcccacctgtgcctgctgtccccaagcgagcctttctacacatgcgcctgccccacgggtgtgcagctgcaggacaacggcaggacgtgtaaggcaggagccgaggaggtgctgctgctggcccggcggacggacctacggaggatctcgctggacacgccggacttcaccgacatcgtgctgcaggtggacgacatccggcacgccattgccatcgactacgacccgctagagggctatgtctactggacagatgacgaggtgcgggccatccgcagggcgtacctggacgggtctggggcgcagacgctggtcaacaccgagatcaacgaccccgatggcatcgcggtcgactgggtggcccgaaacctctactggaccgacacgggcacggaccgcatcgaggtgacgcgcctcaacggcacctcccgcaagatcctggtgtcggaggacctggacgagccccgagccatcgcactgcaccccgtgatgggcctcatgtactggacagactggggagagaaccctaaaatcgagtgtgccaacttggatgggcaggagcggcgtgtgctggtcaatgcctccctcgggtggcccaacggcctggccctggacctgcaggaggggaagctctactggggagacgccaagacagacaagatcgaggtgatcaatgttgatgggacgaagaggcggaccctcctggaggacaagctcccgcacattttcgggttcacgctgctgggggacttcatctactggactgactggcagcgccgcagcatcgagcgggtgcacaaggtcaaggccagccgggacgtcatcattgaccagctgcccgacctgatggggctcaaagctgtgaatgtggccaaggtcgtcggaaccaacccgtgtgcggacaggaacggggggtgcagccacctgtgcttcttcacaccccacgcaacccggtgtggctgccccatcggcctggagctgctgagtgacatgaagacctgcatcgtgcctgaggccttcttggtcttcaccagcagagccgccatccacaggatctccctcgagaccaataacaacgacgtggccatcccgctcacgggcgtcaaggaggcctcagccctggactttgatgtgtccaacaaccacatttactggacagacgtcagcctgaagaccatcagccgcgccttcatgaacgggagctcggtggagcacgtggtggagtttggccttgactaccccgagggcatggccgttgactggatgggcaagaacctctactgggccgacactgggaccaatagaatcgaagtggcgcggctggacgggcagttccggcaagtcctcgtgtggagggacttggacaacccgaggtcgctggccctggatcccaccaagggctacatctactggaccgagtggggcggcaagccgaggatcgtgcgggccttcatggacgggaccaactgcatgacgctggtggacaaggtgggccgggccaacgacctcaccattgactacgctgaccagcgcctctactggaccgacctggacaccaacatgatcgagtcgtccaacatgctgggtcaggagcgggtcgtgattgccgacgatctcccgcacccgttcggtctgacgcagtacagcgattatatctactggacagactggaatctgcacagcattgagcgggccgacaagactagcggccggaaccgcaccctcatccagggccacctggacttcgtgatggacatcctggtgttccactcctcccgccaggatggcctcaatgactgtatgcacaacaacgggcagtgtgggcagctgtgccttgccatccccggcggccaccgctgcggctgcgcctcacactacaccctggaccccagcagccgcaactgcagcccgcccaccaccttcttgctgttcagccagaaatctgccatcagtcggatgatcccggacgaccagcacagcccggatctcatcctgcccctgcatggactgaggaacgtcaaagccatcgactatgacccactggacaagttcatctactgggtggatgggcgccagaacatcaagcgagccaaggacgacgggacccagccctttgttttgacctctctgagccaaggccaaaacccagacaggcagccccacgacctcagcatcgacatctacagccggacactgttctggacgtgcgaggccaccaataccatcaacgtccacaggctgagcggggaagccatgggggtggtgctgcgtggggaccgcgacaagcccagggccatcgtcgtcaacgcggagcgagggtacctgtacttcaccaacatgcaggaccgggcagccaagatcgaacgcgcagccctggacggcaccgagcgcgaggtcctcttcaccaccggcctcatccgccctgtggccctggtggtggacaacacactgggcaagctgttctgggtggacgcggacctgaagcgcattgagagctgtgacctgtcaggggccaaccgcctgaccctggaggacgccaacatcgtgcagcctctgggcctgaccatccttggcaagcatctctactggatcgaccgccagcagcagatgatcgagcgtgtggagaagaccaccggggacaagcggactcgcatccagggccgtgtcgcccacctcactggcatccatgcagtggaggaagtcagcctggaggagttctcagcccacccatgtgcccgtgacaatggtggctgctcccacatctgtattgccaagggtgatgggacaccacggtgctcatgcccagtccacctcgtgctcctgcagaacctgctgacctgtggagagccgcccacctgctccccggaccagtttgcatgtgccacaggggagatcgactgtatccccggggcctggcgctgtgacggctttcccgagtgcgatgaccagagcgacgaggagggctgccccgtgtgctccgccgcccagttcccctgcgcgcggggtcagtgtgtggacctgcgcctgcgctgcgacggcgaggcagactgtcaggaccgctcagacgaggtggactgtgacgccatctgcctgcccaaccagttccggtgtgcgagcggccagtgtgtcctcatcaaacagcagtgcgactccttccccgactgtatcgacggctccgacgagctcatgtgtgaaatcaccaagccgccctcagacgacagcccggcccacagcagtgccatcgggcccgtcattggcatcatcctctctctcttcgtcatgggtggtgtctattttgtgtgccagcgcgtggtgtgccagcgctatgcgggggccaacgggcccttcccgcacgagtatgtcagcgggaccccgcacgtgcccctcaatttcatagccccgggcggttcccagcatggccccttcacaggcatcgcatgcggaaagtccatgatgagctccgtgagcctgatggggggccggggcggggtgcccctctacgaccggaaccacgtcacaggggcctcgtccagcagctcgtccagcacgaaggccacgctgtacccgccgatcctgaacccgccgccctccccggccacggacccctccctgtacaacatggacatgttctactcttcaaacattccggccactgcgagaccgtacaggccctacatcattcgaggaatggcgcccccgacgacgccctgcagcaccgacgtgtgtgacagcgactacagcgccagccgctggaaggccagcaagtactacctggatttgaactcggactcagacccctatccacccccacccacgccccacagccagtacctgtcggcggaggacagctgcccgccctcgcccgccaccgagaggagctacttccatctcttcccgccccctccgtccccctgcacggactcatcctgacctcggccgggccactctggcttctctgtgcccctgtaaatagttttaaatatgaacaaagaaaaaaatatattttatgatttaaaaaataaatataattgggatttt

SEQ ID NO: 3344 - protein, 1615 aa, Homo sapiens [sequence omitted]

SEQ ID NO: 3345 - DNA, 480 bp, Homo sapiens
  misc_feature (26)..(26): n is a, c, g, or t
  misc_feature (29)..(30): n is a, c, g, or t
  misc_feature (40)..(40): n is a, c, g, or t
  misc_feature (55)..(55): n is a, c, g, or t
  misc_feature (79)..(79): n is a, c, g, or t
  misc_feature (88)..(89): n is a, c, g, or t
  misc_feature (91)..(91): n is a, c, g, or t
  misc_feature (94)..(94): n is a, c, g, or t
  misc_feature (96)..(96): n is a, c, g, or t
  misc_feature (101)..(101): n is a, c, g, or t
  misc_feature (103)..(103): n is a, c, g, or t
  misc_feature (106)..(106): n is a, c, g, or t
  misc_feature (108)..(108): n is a, c, g, or t
  misc_feature (115)..(118): n is a, c, g, or t
  misc_feature (126)..(126): n is a, c, g, or t
  misc_feature (140)..(140): n is a, c, g, or t
cgaaggaggagtgtgtgcggcggggngcnncggggtaaangcgagaaggctgcangagaccgagggggagccggggccngtggtgcgnngncgncnccatncnggnangaaaacnnnngcgtgggngcacatcaagtttnactttgagatcgcggtggagcagcagctgggggcgcacgcctgcccgttccccggcatggacaaagtcgggcgctgctgtctgtgaattctttttgaaagctgcctgcggaaaaagggggcatgtgtcccgtttcgccacatcagtggtgaagaagacagtttgtgtgcaaacactgggcttgcgttggcctatgcaaagaaaaaggggaccaagttgtgagttccttgcattgagtaatgacatgaccaagaatgccccgagtgctacttctacttccaagtttcggggagtgcagcaacaaggaatgtcccttccttgcacatcgaccccgagttcca

SEQ ID NO: 3346 - DNA, 340 bp, Homo sapiens
  misc_feature (21)..(21): n is a, c, g, or t
  misc_feature (301)..(301): n is a, c, g, or t
cgcaggtcgcaggcctctttntcagctggagttgcgcgggctgacgcgcactatgtagcgggtttcgggcgggccacgcgtgcgggacaggaacccaaccccagccgaccttgagctccaggagttcgtctcttacgtctgcggaagtgcagctgcctcatttcttagcgcaggttgacaactacaggcacaagccattgaagctggaatgtcctgttgctggtatttcaattgacttaagccaactatcccttcagttacaataggaaagtgcctctaataaggccaaatatgcgtactnaacttgtagcaaccacgtgtccgtgcagtgccacaggag

SEQ ID NO: 3347 - DNA, 436 bp, Homo sapiens
tttttttttctataacaaatcagaagcatgcatgatattttattttaaaaagataaaataaggaaaattgaagtccagcatctctaagatactggataaatatcttaataatcgaacagtaaagctctaatacagtacaaacattttaccattatgtttgccaataattaagcaaactgagcatcataagaatgaggtgagatgtaaaattactggaaagtttaattcactagaaatgagaaattttacatttgttatattatcctgtatttgtgtactacatttttctggcagaatgactccttgctgaaaaaaaatggcttaaagtaggtgcttttttaatggttttgcacattctggagaacagggactgcttcttcctaaacaagatccccggtcttgctattagtctagaatagtgaatatatatttaata

SEQ ID NO: 3348 - DNA, 369 bp, Homo sapiens
tttttttttttttttttttttttttttttttttttttttttttttttggccagcttccccaacaggttgagaaaccatttttttttaaaaactgcctgctcccagagtcaataaataacttttattacaagaagtacaggagaaaaacagtaggccaacgggagtggttccattttaacaaacactgagtcaagtcaggggtctgatgaagccctaacatttgccaaagctgtgagcctctttaagctgtgcaggccctggatgggacgggtaaattggaggagttttggggcccaggcaagatgtatcccatttaagggcactaagtgtcataggccccaaaggctgcctggggctggggccaaagct

SEQ ID NO: 3349 - DNA, 481 bp, Homo sapiens
  misc_feature (4)..(4): n is a, c, g, or t
  misc_feature (473)..(473): n is a, c, g, or t
ttanaattgcagaaatgaaagattttattgaagaacacacacaatgtggatcagaaaacaatcaccaagcttacaactaaataaacaattaaaaaagagtaagctataccttttctgaactctaagaaagaccccaattatacaattttaaaataataataaaaacagactagcccaccctcttcctttggagactgtggaacccagtcatgtcttgggtctttaacaagcacaaccttaccttatagcatgcagtctcacaggggcaatattgctcccaagaagcaaaaacaggttcttttgaggtaaacataattggattctttttaattttaataccacagatgtattgcttatgtattgtttatgtatatacatatagtacataaacaatatatatgtggtattaaaatgtctttgggggtgattaggaaaaaacgtctaagaaggctccttagaggggacaataattnttttaaag

SEQ ID NO: 3350 - DNA, 1631 bp, Homo sapiens
ggaattccgccacggatggatggccagatggatagatctggcaggaaagaagccgtggtcctggggaccgaggacgcgctgccgccgccgctgcctcctccgggcagcctctaccacttcttccagctgcacatggtttgggtcgtgctgctcagcctcctgtgctacctcgtgctgttcctctgccgacattcctcccatcgaggcgtcttcctatccgtcaccatcctcatctacctactcatgggtgagatgcacatggtagacaccgtgacatggcacaagatgcgaggggcacagatgattgtggccatgaaggcagtgtctctgggcttcgacctggaccggggcgaggtgggtacggtgccctcgccagtggagttcatgggctacctctacttcgtgggcaccatcgtcttcgggccctggatatccttccacagctacctacaagctgtccaaggccgcccactgagctgccggtggctgcagaaggtggcccggagcctggcactggccctgctgtgccttgtgctgtccacttgcgtgggcccctacctcttcccgtacttcatccccctcaacggtgaccgcctccttcgcaacaagaaacgcaaagccaggggcaccatggtaaggtggctgcgagcctacgagagtgctgtctccttccacttcagcaactattttgtgggctttctttccgaggccacggccacgttggcgggggctggctttaccgaggagaaggatcacctggaatgggacctgacggtgtccaagccactgaatgtggagctgcctcggtcaatggtggaagttgtcacaagctggaacctgcccatgtcttattggctaaataactatgttttcaagaatgctctccgcctggggaccttctcggctgtgctggtcacctatgcagccagcgccctcctacatggcttcagtttccacctggctgcggtcctgctgtccctggcttttatcacttacgtggagcatgtcctccggaagcgcctggctcggatcctcagtgcctgtgtcttgtcaaagcggtgcccgccagactgttcgcaccagcatcgcttgggcctgggggtgcgagccttaaacttgctctttggagctctggccatcttccacctggcctacctgggctccctgtttgatgtcgatgtggatgacaccacagaggagcagggctacggcatggcatacactgtccacaagtggtcagagctcagctgggccagtcactgggtcacttttggatgctggatcttctaccgtctcataggctgaggcacatctgtggaccctcataaccctcttaagacccctctcagggtgccactgatgggggatgagggaaggccctctctctactccttgaccccctccatccttgacccccaacacctcaacacacacacacacacacacacacaaaatcacaccattttcatgcctgtcaatccccaccccaccacaaggcaggaaaggggtggtgcctgctggggcctagagggggatgcttggggaaacgagaaggggagatccagggcctcccccccttccttcttcctttttatatacaatttgttattgtcaaataaaaacggaattcc

SEQ ID NO: 3351 - protein, 434 aa, Homo sapiens
GIPPRMDGQMDRSGRKEAVVLGTEDALPPPLPPPGSLYHFFQLHMVWVVLLSLLCYLVLFLCRHSSHRGVFLSVTILIYLLMGEMHMVDTVTWHKMRGAQMIVAMKAVSLGFDLDRGEVGTVPSPVEFMGYLYFVGTIVFGPWISFHSYLQAVQGRPLSCRWLQKVARSLALALLCLVLSTCVGPYLFPYFIPLNGDRLLRNKKRKARGTMVRWLRAYESAVSFHFSNYFVGFLSEATATLAGAGFTEEKDHLEWDLTVSKPLNVELPRSMVEVVTSWNLPMSYWLNNYVFKNALRLGTFSAVLVTYAASALLHGFSFHLAAVLLSLAFITYVEHVLRKRLARILSACVLSKRCPPDCSHQHRLGLGVRALNLLFGALAIFHLAYLGSLFDVDVDDTTEEQGYGMAYTVHKWSELSWASHWVTFGCWIFYRLIG

SEQ ID NO: 3352 - DNA, 682 bp, Homo sapiens
gcggcgggatggcaacagcctccggggcctcggacttgtctggctccggagcgcccccgcccggtgtgggagctcaggcggcggcggccgctgaggaggaggagcgagaggtggtgcgggtccgagtcaagcatggtgatggggcccctggtggcctaccccatgtcttctctccccagaaatgtgagagcttcttgccgccagagttccgctcttttgctgtagatccccagatcacctcgctcgacgtgttgcagcacatcctcatccgagcctttgatttgagtgggaagaagaactttggcatcagctacctgggccgggaccggctaggacaggaagtttacctctcacttctatctgactgggacctcagcacagcctttgccactgcctccaaaccttacctgcaattgcgtgtagatattcggccctcggaggacagcccattgctagaagactgggacataatcagccccaaagatgtcattggctccgacgtgttgctggctgagaaacggtcatcactgacgactgccgccctgccctttacacagtccatcctcactcaggtgggccgtaccttgtctaaggtccaacaagtgctgagctggtcgtatgggggaagatgtcagccttcaagccaccctgagcgatgctgagttcacacgtacctgaacac

SEQ ID NO: 3353 - DNA, 479 bp, Homo sapiens
  misc_feature (311)..(311): n is a, c, g, or t
tctatcagggtccaagcctcggcatgtgctggcttgtttggctttattttagaaaccaaccaacatgtttcattagcactgacacagcaggggccccctgctgccacctgacaatccagcgtcacttacactgcacccacgcaggccacaccttcaatggccacggcacgctagcccagagttagccacacagaaacacacttctcaccgcacaaaactcccttttgaaaaaaccaagcaatcgtcaggtcggaggagaatcactagccccccacagcgagaggggacaaagcttggtggccgaggcccangtccttgtggcccctcccggtggggtgaaggtgcccgggactcctcggggttgcatggctacagccggggcgctgccagggcctcctctgcggctgagagatggaagggatccttcccgacgcccgcaggtgggggcgagccaccgggaaccgggcctgtcaccagca

SEQ ID NO: 3354 - DNA, 494 bp, Homo sapiens
tcccatcgaattgcctatcccgtatcagaccgttctttgggagctgtctttactaagtcacttgcacaggacccttcctctcaggatccacttctgggcaatcctcacaaataacagacaaatgataataggtagcattcactgagtttgaccatgtttcaggcactgtgataagagctttttacatgccctggtccacttagtcctccagaattccatcaggcaaagcaggtgcaattatagcctcttggcatagtttaaacttgggactgcagaccctggtgcctgactgcctggggtcaaatttcagttctcctagttactagctgtgtggccttgggcaagtcacctattttcctcacctgtaaaatggagataataatagaatctacttcactggtttgctctgatgagctaaagtgagcaaggcattgaaatgctctgtaggtatttcctaaatgaacaaatacttcacacaatagggcaatgtcgat

SEQ ID NO: 3355 - DNA, 452 bp, Homo sapiens
aaatcatcgatcgagtttaatacattgtaaagaaggaaaactacattggcgtatttaagacaaacactttttctctatcctcactacccactggacggtcctccttggtccaaaaaaaacctaacaatctcaagacacatcggcagctacccctcccgggtccaacctttcagatcctcccattacactgttaaaacatgtaactcaatccatccgcgaagaaaaccaaaccaacagaaaaggaagctgaagacatggacatcgcaagccacgcggtaatgcatacttggcacagagtagccaatatagaagacgtgtgcctcacacggttcactttgttcatcaataaaagaatataaaaatcttgttcacccagtggtaagtgtattaaaatagatctgtatcatacagcacagtttctcccggagtcgtgagaatgacaggagggaccg

SEQ ID NO: 3356 - DNA, 329 bp, Homo sapiens
gcgtccgaaattaaccagacattgtggcatgtgcctgtaatcccagctactcaggaggctgacacaggagaattgcttgaaccaggaggcggaggctgcagtgagctgagattgtgccactgcactccagcctgggcaacagaacgagactctgtctcaaaaaaaaaaaaaaaaaaaaagaaaagaaaaaaaaaaagagcaacttactgctttgtgaggttgtgagtggccaccactgaaggtctttgaaaagaggccaaacgctgctgtagccaggcctgtcttaagaggacttgtgcttccagggacccaggcaggatgatggcgca

SEQ ID NO: 3357 - DNA, 538 bp, Homo sapiens
tctgagtctctgctggctaagccgccgcctcagccgcctcagtcgcctcaatctcaccttcctcctcttcctcctcctcggctcctcagcggccgggcggccccaccgcccacggagatgcaccctccagcagcagctccctggcagaggcccagccacccctggctgctccaccacagaagccccagcctcacccacagctcaacaagtcgcagtccctgacaaatgccttcagcttctctgagtcctccttcttccggtcttcagccaatgaggatgaagccaaagcggagaccatccggagcttgaggaagtcctttgccagcctcttttcagattagctcttcagacacacggggcacccagcccaaccgggaaaggcatctaagacattcaccaacaacagtcagccagcttggtggtgatgtcccatgaccttgacgtgtgtggtcccttcctctgctctgttgtactaagtgatgttgtgcagcccagaaaggaccattttgacagtctcagggcaggtgcctacccagca

SEQ ID NO: 3358 - DNA, 1065 bp, Homo sapiens
aggcaagtttgcagtcagtgataagatggcattcacaattcattttatgaaagcaagcaacggttagatgtaaaaaactgcttaagtgagaaatgtaatattggcatgtcccattttgcgaagctgaaaaatgattttgtcaacacgcataaatctgcacactttatatactgcatgttattaaaaaattccatcagtaaattattacgaattttgcaaagttaggcttacatttatactgttgctggtgtatgtgtaagtagatatggaatgaatgttttcaagtttagtaggtaacatcctccaacaatggacagcggcttgtgaaaattccaaagacattttgatagctcaaccacattattcacattataggtagatgatcttattatatgttccttccctttctctgtcacaaatagggtgatcacgattgagtgctaggaatactgcaacggtcttaatttcagagttatagcagatctgctaacccacgacactggccagtgctttagctcttcaggtaaaaaatatctttttaatacataggaagagccaggtcccgtgcctcaaggattctaggccattggatatcatgtatcaattgccagttctgaatttgagcgtgcagtatacaccaatgtaatgtgtagctgagacataagactactaaagtcccccttactccttgtttttgtctttctttctggctggaaggaattaacatgcaaccagactaattgttttctactagattattctgtcaactctccgatggtactgcagttaagcagcctctctactgtggctctctgtgcggtttcacaggtcccatagatgttatgtaagacagtcactatagagcaaacaggcgtagacagagagaagcaacttaaagggtctgggtgaataaaacctgggatagcagaattcagactgtgagggtaccaaagggtcaccggcacaggagcggagattgaagccataaggttgaaggaatagcttggaggcgagagattctaaacatgtaattgagagggaataaagggaaaggaaataaagacg

SEQ ID NO: 3359 - DNA, 196 bp, Homo sapiens
cgttaaaactcagtcccatgggtccaattatacgattctgctccccccttctccttttagacatggttgtgggtctggagggagacgtgggtcaaggtcctcatcccatcctccctctgccaggcactatgtgtctggggcttcgatccttgggtgcaggcagggctgggacacgcggtttccctcccagtccctg

SEQ ID NO: 3360 - DNA, 1367 bp, Homo sapiens
gaattctgaactcatagtctccagccacacgtatgttaagcgaaactcctctgtgcccagcatgaaatcaaaagcaagtttttcctttttctttccacggtggtgaaggcggtcatcctcttgtagcctagggttccttggccaaattgctagttgccgatgacctcggggctcggcttgcgacgaacactgggctggaatctgtctccaggaaacccaggcccttttattgttgctgtgtcccccagaggcagggccaagctgaggccattctgtcatgctcaggaaggtagaagatggcccaaagggaagcacacctgcagtaggagggggggcagcggtgggcagggcacagcttccctgcaggttagaccccctcgcaggccagctgcctctcctgcagaaccgtgggtctcgggagaggctgccatccctgcacatgacaggtaggcacattgccgggttctggacatgcccccagagcagcctctgcccaccccttcctgggtccctgactccgtccccctccgtgtgcccctccccagatcacgcgctgccccatgatcccgtgctacatctcctccccggacgagtgcctctggatggactgggtcacagagaagaacatcaacgggcaccaggccaagttcttcgcctgcatcaagagaagtgacggctcctgtgcgtggtaccgcggcgcggcgccccccaagcaggagtttctcgacatcgaggacccataagcaggcctccaacgcccctgtggccaactgcaaaaaaagcctccaagggtttcgactggtccagctctgacatcccttcctggaaacagcatgaataaaacactcatcccatgggtccaaattaatatgattctgctccccccttctccttttagacatggttgtgggtctggagggagacgtgggtccaaggtcctcatcccatcctccctctgccaggcactatgtgtctggggcttcgatccttgggtgcaggcagggctgggacacgcggcttccctcccagtccctgccttggcaccgtcacagatgccaagcaggcagcacttagggatctcccagctgggttagggcagggcctgagaaatgtgcattttgcagaaacttttgagggtcgttgcaagactgtgtagaggcctacaggtccctttcatcttgagagggacatggcccttgttttctgcagcttccacgcctctgcactccctgcccctggaagtgctcccatcgcccggtgcccaccatgagctcccagcacctgactccccccacatggaagggcagcctggaaccagtggctagttcttgaattagccccatcaatcctattaatcctcagaattc

SEQ ID NO: 3361 - protein, 218 aa, Homo sapiens [sequence omitted]

SEQ ID NO: 3362 - DNA, 415 bp, Homo sapiens
tttttttttttttttttacgaagaatacccagccagtgagcaggtgtttattagggtcctttttcattaccccagagacagacccagggctggctacgtgcacaggaagtaacgcttgccacatgcataaatacgtgaaggtgcacattacatcagcacagattcacaaaacacctcgccttggcaagaaaactgtagctaggcagctcccgtcctcagggactcctgccacagacgtcatggagacagcatgagcctccccagaacagtccccacggcctagactccccagagcaggaggagcagcccaggctctgttgcgagacagccatcacttcctgttctttgcaggtgcctaaggtaggttacctggccaaggttttggtggaaaaaatgagttttttcaatgttgcag

SEQ ID NO: 3363 - DNA, 332 bp, Homo sapiens
tttttttttttttgggaacaatgttctttaattaagttctttagtttaaagtcactggcaagagaaattattagagatgttagtccactctgttatttaatagtacattgttactatcttttaccaacacccttgagtaaggtgggataggttggaagttagtggcatgataatacttcactgaatgccaattggtcttaacatgttaaaaaaaagtttaattaaaaatttaagttcacaataatctaaaatttttaaaatgtgctgcattttattacataaaaggtgggttagtaaaaagatatactactcaattttaatttaattttaac

SEQ ID NO: 3364 - DNA, 478 bp, Homo sapiens
aacgtgtttttttttttttttttttttttgctccagaagagagccttaaagcagggatgagagggtcctgaatcggcgtatggagtcaatttccccgccccctcgagaaagtcaatcacacccagttagtgacctgggcacacaaaatctccacataggaaaaagacagggtttgaaataggaaataaacaaaaatcagaattctattctttcacttcttaaaagtatctttttcctcccgcaattgctttctcaaaataccaaacttggactttgaaatcaagttctttttctattgctctccgcagttcttactgaaagcaaggatttgttttggtcccacatgttgaaaacttcacgtccctataattaagagtttatatgccacgccttccaccgcgtttccctgttaaaactcccttctctaaaaaagatccctgaaaacacaactaccagctcgcccctcaagcagccacag

SEQ ID NO: 3365 - DNA, 430 bp, Homo sapiens
  misc_feature (392)..(392): n is a, c, g, or t
  misc_feature (398)..(398): n is a, c, g, or t
cattcttttagttacttaaaaatgtacaattaacttgctttgactatagtcactcccgaccagagaaaaaccctgtagacattagtcactcctcattctgtctcaaaccctctccctgaccctcagccctaggtagcaactacctagtgcgatcaatcccatatgcatagattaccatattgtggacatttcctataagcggaattgcacaataggggagctgttatgactgacataacacgtagcacaatattttcaagattcgtccacattgtaggcttacccacagggggaaaccattttttcgggggcttttagtaacaccggtgttttctccttccttacgtccttctttccttccttccttcgttcgccggattccttcctgcggnctggtncttctttccttccctccttcctcctatttctc

SEQ ID NO: 3366 - DNA, 342 bp, Homo sapiens
gtataggaggccaggctgatcatgcttgaagatgtgcatgatgaagatggtaaggcccaggccgaagatgtaggctgcaaagctggtgtagaagtaggtgtgggtattcttcttcaagctgatgtcaaagcgcagcagcaaggcaatgaagatccctggaatgacgacatctccaagtcccagcatggcaaagttgttatgcttcgcaggccatttcgtccagacagaatcctggcggaaacaccaattttattaggtgcctcagaagagacttcggccactgctcaccatcacattggtgccaaatacccagaagacatcgtagatgaagggcccgaccta

SEQ ID NO: 3367 - DNA, 703 bp, Homo sapiens
ggagttgttattaagctgttagtaaacaggttctttttgctcttataattgctatttttcacaaaaggaaagtataattcgtgatctcaccactgaactacttttactgaaggataccaacttctacgaacctatatattctttcttacaatagtggttgacagttggctcgcaatatgggtcgacgttttgtctaaagtcttgctcttttatctacagggagtagattctgctatcttggcctcacagcccttcctgttgattacaaagcccgtggaagaaaacagaacacaccctcctcagttccgtctaaatgtgtttcttctgcttcaattacaccagttctggggcaaagacactgatgaaacaacacccatacctgaaaagaataaatgtgtgactttcaaatcccctttctcagtgaaagaaacagcaaacacttaagattcagcatctgttctccagttgcactgaggaatgcactgtctcgcagcaccagctctgcagagcccttgccccagactctttgcgggtttatttatatgtatttccatattttattcctgtgtgtcactggtgcattggtgtggcaacaagtgacccaatgctacaggtcttactattggacacaagtcaggtgcaaccacacaaaaaaaaaccacttccattaacttgctattaaatgcattggcggaggaacatt

SEQ ID NO: 3368 - DNA, 299 bp, Homo sapiens
  misc_feature (17)..(17): n is a, c, g, or t
  misc_feature (47)..(47): n is a, c, g, or t
  misc_feature (180)..(180): n is a, c, g, or t
  misc_feature (196)..(196): n is a, c, g, or t
  misc_feature (225)..(225): n is a, c, g, or t
ggaaggggagggaaagntgggaggaatgggaagcagctgttctggtngcttccactctgaggtgtgggaacggggagcctctggggggcacctgtttccccagtgactcagagagagcaagactgcaggaacggaggggtcctgcagggtgtccaccaagaagtcacagagcccgttctncgccccacaccatctngagcaggggcttctcttctgagtgaactnaggaaggtgcttagatggtgagggctcttagaaaccaagccccatgagcagcagtgggaagaccttcgggccat

SEQ ID NO: 3369 - DNA, 636 bp, Homo sapiens
  misc_feature (2)..(2): n is a, c, g, or t
  misc_feature (5)..(5): n is a, c, g, or t
  misc_feature (538)..(538): n is a, c, g, or t
  misc_feature (555)..(555): n is a, c, g, or t
  misc_feature (629)..(629): n is a, c, g, or t
tnttnttttatactttgtgggattttatttaggtcaagttcttagtacacggcaacaattccaaatacaattaaaaaattaaaaagtgatgttcctccactcatctggaggtggtttaatggcacacaaggaacattactggcaacagactgctccctcaagttcccctggatggtttttactcaactcataataccaccaactctccctctgggagctaaaagtacaactggccagatcacaaattgtttacattcttttttgtaagccattttaagaaaaatggtgcatggacacaaaatatgataaaaactgcttttccatagaattcttaagttgcaaaagaggtttcattttaatgtgaaaataagctttttttgttggtttttcttttttcttacaaaaaaccttaagatattcagcaaggatcatttatacacagctaggccccgcgtttcgttttaattgttttttttttttaataattatatgagatctccaaaacaggaaccaaggtcagcaccaagtaaactttaangtaatgagcccatgccncccatttaatcacttttatagggctctctcccaataaggctgctgtgccgtgcccctgccagtgttggaggaantacattt

SEQ ID NO: 3370 - DNA, 365 bp, Homo sapiens
  misc_feature (262)..(262): n is a, c, g, or t
  misc_feature (333)..(333): n is a, c, g, or t
  misc_feature (347)..(347): n is a, c, g, or t
aggatatcagacagctctggatataaagaagaagataggacaaaaactggaagattggttgaaagtatcttcatgttatatgccaagtccatgcagctaaacaactgtcctctcctgctggaggctacaggtttattctctggagtgtaaaatagaggatctctgggctggtagacagcaggcacagatcgaggtaaggaatcacatcagttcctgccacttccctccaaaaaaagataaaaatatttgacaccagggcttnccccaattgaattgggcccagacaggattttcaaggcggtaaaggccacccaacccactacttctcttccnttttttagtgttcntatttttttaactttggg

SEQ ID NO: 3371 - DNA, 398 bp, Homo sapiens
  misc_feature (85)..(85): n is a, c, g, or t
ctcatcatcagcaactttttgaaggccaagcagaagccgggcagcaccccaaacctgcagcagaagaagagccaggcccggctgnccccgagatcgtgtctgcttcccagtaccgcaagttcgatgagttccagacaggcatcctcatctacgagctgctgcaccaacccaacccgttcgaggtgcgcgcccagctgcgggagagagactaccggcagaggacctgccgccgctgcccgcgctgtccctctactcacccggcctgcagcagctggcacatctgctactggaggccgaccccatcaagcgtatccgcatcggcgaggccaagcgcgtgctgcagtgccttgctgtggggggcctcggcgcgactgggttgcagcagccgggcacctcgg

SEQ ID NO: 3372 - DNA, 578 bp, Homo sapiens
ttgaatttaggtgacactatagaagagctatgacgtcgcatgcacgcgtacgtaagcttggatcctctagagcggccgcctactactactaaattcgcggccgcgtcgactttcaagaggctatattcataggttggggccagggctaggacttcaacacaactttttggacttcttggggggcgcaattcaattcataacagagaccttgagtaaaatactgtgtcaaagttgggggagctgaggctgaaatgagggctcctggtattgggagggaatggggcagtgcagctctaatcagagcccatgagagtggacctgtgggtccaggcagctcttaccccaggagctcttggatccaccctgtgctatgttttggagatgtgtcatatcattcaaaaaagccaaaagaggctgggcactgtggctgacacctgtgatcccagcactttgggaggccgaggtgggagaatcacttgaggccaagagttcaagaccagcctgtgcaacatagggagactccatttctaaaaaaaaaaaaaaatttaattacccaggcctggtagcctgcctgtagt

SEQ ID NO: 3373 - DNA, 523 bp, Homo sapiens
tttttttttttcagtttttcctgtttattatatagttattctaaggtggtaagtgtcacaaagttaacttcaagaggaataacatggtccagtgtgaaacacaaggtacaacattttacaatgaaaccacagcacaaagtaactgaactttcaaaattgggtagttcaatgaaacattttgtcaacccttagctctataaagctctgctgatggacttagttgatggatttaaaaaatatattgctgtgtcaaatgttttaacacaaaatgtttttttttaaagagaatacacatccaatcaactgaaactgtgagcagaaagtatgtaacctctttataaaaacgttatccaaatttacaacattcataatatatttcaaagtaaagagttcttagaaaaaataaactcaattccttgcttactgatgagtatcaactcctcaaaaacacatcacagaaagttaactttcatacttctttgcctataacttttagatatctactaccctggcttcaaaaaca

SEQ ID NO: 3374 - DNA, 302 bp, Homo sapiens
ggtgtggcgtcacttccggcttccttcagtccgctggtcccgagcacgagctgtgaggggattcacttgtgtgcgtatttcctcggaaccatggcgtccctttcccttgcacctgttaacattctctttgcaggagctgatgaagagagagcagagacagctcgtctgacttcttttattggtgccatcgccattggagacttggtaaagagcaccttgggacccaaaggcatggacaaaattcttctaagcagtggacgagatgcctctcttatggtaaccaatgatggtgccactattct

SEQ ID NO: 3375 - DNA, 473 bp, Homo sapiens
ttttttttttttttttggtttaaaatatttattgattaaaaaaaattaaaaattttttatacaaaggtgatgagaaaaaatctcatgcaaactccgggcatacaataaaaataactcaaatattaatatgatgattttgtacaaaataattcttttgaagtaggaccggtggcaaccaacacggctccctgctccaggccgggacgcccctctgggaggaacgcgcggccacccttggaaacctgtaagtgatccacggtccaggtgtggaatgctcacagttgtcactatgatgaatgatgaaaaccctattgctgctactcagaaacgagactgagacctagggacagagtaaggaattcctcaacactgcgggaatcctggaggaacgaagtaattcacaaaggttttcagaaaagttttcgccaatcgtcttaggtgatgacacaaatgccttgagattgttacagagg

SEQ ID NO: 3376 - DNA, 429 bp, Homo sapiens
tttttttttcacattttaaatgtttaggttcatcaggaagtggtcttactgtaaacgcactttccaaagacacatgatcatcttggaatgaaacctggcaatagcgcatatcttttacagatgttggtacttgcacatcaggaagcagaccctgtagcaagtgttctttgttaatctcaggagtccaattaactttaattttttctgctaaagctgatgttatattgatttctctttctccttcatcatacatttgaaaaataagattatgcataatatcacccgctatccaattaacctcatcctgatgtttgatctgaattgccttttgtccttctacactgaatatttgtagtcttgcaacatggctactgggaagcaacttaatagtcttctccacaggtgccacatctttacaactaggtattt

SEQ ID NO: 3377 - DNA, 604 bp, Homo sapiens
  misc_feature (511)..(511): n is a, c, g, or t
gcggcagcggcagcggcctcgggcggggccggccggacggacaggcggacagaaggcgccaggggcgcgcgtcccgcccgggccggccatggagggcgcctccttcggcgcgggccgcgcaggggccgccctggaccccgtgagctttgcgcggcggccccagaccctgctccgggtcgcgtcctgggtgttctccatcgccgtcttcgggcccatcgtcaacgagggctacgtgaacaccgacagcggccccgagctgcgctgcgtgttcaacgggaacgcgggcgcctgccgcttcggcgtcgcgctgggcctcggagccttcctcgcctgcgccgccttcctgctgctcgatgtgcgcttccagcaaatcagcagcgtccgcgaccgccggcgcgcggtgttgctggaccttggcttctcaggactctggtccttcctgtggttcgtgggcttctgcttcctcaccaatcagtggcagcgcacggcgctagggccggccacgacgcangcgggggacgccggaccggccgccattcgccttagcttcttcttcatccttagctgggttgcgctcaccaggaaggcccttgcacggttacag

SEQ ID NO: 3378 - DNA, 318 bp, Homo sapiens
  misc_feature (64)..(64): n is a, c, g, or t
  misc_feature (107)..(107): n is a, c, g, or t
  misc_feature (215)..(215): n is a, c, g, or t
  misc_feature (241)..(241): n is a, c, g, or t
  misc_feature (261)..(261): n is a, c, g, or t
cggcaccggggacgctggagcccgacgcggcggcggcgacccccgcggctccgagtccagcgtntctccccctggctcccggctgtgcgctgaggctttgtcccctntcctttggcgaaggagtggagtttgaccccttaccaccaaaggaagtaaggtacacctccttggtcaagtacgactccgagaggcacttcatcgacgacgtgcagctncccctgggcctggcggtggcctcctncagccagacggtcacctgtntccccaatggcacgtggcgcaactacaaggccgaggtgcgcttcgagccacgccaca

SEQ ID NO: 3379 - DNA, 541 bp, Homo sapiens
  misc_feature (168)..(168): n is a, c, g, or t
  misc_feature (274)..(274): n is a, c, g, or t
  misc_feature (416)..(416): n is a, c, g, or t
  misc_feature (422)..(422): n is a, c, g, or t
  misc_feature (427)..(427): n is a, c, g, or t
  misc_feature (455)..(455): n is a, c, g, or t
ctgaattggttttaccatgtgtgtaaagactgttgtatgatttttgtagcacaacccttgaatacataaagcacgattggctccccagaaggcaggtgttggccaggcagtggatgcacggtagggcagtgtgcagccctgcatgcacgtggctggtatgccctgcgnagctagctccccgcacacagtgctgtgagtctctggttcatgtcactctgtggagcaggggctgctccagcacaaagaggtttttgacatgggaaaggcagagcangatgtcagggcaggccctgggcgggctcctagagagccaaccaccctctaataagggggtgctctccaccctatctgaggagcaattgggatctcctaggaagtgaaaactgttaccgtatgtccttaattacaagaatttncagtgngagtngattctggaagaaatgtgtatggcatgnttgttactgctatgtctcatgaaatatttacgtttttatgtaactttttttccattttcagatcatcttttaattttaaagcaaaa

SEQ ID NO: 3380 - DNA, 345 bp, Homo sapiens
tttttttttttttttttttttttttttttttttttaaaaactttggcatttttattcagacacgtataaaaacaaaacaaaaaacttcagggatacaacagacgttttcccttagttccccatccaaggggacagaggggggcagctgaagctggatcttttttctgtcctacctggaagcttctcactggtggatgaaaatggcttctaaaaggggatcttggggatccttgtgaatttgccctcggataaggagtgaagatcatttacggcacatgtggattatggtttacacaaagatgtccagttatttttccttttgactacccccaccaccacttcctg

SEQ ID NO: 3381 - DNA, 374 bp, Homo sapiens
  misc_feature (146)..(146): n is a, c, g, or t
  misc_feature (167)..(167): n is a, c, g, or t
  misc_feature (202)..(202): n is a, c, g, or t
  misc_feature (300)..(300): n is a, c, g, or t
  misc_feature (310)..(310): n is a, c, g, or t
  misc_feature (338)..(338): n is a, c, g, or t
  misc_feature (358)..(358): n is a, c, g, or t
  misc_feature (368)..(368): n is a, c, g, or t
tgttacctccgtgcttgggtgggtaaagatcataggactaaatgcaaggttcaatttcttatttaataatggaggcctagtgacaaatacgtattacaaggcaaagacaaactcaaacagagattttcttctgaatttgaacatcngtcactgaaatgcatgaatcntgatttctccatttaaaaatgggaataactttatnacttggggatgcaagatgaatgaattaatgccagttagaagggaccatgccaatttgaaatattcagatggaatgtgctatccaatacaaaatattgntataaataantattgttaacatactctcgtgccgaatncctggcagcccggggggatncactagttcnagagcg

SEQ ID NO: 3382 - DNA, 232 bp, Homo sapiens
  misc_feature (182)..(182): n is a, c, g, or t
  misc_feature (192)..(192): n is a, c, g, or t
aataaggccgcagatggagtcagaatgtgaaatttacaaataatcactggatccatctactgttttccatcaccttccccactgatgctctgggcgagagagtgatgtgtcacttcaactgtgtgtaatatgtcagacacgtcctacaataacaggcgtcatatttgtattatttttagttntactgtaganaataatagtcaccgccaaaggggattagagtccccgtttt

SEQ ID NO: 3383 - DNA, 425 bp, Homo sapiens
gcggccgcctactactactaaattcgcggccgcgtcgacggaaatataactctttatttaaatatcagtacacagcaataaattactaaaggaaacaatcattaatataaatttttttcttattaaataattaaacaattctctttcaggacatggaaagaatccctggaggtctgaagtctaacatgattgttttactgacaatcatgtcagtaatgaaagaaagaaatcatcattcaaagaagtacttgattttccaaacaaaaagagaagaaagaaaatgttgacatatcttgtttagtcagccagaactttaagtgcaggaattccatcaggtagcaccaagagaaaattgcataatatgttaggaataatcactggttaaattgttggcaaaaggaatcaaggcagtgaatgagctattg

SEQ ID NO: 3384 - DNA, 509 bp, Homo sapiens
  misc_feature (386)..(386): n is a, c, g, or t
cacgaggccagcctgaccaacatggagaaaccctgtctctactaaaaatacaaaattagccaggcgtggtggcacatgcctgtaatcccagctaatttttgtactttttgtagagacagggtctcaccatgttgcccaggctggtcctgaactcctgggctcaagtaatctgcccacctcagcctcccaaagtgttggggttacaggcgtgaggcaccgcggctggcctgagtttcttcttaatactgtatcacaattgtgggctgtcttatgtgttgatatcgattgagctatttgaaataggaatgttaatgggtgtattaaatttttgtaaggatataacaatatctaccttccaaggatgttgtgaggttttccatgatttntgtatatagctaatgttacctttgaggggtggtgtgcattatgttggatgattgtaaattttcagtggaaaatgtaccgtgtcctaaatttaaagacattaaaaatatcccaagatcatacta

SEQ ID NO: 3385 - DNA, 428 bp, Homo sapiens
tttttttaagaggttatttttatggtagtaattttatttcaaagagcaacgcagggaaatactaagatgaagccttaatacccaacagagttgtgctatgatacatattatttcactaaatcactgatacagtatcacataatatgccaatcactttaaaatcccctcccccccattgccattaatttactataggtcacttaatttgaattggtattaatttagtaacgcaatgtaaacatttaaacttaaatttttttcttgttatctatttcagcctgaaaatgaaatcccaagactttaaacatttatgagcatgaggaggaagcatcacagaagaattgtctcaaaacaacatttttagattagattagagatgcaatattcatagatatataaaatatgtagaaatgtcttttctaaatagt

SEQ ID NO: 3386 - DNA, 426 bp, Homo sapiens
tacatttactaaaagtttatttcaaatctgcctccaagtccatgtgttctgaaaaggacagagggggccttggagtgcagccagatggaaggactttgaaggctgtccaagtgctgctttcagagtgcaccaagtttttattgtccctgactgtggctccctgcctgtttgtcaggcgggagcctggagcctgcacagggacagagctggtttcatccggcactccctagccctggacaccctccttgtctcgcctgccctcctgcaggccttcactctcccctgaggctgtcctggcccggactgtggggagcagctgcagcccttgtgcctgtggccagctggtacaagacgggtccacgcccccttggtccttttgtcctgaatgccttactccatagtctctgggcagagggagccagggcg

SEQ ID NO: 3387 - DNA, 336 bp, Homo sapiens
ttttttttttatgtagagagatatagtatagcttttattttttttttgaaccaacccaacatttccactggcaactgtcaacatagcttatgacatgagcactgtttcttttttaattatttttttcttaaaaaatgtgtttaaaattaacaggtgttttttaatttcttcccccccccccttagaaaatgtatttatgtcgatgcagaaagcctaaagatccgtgggcagtttcgtgatgacatcttatgtctgtttatttgtgtgtttgtgtgcgtgttttaaagccaggtccttcccacattcgttgagaaaaggtctgtagggcacggagat

SEQ ID NO: 3388 - DNA, 583 bp, Homo sapiens
  misc_feature (465)..(465): n is a, c, g, or t
cttttttttttttttttaaaaaaggaagtttattggtctttaaatggctcaaattgcaaataaacaaatcgggtagtggcatcagcctaagacacgtgatgcatctttgtcagttggcttcatagcacctcagtacccaggagaggaaaggtctcaaagcaaagtcacaatgttagtggttaggacccctggttaaataagactgtaataagtacacatggagattgctgggcccgctggccagtgttacattggtaacttgaattccgcacatggcatagcctatgagaaatacgaaatgaaagatgtacatctcaaaccctttaaggacaaatatttaacatgagaagctggatgtaaatatctaaagagtgagttcctaaaaagcctatttttaactttacatacacacctgttacctggaatgcctgaacacatctttgacctgttcaaattaggactganaaaaaagaaaaaaatactttgttgaatcaactgtcctagccccactgcaaagaggaaaaaaaaaaaaaatcggtcagtggcatatttcccactgaaattatgtcccaagtagcatgct

SEQ ID NO: 3389 - DNA, 947 bp, Homo sapiens
gcattttgtttgaaaacacaatcagctctgacagttagacatgcacacagacgccatagctggattggaaacattgatgttttaaaaatttattttttttggaaatagttgcacaaatgctgcaatttagctttaaggttctatagatttttaactagtccaacacagtcagaaacattgttttgaatcctctgtaaaccaaggcattaatcttaataaaccaggatccatttaggtaccacttgatataaaaaggatatccataatgaatattttatactgcatcctttacattagccactaaatacgttattgcttgatgaagacctttcacagaatcctatggattgcagcatttcacttggctacttcatacccatgccttaaagaggggcagtttctcaaaagcagaaacatgccgccagttctcaagttttcctcctaactccatttgaatgtaagggcagctggcccccaatgtggggaggtccgaacattttctgaattcccattttcttgttcgcggctaaatgacagtttctgtcattacttagattccgatctttcccaaaggtgttgatttacaaagaggccagctaatagcagaaatcatgaccctgaaagagagatgaaattcaagctgtgagccaggcaggagctcagtatggcaaaggttcttgagaatcagccatttggtacaaaaaagatttttaaagcttttatgttataccatggagccatagaaaggctatggattgtttaagaactattttaaagtgttccagacccaaaaagggaaaataaaaaaataggaatatttgtacccaacagctagaaggattgcaaggtagatttttgttttaaaatggagagaagtggacagataaggccatttaatatatcaaagatcagttgacatctctagggaatgatgaaacagcagctat

SEQ ID NO: 3390 - DNA, 482 bp, Homo sapiens
ttttttatatatatataatttaacattttttcttttaatcccatccactattacagaacctatgaaattttcttcaacacctctatgtagcatttagaatgtaagctcctgatccaccagaatctgcaagaatggagtcaggagcctcagaaaaggagccacggccacaggcgagcagctcggggacaacgctggctccacagggcagctcctgggccaggcacccgctggcgactacacggagcttgtcttgtggaaacaaacgcgctttcacaaacacagcagtcctgcgacatgaggcgggatgaaactttgaaaggtattttaaagtctagccttgtaacaaaacctcaggacactctgtccccagccttcgtgccccacggggagcttctagaggctgaaggtgacaagtgtgagcctctgctgtgccaccacccaccctgttacatgacagtggcaagctgagctttcacgggatg

SEQ ID NO: 3391 - DNA, 527 bp, Homo sapiens
catggtgtttgcagctgggattacaggtggtgacttccaagagtgactccgtcggaggaaaatgactccccagtcgctgctgcagacgacactgtgcctgctgagtctgctcttcctggtccaaggtgcccacggcaggggccacagggaagactttcgcttctgcagccagcggaaccagacacacaggagcagcctccactacaaacccacaccagacctgcgcatctccatcgagaactccgaagaggccctcacagtccatgcccctttccctgcagcccaccctgcttcccgatccttccctgaccccaggggcctctaccacttctgcctctactggaaccgacatgctgggagattacatcttctctatggcaagcgtgacttcttgctgagtgacaaagcctctagcctcctctgcttccagcaccaggaggagagcctggctcagggccccccgctgttagccacttctgtcacctcctggtggagccctcagaacatcagcctgcccagtgcccgca

SEQ ID NO: 3392 - DNA, 414 bp, Homo sapiens
tttttttttttttttctctttcttcctctctccttacttttttctctttctctccctttaatttgctctattctctattatgggcctcattccttctactgcaaataaggaaaatgaccacctggaaacccaaggcccaccacatcccagcagagccaccccagctgaaagaaacccagcttctccctcaagcatctacacatcaatccaggccagaactccatctgacccttgtgagacatgcttccacacctcggtggaccactgaggctcgggaattcagcataatgatgggcacttctggggtcatgggccttccctgtagctaaggtgacaaaaggacagactggtctggaatgtccatgccagctggcttacatgcccaaccattgatgctggctgcctcgtgccgaa

SEQ ID NO: 3393 - DNA, 352 bp, Homo sapiens
ggggaggtagtgacgaaaaataacaatacaggactctttcgaggccctgtaattggaatgagtccactttaaatcctttaacgaggatccatgggagggcaagtccggtgcaggtggaaggggagcgggctgacgcacgaggcacacaggaaggaggtggagcaggtgtatctgcgctgtgcggcgggtgccgtggagtggatgtacccaacaggtgctctcatcgttaacctgcggcccaacaccttctcgcctgcccggcacctgaccgtgtgcatcaggtccttcacggactcctcgggggccaatattgatggggaaaaaactggagaactgagactgccggtgcagg

SEQ ID NO: 3394 - DNA, 498 bp, Homo sapiens
tcttgctgttgagaagtcagcgttctaactgttgttacttcataggcccagctgtgagatacagtaagttcaagatgtcagaggccaggccgccccccctgctcgggcagcacacaacgcacatcctgaaggaggtcctgagatacgatgacagggccatcggggagctgctcagcgctggagtggtggaccaacatgaaactcactgacaaaggaaaagggctcttcctcataacctcgatccgaatacactggcaaaggcaacactttgcttggacccttctccccagttctgataccactaagaagaagatttagagtaactccagatttcttacatggcatctccagaatggctctggtattaatgaatctagtgccttttaaatgtatcccacgttttgttccctaccatcttttttttcagatgatgatttcattatggatttgtgggatttttaaaaataaagatttaatttttttcctggaaaaaaaaaa

SEQ ID NO: 3395 - DNA, 445 bp, Homo sapiens
  misc_feature (359)..(359): n is a, c, g, or t
  misc_feature (380)..(380): n is a, c, g, or t
  misc_feature (392)..(392): n is a, c, g, or t
  misc_feature (420)..(420): n is a, c, g, or t
  misc_feature (431)..(431): n is a, c, g, or t
gtaaagatggggatctcactctgtttctcaggttggtctcaaacttctgggctcaagtgagcttccaccttggtcttccaaagtgctgggattacaggtggcagccactgtccctgacccaggatcacatcttaattcgcctttgtatacccacacagcacctccacacacacgtggcaggtgatggggtttccagaaagtttgctgaaggagtagaaaatccactgtcattttcacggccaaagcctgacacctacagcttgagaaggaaggaattccttccccaatgcccctcagcatatctcttgtacaggtccaagtgttcctaattaatgctttgtggcttaaacttttttaantccctcagttttttgggttcnttctcttccccngggaacaaagagtcttagtgaatttcancctcgttccgnattcttggggctcg

SEQ ID NO: 3396 - DNA, 271 bp, Homo sapiens
  misc_feature (9)..(9): n is a, c, g, or t
  misc_feature (138)..(138): n is a, c, g, or t
  misc_feature (168)..(168): n is a, c, g, or t
ttttttttntgttaaccattaacatcatgcgtgttattcaagaagaataatattcagaagagttataatcctaagaaagttatcccacccttacagtaaaaaggggggaagtgggtacccacttatgacaatgtacgnataaattccacttttactatttctgaatanaagctgcaattggcttctttgatagagccatttcttaaaacttttgctaataaggctatgtgaactgtgttcagaaactttgacaacatgcacactcactcct

SEQ ID NO: 3397 - DNA, 357 bp, Homo sapiens
  misc_feature (247)..(247): n is a, c, g, or t
  misc_feature (268)..(268): n is a, c, g, or t
  misc_feature (309)..(309): n is a, c, g, or t
  misc_feature (318)..(318): n is a, c, g, or t
  misc_feature (330)..(330): n is a, c, g, or t
  misc_feature (339)..(339): n is a, c, g, or t
tttttttttatagacatctttttaatgttttactttaaaacaaataatcccagtaaaagagagcaaaggaaattacactttaatgatagcttgaaatggatatggtgttcccgatttatttgttttcaggaaacagacaattgcattgtcatacatgacttagaactgcttacttaaatgcacattattagattaggattaagtttctctatatttcctctatctggatttaggtggaaatgatccnttaatttaggttaggccgggnttcatccatccttacagttttggctttgcaaatgggcctgnggattgggncaatttgtgccnggttttccncctctctagttgggctta

SEQ ID NO: 3398 - DNA, 504 bp, Homo sapiens
tacttaaagtaaatgtggctttgttagtttctaaagaatgtacttttcttgttttacttttttaaaaagtcttttcatttcaaaaaaaaagttttgcatttgtctcaagagactcaaataggaagatcagttttcaaggcactcacatcaaattgaatggcagtagaaaaactgtcctataaattattattttattttgttctttatagtgccagtattgtgaatgccacgcttagcaatactgacactcaatctcagctgtcccttacagtttaacccacctctgggccaaagagaagaatatgctgcaatttcttgtttagaagccatttaatttaaatgcaaacaaaagctttaaagtgcgggtcaacagaattcaaatgtctaatcttaacagttcaatatttagtaccttccaacctaatgagataggaaaaaaaaaataaaaacctgggaagtagcgctgggcaccttctgatggaactcatcccctgctttttcagt

SEQ ID NO: 3399 - DNA, 706 bp, Homo sapiens
cggcagattcgaagctagggcggggcccgcgggctgaggcagcggctgtggcggcgacgcgtgggcgtgaggtggctggcggccgcgccctggttgggtccccactgctctcgggggcgccatggacgaggccgtgggcgacctgaagcaggcgcttccctgtgtggccgagtcgccaacggtccacgtggaggtgcatcagcgcggcagcagcactgcaaagaaagaagacataaacctgagtgttagaaagctactcaacagacataatattgtgtttggtgattacacatggactgagtttgatgaaccttttttgaccagaaatgtgcagtctgtgtctattattgacacagaattaaaggttaaagactcacagcccatcgatttgagtgcatgcactgttgcacttcacattttccagctgaatgaagatggccccagcagtgaaaatctggaggaagagacagaaaacataattgcagcaaatcactgggttctacctgcagctgaattccatgggctttgggaacagcttggtatacgatgtggaagtcaaatcccatctcctcgattatgtgatgacaacttttactgttttcagacaaggaacgtcaacagcaacctcatcatctgggaaccgggtggtgctgtccaggtcctctggcctggaaacctcctgggtaaagggttagccggaatgaca

SEQ ID NO: 3400 - DNA, 461 bp, Homo sapiens
ttcggcacgagccttatggccctacaatgccccagacactggcaggtctgtccccaggtgcactgttgcagcagtaccaacagtatcagcagaacctgcaggagtccctgcaaaagcagcaaaagcaacagcaagaacagcagcagaaaccagttcaggcaaagacatccaaagtagaaagtgaccagccgcaaaactccaacgatgcttcagaaacaaaggaagacaaaagtactgctacagaaagcacaaaagaagaaccccagttagaatccaaaagtgcagacttttcagacacttacgttgttccattcgtcaagtatgagtttatatgcagaaagtgccagatgatgtttactgatgaagacgccgcagtaaatcatcaaaagtccttctgttatttcggtcagcctttgattgacccacaagagacagtgcttcgtgtcccagtcagcaaatat

SEQ ID NO: 3401 - DNA, 528 bp, Homo sapiens
ggcacgagggagacggactcttgctatgttgcccaggctggtcttgaactcctggcctcaagcaatcctcctgcctcagcctcccaaagcacggggattacaaaccctgctgagggatgcccaagaagttccagggtgagaacaccaagtcggcagcggcccgggcacggagggcagaggccaaggcggccgctgatgccaagaagcagaaggagctggaggatgcctactggaaggacgacgacaaacacgtcatgaggaaggagcagcgcaaggaggagaaggagaagcggcgcctcgaccagctggaacgtaagaaggagacgcagcgcctactggaggaggaggactccaagctcaagggcggcaaggcgccgcgggtggccacgtccagcaaggtcacccgggcccagatcgaggacacgctgcgccgagaccatcagctcagggaggccccggacacagccgagaaagccaagagccatctggaggtgccgctggaggagaacgtgaaccgccgcgtgctgg

SEQ ID NO: 3402 - DNA, 762 bp, Homo sapiens
ggctggcttctccatgtacggaataacttcctgcagcgaccaacaggctaaagagggggaaggtctggagggatccagcaccggctcctcctccggcaaccacggtgggagcggcggaggaaatggacataaacccgggaactctgagacgtctcctgggatgtttaactttgacactttctggaagaattttaaatccaagctgggtttcatcaactgggatgccataaacaagaaccaggtcccgccccccagcacccgagccctcctctacttcagccgactctgggaggatttcaaacagaacactcctttcctcaactggaaagcaattattgagggtgcggacgcgtcatcactgcagaaacgtgcaggcagagccgatcagaattacaattacaaccagcatgcgtatcccactgcctatggtgggaagtactcagtcaagacccctgcaaaggggggagtctcaccttcttcctcggcttcccgggtgcaacctggcctgctgcagtgggtgaagttttggtaggcaatttcttgcacacaccaccgaggccccgaaaagcactggtcgtcagggagctcctccccttggcccccagcctgtgccagccctggcccggctgccacacctctgtttcctaggctggggacccagcttgtctctccttgtttcttcccactgcactgtggtgcttcagtggcaccagcctcgtcacatacaccagcatctttctgtaacctctccctttggtgact

SEQ ID NO: 3403 - DNA, 429 bp, Homo sapiens
  misc_feature (326)..(326): n is a, c, g, or t
ggccccacagaaagccaagcgctccgtgccgccagcctcgcccgcccgcgcgcccccagcgaccgaaaccccggggcctgagaagcggcgaccgacttgcccgcgcctgagaccccccggaagaagacccccatccagaagccgccgcgcaagaagagccgggacgactggtgcgagctgggcagggcgggcgcacccaccctgtagcaggctgtggctcgtccgcgcgcagtccctcagcttcgcagcgccgcccgccaccccacacctcccacgctaccgggcacggcggcctcctattggccgggcaccgcgcgcgtagcganggttgcgtctcattggctcaggtcctgcagccgctcctggattggagcagtgtgctctggcgggaagggcccatcccgttggtcgaggcctgacaggcgctta

SEQ ID NO: 3404 - DNA, 525 bp, Homo sapiens
ggattgtcaaccgttttaggactctgtgccactttgagagactgttcccaggaggcccaaccgcagacctggcaagtggacagtgcagtgtggagacaccttccggcttacctctttgaacgttgtttacctacccctttccacgtgctccccttcccagccactgactcacagttctctggatgcccagacacctctcttcagggaagatgagtctgactggtttgccccagggaagagcgtatccttaccattattttaagtagcatttgcattttaaaagaggaatgcggagaggacagtacttagtccaaaggtgctaacgggggaactgggggcattgtgacacccaagtctgatgtgtcctgggttggggggccttcctggagtgtcagggtctctgggcaacgtccattcagggtgcggcatggctgtcacaaagctttatttgagcaaattattttttcactttaggagacttctacaagtttgtttcctgtttcaaatgtgtgtgtgatgtgctgt

SEQ ID NO: 3405 - DNA, 682 bp, Homo sapiens
attgaatttaggtgacactatagaagagctatgacgtcgcatgcacgcgtacgtaagcttggatcctctagagcggcccctctactactaaattcgcggccgcgtcgactttttttttttttttttttttgcataaatataagagcacagactctggcgccagaatgcctcatttaaaatccctgctacatcatttattggccatggtatgttgggaaaattacttagcattcagcatctagcttcctcacttgaaaatgggaataaaacagcacctattgcataggtttgtcgcgaggattagatgagttaattacatgaaaggcgcttagagtaagggctgagtaaatattagctatccttattattaaacacagctggggcataggaatacatgtggaggagaagggatgtgaaacagaacagagaagacagcaaaagtaatctgctgtgtaatgatgagaatggagcactttccacaaattatcacagacctcaggaaaacctttcagtgcaggttaacccgtccaagccacatagccagtaaatagccgtgctggacttgaacccaaacagtttgtctccagagatcccatcctgaaccaccaagaaacactgtcttccatgatcacactttcccctttagggaaaggaattcctgggttatgaagggaagccaaag

SEQ ID NO: 3406 - DNA, 541 bp, Homo sapiens
  misc_feature (517)..(517): n is a, c, g, or t
tagcttcaacacagcagaaatttatttcccacccaggtaaggggaccctgaggtaggcagtgacttctgtcggcagcgagctaggcccctctcaccaggctgccctaccgtgctcagtgctgcctcatggtgcaaagtggttgctgagctccagtcatcacttcagccagcagaaggaggaaggagaaggagaaagacgtgaccccaccatctagggcatttgctctccgaccccccagctaggcattgtgtgttttattaataaggaaaagaagagaacagttagcggaggcctcccgctgtccaccaggatgaactttggcaggccggacaggactctgggcttcccagttaatggagtgttgaactgggtggggatctaggggttctttaagtctcactctgtacttctcagaaggggaaactgatacccaagtcagtggctgagctgtggcccaggctcggcctctgcctgctgtcccagaagctctgtcctggcaccagctactggtgaaangcagagcttgcaagccctcgtgcc

SEQ ID NO: 3407 - DNA, 495 bp, Homo sapiens
  misc_feature (483)..(483): n is a, c, g, or t
ttgtagaaatggagtctcactgtgtttcccaagctgatctcaaactcctgggctcaagcaatcctcccacctcagcctgccaaagcgctgggattacaggcatgagctaccacgcctggcctgttaatatattttcagtgattaaacaaatgatgacaaaacataggttaccacgttctctcccatggaatacccatttctgtaaacacccaaaatgttccagtggggttttcctgctttataaagcagtacatattttaaaccccttttactcttaatttcaaagacgtttgggcgttttgcaaagctaggaaaaagtaattttatctctcactgccatacctacagtcaaactattaaataggtaagggccaccttgttaaaataatggggattttcaatctacttttcaactttgagggggtccggcatttacaactattaattacttcttttagggataactcctggtccacttagggnaccccaaattac

SEQ ID NO: 3408 - DNA, 735 bp, Homo sapiens
gattaattagagacaagttttgatataaaaaatgggttctctcaggtcaagaagttacctatattcgtatcacttggtgaccacctacacttcatggccagaaaagcttagtgccatttggtcttgggaagacctgagactggtgctcaaaccagaagtctcagcagggcacagtggctcacacctgtaatctcaacactttgggaggctgaggcaggaggattgcatgagaccaggagttcaagactagtcttggcaacatagtgagaccccaaacctagcaaaaaaaagactgctgggcatggtggtgtgcaactgcagtcccagctactggggaggctgaggcaggaggatcacttgagcccagtaaatgaggttggagtgagctgtgattatgccaccgtaccccagcctgggtgacagagtgagaccctgtccttaaaaaaaggaaaaagaaaaagaaaaaaaaaatacctggatgtctctaggaaagaaaattgtaataatccttctagtcaagaagctttctcctcaaactaacagatctgtagtaaaggaataagtttaatgatatcatcagggaaagtatgaccactacaactaaaaagccctagtatggaaataaccaaatagaacaaagtgaaggagcccagcaggggtctgcagaacacagctgaatagcaagaaaggaaaatatttccttttaactctcttgttggccagataaaaaaaaaa

SEQ ID NO: 3409 - DNA, 360 bp, Homo sapiens
ctttgctgaaaggcacatcctccctgcagagcttgaagaacaatctaaccatgctggcatggggcccatcctacctgcaatgccaaggtaagtctgcgaaagtcacttatattcagagcatgtggattgggactctgaagaacaactttatggtggacaccttcgtctccatctggtgagtccagcacaagcagcctgagggttccatgggctcaacctcaccctccatccttatttccctgccactccagggctcctcctcatccagacttgcctgtgagtgccccttgatggatgtatttgtctgttctcatgctgctaataaagacatattcgagactaggtaatttaaaaaaaaaa

SEQ ID NO: 3410 - DNA, 488 bp, Homo sapiens
gtgaggacagaccagccctcccgagcacctggcactcatgggctgaggctgacttctcctgggggagggttccagagtggaaggaagaggcagagggtagaggtggtggctgggggctcctctgcagagtggggtggccaatggagagggctgcactcacaccgcaacataggactctctctcccttaagaaggcccccttagggtctgggctgccgcccccatcaccctaaaaccagccaaggtagctgaggccccagggcagataatttcaccagcaggaggaggaggagtccagtgagcttggttgctcacagacagcaagggagctgtcacagaggaagctgatgaatggaccgctgtggggagactttaaagtagaacagtgataagggagggcaggatggtggggatgcagaagcagcagccagagagagacggactggggtgcagacggagtgtggaaaacgcatacctcgaaatgaagca

SEQ ID NO: 3411 - DNA, 1247 bp, Homo sapiens
gggatattattcaggcaggactagttaagcaggccacagcgtggcaggatggggggagtcagcacatgggagtgccgtcacctccattagccacaggccagacggcccaggagggcgtgctactgcagtgagatggtgcactactgcagtgaggtggcgcagggctggtgagcttgggcacaaaagccagcatgtcaccctccctttggagaagcctctgggccacaggccttttccagctgacgggatgcggagggaaggggacctagtactatcgggattcagctgacttagcctatgagatggagcaggcaagagattccctttgcagggtgggaggttatattcctacagcctccattcttggagtaggctcctttgccacaccccttttcaccttagcgggccaggcctctcagccagaaaccgtatgtcaagagatcgtaagttaagagtgctgctcctgagcagggagcgggcttggaggcgtccttcccctccccgcacccctaagtccccagtgccgggcagatggtcttttcctagtcctcccctgaggaccaggactctctatctccttccctctgagtgaacttcaggaactgagcctggcccaggtgaacaggagcccctgcccaagaggtcttcagagcactccactcctcctcctgaaaggggctcccctcagggtctccactcagagactagcggcattccttggcccacttcctcagactgctccagacccgttcatcaatcacacgattcacaacatgcctgtgacttacccatccaaggtgcggaacactggacggtaaacaagcaacatgatgtcatgcccttgggcctcattcttcaatacacacagaggatcatcaagagggccagggactagagcaccagattcacaggaacagggggacagaaccgtccgcggagccagaagggtcagacaggacatggggcacacgagccaggggcagacatggggggcacaccgcaatgaaccgccaagcgaggtcccagcgaacgcgaaacacaccgaagacacagcaggaaccgcccacgaggagacaaccaaccagaacggctaacagcacacagcggcggagagggacggagagcaggcagacagaagggcacggcagaagccacagaggagaagaaacacagagaaagaagagacaggcaggacgaacaagcgaagcgaacaagataccagagccacgagccgacacagcagtcat

SEQ ID NO: 3412 - DNA, 453 bp, Homo sapiens
  misc_feature (368)..(368): n is a, c, g, or t
  misc_feature (423)..(423): n is a, c, g, or t
  misc_feature (434)..(434): n is a, c, g, or t
  misc_feature (448)..(448): n is a, c, g, or t
ctgcatgtaagtggcaaagatgactgtctgaaaatatatacctacttttttaaagggctatctcaagccattctggagaagcaccaaaagccactttgcttatactgggagaatagtttgctttccctaatttgtgatgagtgaaacactgaacagagacatagaataatattctgtagttcaggggttggtgtaatatggccagtgggcggaatctggtcctcagactgattttgcaaataatcttatagaaacacagcaacacccattcattacatgttgtttatggttgctttggggttacaatggcagagttgagtagttgtgacagagatcactaaggctcaccacatcttgagatatggacngactgaccctgtacagaaagttttggctgctcctaagagggaatgtgtggtttcnaagtggtcagncaataaaaccttcnttggg

SEQ ID NO: 3413 - DNA, 525 bp, Homo sapiens
gcacgagaaagaaaaagaaaacgtgtgcattttgtataatggccagaactttgtcgtgtgacagtattagcactgcctcagttaaaggtttaatttttgtttaaacctagacgtgcaacaaaagttttaccacagtctgcacttgcagaagaaagaaaaaaattcaaaccacatgtttattttttttttgcctacctcattgttcttaatgcattgagaggtgatttagtttatatgtttttggaagaaaccattaatgtttaatttaatcttaataccaaaacgaccagattgaagtttgacttttattgtcacaaatcagcaggcacaagaactgtccatgaagatgggaaatagccttaaggctgatgcagtttacttacaagtttagaaaccagaatgctttgtttttaccagattcaccattagaggttgatggggcaactgcagcccatgacacaagatctcattgttctcgatgtagaggggttggtagcagacaggtggttacattagaatagtcac

SEQ ID NO: 3414 - DNA, 692 bp, Homo sapiens
ttttacaatttaacaaataattatataaatacatcctctaatgtaagaaacccgtatttacgtggggtgtataattaagacatttcttgtttgtttacttaaggcatttgcctggtcattaagaatacccaaaccgtgcaatcccatcaggtggcggtcacccctcctccagggtaagtcaggggtgggagtttacgtaggaagagtcgagggagaaaaagaggttctcccaggtgaaatctgtgtatctgactgcaaacccagccaagtgcagccagggagggctccaaatctcgggttctggaaacgccgcagagtccaccctcctcagccaacagaaattaacgcgtggcgggaggagctccccgcacatcaatggaggaaaaggggctgggtctgggaggcttcaatgccaggtactttgttctaagtgagtcatttaagtcccagctaatggataccattaagagttcattatcatgctaatagcaatcaacactgtgaaggggtgggaacctcagcccatcaagtgtcccttcgcttgcacttgggtttcttctcgcccctccccaccccttcctgggcgccccctcccctccgctcaaacctgggacaatggcatctggctttggataagacacggagctcgccgtgcccgaccgccacgtcaggccagtggctgacgtcctgta

SEQ ID NO: 3415 - DNA, 488 bp, Homo sapiens
  misc_feature (155)..(155): n is a, c, g, or t
  misc_feature (178)..(178): n is a, c, g, or t
  misc_feature (387)..(387): n is a, c, g, or t
cggcagagcgcgctggtgctgatgcaggatggctgagcgcgcaggagcccgggaggtctgagccgggcgaggctcgctccctgcgcatcgcctcctccgcccgccgcgtggtcgcgggcaggtgggccggggggcgctgggcaggggcggggcanggccagggcaggccggtctgcanccggaggggccggagcggaaaaccctgccaccttcccgggctcggagcgggcggggctgctcagccggccgggctcgcgatgacctgctgagaagcgtcgtcggaggctgcaggaggcggcctagctgtgggcggtgcagctcgcggcctcctccctcgtcgttcccggcccctggcccccacccatccccgtgcgggctgcctaccgncggccgagatggcggatgcagcccgatgcatgatcaaagtgatgtgccggttcctgcccctcaacgaagcggagatcctccgggggacaaattcattctta

SEQ ID NO: 3416 - DNA, 371 bp, Homo sapiens
  misc_feature (294)..(294): n is a, c, g, or t
  misc_feature (355)..(355): n is a, c, g, or t
  misc_feature (368)..(368): n is a, c, g, or t
gaaagccctggcagatacaaagttcctcagtatttaaggagaaggatctcttccatgtccccttgacatgactgtggctattgccaaacctcagcttgagaacatcatataatactgagagcggaagatttttttaaagagatatggtagtttaaataggtttgtttaaagaactcttgggaaatttcttaacaaattgtaattgtttttataaaccttcctacagagttgtgtaccattcatcatcaccatcatttaatatctgtaagtgcccaggaaggtacaaggtgctantacagccgtttaaacaccccctccctggcaactgttttaaaaatttggaattaggtttttngccatccaaccantgc

SEQ ID NO: 3417 - DNA, 433 bp, Homo sapiens
  misc_feature (15)..(16): n is a, c, g, or t
  misc_feature (104)..(104): n is a, c, g, or t
  misc_feature (107)..(107): n is a, c, g, or t
  misc_feature (151)..(151): n is a, c, g, or t
taattagatactttnngggtttttttttgtttttgttttttttggttgggggtgtcttaagcccctcaaatcctggagagggtcacacgtctcccctcagggtnctnttcttcttcctctggggtagtggtggttggtgcaggcatgctgngtggtccaggccatctctgccagtctcttcacagcctcacccagctgccccagaccccgggcagcttctaccagctgcgtcagcccagcagcagggcttggcgctcctgccgctcctgttccacgacctgggtcagtctctgcagctgaccacccacatccctcacagcagccaccagctccaccagggcaggtggctcacaagccatggacccttacaggtggtgttggggccacacatggaccatgggggcctgggctctgacccctcgtgccgaattct

SEQ ID NO: 3418 - DNA, 328 bp, Homo sapiens
tttttttttttttttttcatttcctgggtactgggttgctcagcactggcctctcaagttgctaactttttgaaatcctgaggtatagaattctttgttctattcctggtctagctggtataactcagcccatgcaaactgtcctggcccttcagtcttttcatgctccataactttcacaagatgctgtacacctgctacagacattggtctctaaggagttattctctagtgaatctctttctcccactcaactccatgtggggatatctgacccttctatcagtacaacgataagactcagattgggtcttttgtcctcgtgccg

SEQ ID NO: 3419 - DNA, 452 bp, Homo sapiens
  misc_feature (3)..(3): n is a, c, g, or t
  misc_feature (378)..(378): n is a, c, g, or t
  misc_feature (381)..(381): n is a, c, g, or t
  misc_feature (435)..(435): n is a, c, g, or t
gangaaatcagacgcaccggcctttattattatatatgctacatctgttgagtatttttaaaataccaataagaggacttgtttatttcataaaccacttcttccctctctttcaaagaaaatacattattaccatacttttacattagtctgagaatttttgctaaatatgattaagtattccaaaatataatggcgtcattattcttgacttttttagagaatatacatcttaagactgtattagttctcagagcaaggcatcatctactcccctgcacctgagagtctggccccagattccagatgtgcggacagcccatgaccgaggtgcacacagtgcctcttgaataggaaggtcagccagtgaggcggcanatnaacttgcaggatggacttatatcttaccatctcttcctgctaccaaaataaaanaataaattgaaagacaa

SEQ ID NO: 3420 - DNA, 501 bp, Homo sapiens
cctaaccaatatctgccccttggatcttgttctcttcccaaagaactatctatgtgtcaacaagtcatttaaaagacaccaggacacagttaattcagttgcttcctccagtcttactttctctgcctgtctggcccttcttctgtaagctcattgtgaaaggagcatctttacaggccagcatgtcaggtagactatcctgaaaattttataacattttcgggaagcagcttatgtaattaatttacttgtgggtggatattaatgccaactccagaactaagatttgcatacgtgtctgagcctgtatccagagaaatgtatctcagcagcagggataaaggtcattttaaccattatcaaattagatgctcatcctccaatttagcattgctctatcgggaggttggacagcacacagtcactctcaatatgcattattcaagtcctttgtggcttttcttgtctcctcttcctgccttcctttggttaaaaaaaaaa

SEQ ID NO: 3421 - DNA, 407 bp, Homo sapiens
gcggccgcctactactactaaattcgcggccgcgtcgacctccagagcaccagcactggcactggcactggcacacgctatggcaaatgaagtgcaagacctgctctcccctcggaaagggggacatcctcctgcagtaaaagctggaggaatgagaatttccaaaaaacaagaaattggcaccttggaaagacataccaaaaaaacaggatttgagaaaacaagtgccattgcaaatgttgccaaaatacagacactggatgccctgaatgacgcactggagaagctcaactataaatttccagcaacagtgcacatggcgcatcaaaaacccacacctgctctggaaaaggttgttccactgaaaaggatctacattattcagcagcctcgaaaatgttaagcct

SEQ ID NO: 3422 - DNA, 485 bp, Homo sapiens
cacgaggggtggccagccttgtgttcgtacacatatgtcaccacgagtagtgaatcgcatgagccgtttccagaaaagtgctggactggaagagattgaacaagaactgacgtctaagcaaggaggtcgctgtagccctgttccaggtctatcaagcagcccttctgggtcacccttgcatgggaaactgaacagccaagactcctataacaattttaccaacaacaaccctggcaaccctcggctctctcctcttcccagcttgatggtagtgatgcctcttgcacaaatcaagcagccaatgacattggggaccatcaccaaacgaaccggcaaagttaaacctcctccacaaatttcacccagcaaatcgatgggcggagaattttgtgtggctgctatcttcggaacatccaggtcatggtttgcaaataatgcaagtctgaaaagagaaaaagattagtccaaacaagttgtagttgagt

SEQ ID NO: 3423 - DNA, 243 bp, Homo sapiens
  misc_feature (232)..(232): n is a, c, g, or t
aaaacatttaacctagcctttcactaggtttcgagtaatacaaaatagagtagtataatatgatctatgctaaattcatcatttttaaagtagcctaagactattagctgttttgttggcagcctatacactgttaagttatgaagtgcactgttaagtacttagtatgaaccgttgatgtcaaggtcttgggctacttttaattccatggccttggccctccgctcctacntttaccaggaa

SEQ ID NO: 3424 - DNA, 480 bp, Homo sapiens
  misc_feature (400)..(400): n is a, c, g, or t
  misc_feature (428)..(428): n is a, c, g, or t
  misc_feature (440)..(440): n is a, c, g, or t
  misc_feature (462)..(462): n is a, c, g, or t
ttaatagacatgagatatagaaatactttgttagccctgctatagattgcctattgtagtctttctgtgcatttcaatagtctgtattaggaaattataacttcagcacttttgatagcaaaaattggcatctttcaattctgtatagtatgtgactatcctgtaaatgataatatgtgtacagactgagaaggcaggaatataaagtaattgaaatctctcattgccggtatactctaaaacatgcttgatgccttgtcagcatcattgcacacattgactctgtatttacatctgtatatacactatggattaggaaaatatggcaaggaaattgtttttccctgttaagggaccaaatgcccttaggaggtgtcccccttaattgtattgtcagagnattactttggtccagggtggactggtcnggttaaccccantttgtggttttcacagggggangtggatgggggtcccctt

SEQ ID NO: 3425 - DNA, 300 bp, Homo sapiens
tttttttttttttttttttttttctccaaatttcaaaaagttttattttgaaagaatgagagaaataaaacagagaggtatcaattaccaaaaacaattaccctgaaaaaaacacaataataagtacttttcccacacaaccccccccatttccccatccctggcacaataatattaaaaccaccaaagcacacctaacagggaaaaacaacagtccgtaatgaaaaaagcaaatgtccatactgttcagtccaactaacccttatgaaatgtccttcccccagctaaaccctacccact

SEQ ID NO: 3426 - DNA, 195917 bp, Homo sapiens
aagctttttagattccctgtactatgagtctagtggttctttcaactcttactcttgaaatgtactgaagcatttacccagcatacaagatgatgcttttttatttcagcattcagtaactgcagactattttctccctgtttgcactgtagttttgtacactgtgtagttttgcatttaagatgacaaaacagtaaaatatattcaaactgtcttagccaaaatagggctaagttctgaatgcatattaaattggaacttgaggaatagaattgtgttatttctgtaactttgaactctgagggagaaaatattccttcctgctagtgcatctcgaagcattttgcatcctaaaggaagtgtggacttcattggttgtgttgtgacatatattagagcccagactgtagctaagtcgactctctgagcaacagacactctggaggatccagagacagtaatgaatgaagccatttggacagatctgtgcccttcgattttcctgcattcaacaaagcagatggtattcccattccctatggaaaacatcaagagaaatcctgaaaaatccctaatgtacctgatttacttggaaattataagtcttgcttgcacagagctatttgaaaggcttccatggagaaattaaaaatttctaaaatgttaatgtgtggtcttaaggaatctacatgaatgaaatgatctggcaatgtttccgttttcaaaggaatcaggcttgaaatgtaaaatttgtgttcagtcataagaaccttccagaagcaaaccccagaagtcaacctgagaaatacttttgtgaagatcaaacaatgtccagggatgaatcatccacagcatttcctaccaaagttgagaagccagaccttcagcaccaaggtggtctccatgctagacaagaatatttctctcacttttaaaagtataacgtttcatttcaaataaatcaagaggctggacaagatacttgcaaagagaagctatgaatgcttccatgaaattccctatcaatcaaatagtctatcgtttggtacaaaaattgatttttttttttctggaaacagtatacatagtacttagactgtgctggggcagagggtttggactgttccacaattttaaaaacttcaaatgaactttaaaaactgaactttactagagatgttgctgaatacaaatattcattaaatttcaacaatgtgtgtttttttttttttgagacaggaatctcactgtattgcacaggttggtctcaaactcttggcctcacgagatctacccctcagcttcccatgtagctgggattacaggcatgcaccgcctgcctgtaatcccaggcaatccccaacaatgtgatttttaaattgagcagttgtttctacctaagggtaaacttctcaacccaaaaatggatgtacttaccatacatcacatctgtctgtccttttgctggaaatacagtaagagtgtttttgacccaagactgctgaatacatttttgaaaggttaacaaagcatcttttctagatataaaagattaaagcagtgtgagggtaattattatattggccttgcaatctccagatataattatcacacagaatatttaaaatcttattttgatacattgtcagcagcagaaattgaaaacacacttaattagaaaatttgaacacatacaaaaagttgaatttctaaaatgagataaaataagtcagttttaatttttcttttttgctcaagctgatctgaaaataaaaagaagaaatgaaagaaatactagcacatcaccccaagaagcttccttcccatttttgaaagcagaagctccccaccaattgcaactgatgaggcaaaagatgtgaataggaagagggaatttaattccacttgattgtattcaactcaacaatagacactctttaggtattggaatgcacgtgttggaaatatcatcaaaaagagctaacattaaggatttggcatttcttgggggaaattttagaaattagcggattgtcaagggaaaagctaagttcagcaaccaatgagccaaaaactgaactggccaatggtgaggggaagagagacagcacaggctctttgataagttgtgcggggcgacagtccaggagtcagcaaggtgatcctgctgtgagtttttccacacccatttatctgtgcatctgacattgtgtttcattctcaaacgtggtgctgtgtgcatgaaagacacagggaaagaagggagggaggaaaggaagatgacgatttaagatgcttccagaagttgagaaaaacctttgcttccacataattggggattgatgtgaaacagtgaagaggttctaactgttagcatgatatggagaagccagcaaaatacacctccagaacactaatgttcaataaaatactcacgtgcctcactcctcccacctgagacctggccccagtacagcctcaaaaatcacatttctccttaatatgcaatgtccacactaaagttactgatgtggccttatcagtggcaccattttcgtgtcacatttgctgcttgattagccagctgatgaaccagaaaatttatcatattcttatattagattcatttctcaccatccattttttttgtccacaatgtcacttattctataataaattctgcatgacaattagtattatagttttgtccagaatttgacttccttcacatttgtaaagcactttatttgtaagactcatgaggaaaattgtcatagtctgaataaaaacaaaaccaaatgcatgcattataaccatttgcttacaattaggttattttgaaattaaaaaaaataaaatttcagactttccctccttttctttcttcttttctacttgctaccacagggttagtagcagatgtgtcatctagagtcaccaacagctgcactgaattgacaggggccttggggggagaccttgggtaaatccattgcaatctctaccatacctggctcactggtaaaatgggcccaaacctcatccactgcatgggaattaactctaaccggtagcctcagtgaaagtacagcaaacggagcttggcacaaagcaggcccttgataaacttctcatagattttcttaaacaagccacttacagaaggaatgatttccctgatcccgggcaatgctggcctggacagagtgccgatacactggcagcctcatatatatttaataaatacccaccaacgagtgataacaaagcaaaagcaaccaccaaaatgtgcccagaaaggacttagtattgtgtctgaaagtggcccctgcaagggtgatgaacagtaatgactgccgtcactcagatgactttgtcctgtttggagcatctttctactctagtatttcattgcaattgatgggcttccttgtcgtgctccaagcattcagggtaaacacagctcgtgggacacttcaagtcttggggctgagaaatgtgtgtttccacttgcctgcagggcctgcgagagagacagcttgacacaggaatcctttggcttctcactgcccctgctgacccagccctgataaataagccagctaattgaattaataaacaactcttttttttttaacagccagctggagtgcaatcaaaatgtgtgataaattatctgtcactgctttaaccacagcagggggaaagtggaaaaattagccactctaaccctttctcggggctccctccctcctgctcattttgcttagctataggatttttttttccccctcctggtcttctcactctggctgaggtccaacatagagttgaagtgagtggagaaacgtatctggctgccctgatgatggatccttaagccccagcacggcagtgggatgcagaaatttcgcgccagtgtgtgggaaagcaagatttgtctgctaccctggcaggaaaggttcggatatgagcctgtggtttaagcccacaggattcttgttaagggatgggggtgtgatgtggttgatgagcgaaacgaagggttatgatgtctgctttctctcgctcagcctctaatgccaaacagcttttgggcctttctggaatgagtgcaaaggcctcaccagagttgtggggaatcgaagcggctgcttgatgcactgtttgcttttcaccctgttttgcaccttagcaaccttcttcaatttctctctccaccctcttttctgtgtatcctagggcctcatttcaagtcacgattgttaaaggtattgatttttacaagccattcttcagcattgttcgtcagaatcatgcaacctattaatagtcctgtacaatttaaggaggcttttctttattcatttttctgatgatctccagtgcagtttctccaagttggaaaaataaacagtcaccatcaggctaaattcatgtgtagacatcattaggcttttctgtgtcaactcactctgtggtgtggagacctcccagggttcaccggggttgggaagcatctgggtcgtatgtcccagtttaacaccataattctctcagaggtgcttgcgttataggatgtcgccttgtgtaataatatacaaatcatctgcatggaacggcccagaactggcaagagatgtaggttgcgtgaatgcagggttctcgatttgtttgattcatgggcttctaaacacacttcgaaggagctcttctccagagcataggctcttcactgcctgtatggagcagaacttttcatccactgccctgaaatgggataaagcgatggttgttctttttgttttttccaggaaaacagagctctgggaaaacgtcatgtcattgctaaagtcagaccttgaccactatcaggcaaaacttgagaccacactccttgttaatgtttgattatattcttatactagaatgtttactgcagggttttgtgctttcattggcattttcagtcctggctgtgctaggcccctctgcagatccagggcttcttaatggggtgggagtgggtcagtggagagaggaattaaagtaattctgaaccaacaatgtgaagtattgtgcttgtgaagctccaggacattcacacctctgtggaactgtaaatgcctgccctgaagaatgcacttgaactccacgggatagaatccaaaaattccaataaggatcctgtttaaagggtcatatggaaacctctgagcagacttctacattatatctagaacgtggtcacgtgtcatcgtgcctccttcctccccttacccccatgcagcagatccaatggcatcaggggaacagatgatgatagtttcaagaaaactagtgatagtgtcagaggctgaaagaagatacagccaacttgtactcagtttcatggctgcccattttacaggcctttctccccaccttttcaaagaaaatgagtagcataaaacagaaaattaaaacttaaagttggctttgatgtgccctggatgatctaagtagagaaaagaagggaagttacctagatactttatttatttatttagagatggagtctcgctctgttacccaggctggagcgcagtgacacaatctcgggttactgcaacctccgccccctaggttcaagcaattctcctgcctcagcctcccaagtagctcagattacagtcatgcaccaccacacctggctgattttttggtatttttagtaaagatggattttgccatgttggccaggctggtctcaaactcctgacctcaggtgattcacccacctcagcctctcaaagtgctgggattacaggtgtgagccactgcgccaggcctatggcctacctaggtactttaatttgaatatttccaggcccctctcttgaaattctttatagataaaagatagggtggggatgggaggcaagtcctcctcccgactcttattgactaagaaaatgttgagtctgtcttctaaaaaggtttatgtgagtgttattggaatctctggattttggttgattgtttgaaaattgaagtattaaagccactacctaactcagggcccactatcattgttttcctgtgaacaagtggagtctgcgcctcttctcccaccccaccagccaaagtccatgtgcaaatctactgagtcactgacaagagaatgtcagggctaaagctttttatgtaattgcttttggagaacttcgtagggttggaattatttgacagataacagaatatagtgtaaaaaccatgttaggaagccagcagaagaaagctgagagaagttccccagctgccattggccagggagaatttagcgacggcctggataacactcctgaggtctagggtccgcccatacctgctgtgcaaatgagaaggttggcagatcctacctggacagcacctgtccccagctgagaagagacatctgcctgtgggtttaactaactctgcccctccccatgtggcccagtggctgacactgtctctgtggctcctgaaaagaagtggcccagcctcaaaacacattgactcaatgccacagaaattacatagcacatgggctgttagcactttcatacttcctccttgtttcttatttagtattctagatgcagctgagtgccagactagtccctagggcagcagagaaagcctggactggcagtcaggaggcatgggttctaatataccttcaactttaaacttgtcatgtgtcacagtggcttttaatctcactggctctcagttttctaatctgtgaaatgaagtattcttgggccaggtgggctccacatctctttcagttattagatcctatggttatagaaaactagattctcttttgtcgttgttttttgagacaaggttttgctctgttgccgaggctaaagcgcaggctgcactgcagcctcgacctccctggatcaagccatcctcccacgtcagcttcctgagtagcttggactacaggcatgtaccaccacacctggctaatgtctgtattttttatagagacagggtttgccttgttgcctcggctggtctcaaactcctaggctcaagcaatcttcgcaccttggccttccaaagtgctgggattacaggcatgaaccaccacgcctagcctgaaaactagattcttaactctgctatcatcattgccattcttgaaccacagagtgctttaatgagcttcattaagtacagagaggatatgtcacaaagacattttgttatttagctgaattttgataccagtcaattttaataccacatgatagtggtcctgtggtgtctccttcaaagtaataaaataagtaacattgataaatgtcatttagtcatggtttagttaacctggctgtcaggttaaggcaaggtttctcagctgtggcattattgacattctgggctggataattatttgctgtggggcgagggggctggtagtctgtccggtacattgtagaatgttgtttagcagtgtccctacccactagatgccagtatcacagcaccctcctcctcccccaagttgtgacaatcaaaagtgtctccagatgttgccaaatgtcacccaaagggaaaaactgccctcagttgagaacaactaggttaagccatgaccaggttaggccagggttaactacatagatttgatttgttaccaactgaaaacactagttagccccagagcaatagcaccatctatttaattcaagttagaacaatctaacctcattctaaaatctcaacagaaacaatccctttaatctatcatgttacagtgcatcgcaggcaatggaatctactgcattttgagtcttttggaaataggcagtatcatctttgtcttggtattcttaccgtgcacaaagtaaacgcttagcaaattattgaaagaataaacaacttgctccaaaacaccagagaagtgcagaatgaggagctgccatgctcaggcagtcattctgcatgattcttattctacaggaggaaatgaagcaagtgtttgccagttggaagggtagaaggaatctttgggagggaggctgccattaccctagctgaagtgaagccaggttaaaaccctcttctggtttaaaaaaaaaaaaaaagccatggaacatttaatgacgagcctcagtacatcacagcccacgctgtacatcacccaggctccctagagggaaataagagtaaaagattcagttgctttacgtcttctgtattcctacattgacgtatattttggtggcatgggactgtggaatctcagatgtgcatctgccatgttaatctccctaacatgggagtcctactggtttttctgatgtgcctgaagagtaagactttaagttgcatttgaaatgtttcactcagttgtcctgacaagataattttctcagaatacacagaaaccacctgtatttgtcactatagatgctagtactgcattgagtttgttttcatgcttgttgttttataggtattatatgaatcactgaatgcaagcattaggtctgattcatgaggttcgtggatttcatctgatattattttgtaatcattaagttccgaaatgaacaaagttgatttactgtgagagtgttcgcctcttagctgggtatttgtcatttaggaggaaatccaccagactagtgctgcaccgtatctttcagtcccctctccccatcctcactggggatgtcttagtttcaaaataggtctccccaagaggtccatttattgagtttgaatggcaagtgctttggaaacaccctgccttatcagcactctataaaatgttctcggttatagcatccttttgataatatagttaattaacaactgatgttacagagattttaattgtgagatcaaaattaagcaaagagcaatggaatagaaagagcacatttgtagggcttaccatctctgcacatgaaaccaaggctcaaaattaggattcaaagagaagtgtaactgttatttcagaaggtggattcatacagcaatgagtatcagtttcatcagcatgggtcatgaatacacattcctagagtcccagatttctatctagtgatacatactctatccttaaattaaaaaaaacaaaaatagatcaaaattttaaaacctggggtgagagaagaaagagacttaagagaatgagaatatgcctctgtttccatttactttccctctgtctgtgtctgtccaatcttccaccccaagaacaccaaggaaatcaatgttgtagacccagattgaatttaagatttttgaatggaaggaatgaaagcacttaggtgcattttctcttgttggaaactgattttaaaactttttattacttacgtttagggaaacatttggggttggttgcagaagggtataatatttatttatttctttgtttacaaattgaattttagtgcatatccctccttcttccaggaaggattttaagcttctaaataatacaaatcaattcagttcatttaaaaaatagtcctactcatagcaaatgttatccaaccataataaattgaatatttggctattgacagttgccctccttggcaaagcatgcaatatgtggtgtctcaccaaggaagctcagtgatgatctacttcccgtagtgaatgggctttggaacgaaatcaaaggatacattttagcagaagaaagaaagaaagagagagagagagagagagagagagagagagatagagagagagagaaagaaagaaagaaagagaaggaaaaagaaagaaaaataaagaaagaaagggaaaaactagcaggcactgaatcagtaccaagaaaaacaatccctcctctactttgaaaaagattcacattcagatgggcttggtcccatcagttagtcagaccagaaccaagtggtgagctcacttatcgtggacatgctgaaggaaacgtttcaatcgaaacccagagtagcaacatctgcctagcagaagcagtcactaaatgcagaaggcccttcccctggtaagttgagcttcacctttgtgagctctccagacacaaatatgctccttaagcatgatgctgttcgtattaagtcaggctggttggaatatgtcacagaaatgggagaactacccactgctagacctgccatcaccatttccacttggcttagtggttgacacatttggttaaccattttgttagcctctggttaaccacttatggtttgaaaaccttacagaagtgggaaaatttccatacacaatcttatgcatatgaaaacaaccgtataggatacaattccttccttatctaccacatcaaatccacaccaaatcttgctggcatatggtgaaaagaagaacccacttgataatacccctttggtgattaatttatctggaaactagggtggagtggacaattctccaaaaaaaggaattgagcttcttttgagtttggaatactttgactcaatcttgtattcacttctcttttggaatgattctgccttatcattatacatttataaataccagtgcccttggatcatgtacgttttctaccttcagctagagctgacttgctttctttcttgctactctcgcgcatcttccttctttctctctgtccttgtttctcaccttccttcttgccttccccatcttgctctttatcatctaccatctttcttttaaccaagaggctctccagctaagtaggtcacacccacaaagaaaagcaggaggttcaaattccttccctttactgactcctaagagatcacttaacatttcttcacaggaattttctatatctccaaaaggtagggaataatttttgtcgcctatttcatagcttaatatctgcaaggtactgatttagggcaagctactatatattattgtcagtccctggtgagcagttgcttaaaagaaatttggagtcagaaaagaaattgcttgagctggaaaagaagacagatcatgaaaatgatatcttaagcttgtaagaagataaatttttagagatgccattttcaattaataaatcaaccagaaagctttctatttggcatttttagaatggtactcagttgtgacaatgtgatttaaggagatggttccacactttcctcccaccacccccattacttgtgttgtaggcagtaaaaaagtagatttagatctctggttcattgaattgtacaccataaagacaatagaaatggagacgtaaaaagatagcttagcaagggccagtgattctaccgtcaaaaatgtgccaaataggatgggtgtggtggctcatgcctgtaatcccagcaccttggaaggctaaggcaggctgatcacttgaggccaggggttcgagaccagcctggtcaacatgatgaaatttcatctttactaaaaatacaaaaattagttggcatggttacaatcgcctgtaatcccagctacttgggaggctgaggcatgagacttgcttgaaactgggaggtggaggttgcagtgaggcaagatcacaccaccgcattccagcctggatgatagagcaagactctgtctcaaaaaaaaattgccaaataataagtgtcatatcacatggaaaaaaaaaaagcaaaactagagaaaactctgaaactagaagaaagtatagaaatgctcaatattttctaatacctgattattactgaaattttaacaatgtagttgagaaccagtatgatttggatgcgtatcagctcagaagaaagttgctcctcattttttggttggaaatgctgtgcactgtcatcttcttgggcataattcaaaagctcttcttaagcgtaactttctagacacacacacggccagattcttaatagattatgaatgactcttctttaaatgcctcgaatgtagacatgcaggggaaagaagaaaagattccgtattttttattctggcttccttgagcacagctttcttctccttggtgtggcttacctgaaatactgaagatcatgctgttatcagtgatgactggccttcatcctgtggccctcagagacttctacaggtctggctcagggagaccaggcagtggacaaatggcatcatggattctcagtgtgctcagagcccaggggctatttacaaatgtgctgtttgggtggtcaggtgactgctgggttgagtgccatatgacccagaccattcacaggcagacctcctctttagcaggatggtagaactgtcacagcaagttgatttggctattggtccgatgactttggaccactaatagcaagccaaaggaagtaaggcaggtgcttaagaatcagagagtattgcaatccctctctctctctcacttcccctaatccccaccaactcctcctccctctgaccactcctctcatatcggtggtgagtactgggagcccccacactttgaggtctcaggcaggggtgagattcagaggcaacagatggcaaggaggacccaaatacaccatcactattttcccaaggagaaaaagcaggactggacacccacagagcacattagacagcctcagatatggataccaagggacaagacaatctaaacttccatacagtcaacttaccctatcattagaaaaaccaggagacttcttactagaaaaagtttgaggccctgttggccagaacaccgaatgtctacgacagaggcccaatggtacacatcttgctatttcccaacaactggagggaagccagatgacagctgtctcgaggggtagacatgtgttgggagaaggttccatctccagtcccctgagggctttttagtcaaacttccagattccaaagtttaagcatcagttattgagatgccctctgggaatggagcaaaggacagtgtccatcaagcgagccgagcacagccgccctcccaagggcttgggggaggatctgctagagagctgggtgatgtggcagcgactggctgtcccgcccaagcagcacactgccaaatcctgcacctcctgcagcacacactgcaaaaggactgttgtcatgatggtcaccaagcacatacccaaggactactgtgcgttgaaaaggtgccatttgtgtagctagagttgctctctgtccagcttgcttgggatttggggatgtgtagcattgaagagaaatcactattcattgcacccctttttgccaaataattaggtcactcactcaggaaaggccctgtgatacatatgtggagtaaagtttgctgtgggaacttgaactctgaatttcctgacttctgtgcaattaaaatcccaaagttaatgctgcattagcatggattttccatggtgggttataaatgcaaagttctatgtttcatatgtatttttctaacatatgttactgcctgtgtttctgattaaaagttcatccaaaataaaataacaagggattacttttttccaatagaactttcttcttcgataaaagctggaaataagcccttacctaaagttacccaggtttgcaggtgctgagactttagaggtgagtagtgtttgttagcaagacaaagggcattattctccctgcaatcaccaacagaaagcgttctttctataaagaaaattataggccactgcttcaaagacattacatagttaggcactactactggagactttcaggcagcaggcaggctggcaatcaacaaatatttattctacttccattgtgcatttagtgactttaaaattcccagggaaactagcatataatattttctagggccaaattagtacctgaggtcatgacataatgcttaaggagctcggcagccggaaaggaacagcggatctctaatatctcacctgagtatggggacattgatggaataagaaaatcagacccccaaaaaggctttttaaaactgaacttgtcagggcatttcttccctttcgaactcctttaagagacacccagccttcattccctacatgtgcatacctgcacacacacacacacacactctgtcaccaccaccactgtctctgcccagaagttgaacccaactaaatggatcaattcatcagattttgttaaaaaactaatgaacactttttagaaatcatcaaacgtgccaagatgtatatatagggatgttcgtcccagtgttacagaggaaaaatagaaatagcatgcctgcccatcaattcagaattgggatactcccctagagaaaaatccaacactattagatatgatgtttagatctttggtgggggcaggcaggtgagggacctggacttgtatggctcacatcatggccctgcggagaacaggactctcactctcttgagttctctaatttagttttattgatacagctgaaaaatcacatcagctgttttgatgtgtgcattgcataatgatgctttgcgaagtcaaaatccccacacccttctgttacatatatgttagccccaagctatatctcctctaagctgctttggatagtagatgctttttgttttgtttttgttaaaccaagcataagatgttattctgattcctgctcaatttctcattagacaagatctttacggatactgattcttcatctggtgcgttaaacactctcgactagctttgtattatacacagttgatggctgtgacttctgcattttctctttggttctaagccagctggtagataatagaattgtaagaaaaggagggtaccagtatctggcagaggagccaaattctctgagaaaaatactaaaaccctggcattgactttggtcattgtagggcaaatatctttttggtcttcgttgtttcataatacagtgtttcgcataaggtggcatcataatgaatattagtaagtctcagatgaagtcaagagttctctatcagcccgctgtcagaagaaaagacattcttcttttgctttcttttttaaaatattgtttaaattgaggtagaatccacataaaataaaattaactgtttttctttctttttttttttttttgagacagtatcttgctctgttgcccaggctggagtgcagtggcatgatctcggctcactgcaacctccaccgcccggaattcaagcaattctcctgcctcagcctcccaagtagctgggattatgggcgcttgccaccacattccgctaatttttatatttttagtagagatggggtttcactatgttgacccgctagtctcaacctcctgacctcaagtgatctgcctgcctttacctcccaaagtgctgggattacaggtgtgaggcactgcactcagcccaaattaaccattttaaggtgtgcattttagtgccatttagtacattcgacgtgttgtgcaactatcatctttgtctagttccataatattttcattatctcaaaaggaaaccctggaaccattaagcagtgacttaatcctcccctcagcctccagcaataagtaatctgggttttttgtctctatgatttaagtatttctagatattttatgtaaatgtaatcatacaaaacatgaccttttgtgtctggcttgtttcatttagcataatgcttttgggattcatctatgttgtagaatatgtccgtgtttcattcctttgtacggacaaataatattccattgtgctttatttttcatcaaaagctgatattaacttcacccctacccacccactcctccctcatccacaaaacaactctactcagttccatcgactctgctgtatatctttatggtttacacagattctcatctcattatgtacccccatttcacagaagacgaatttgaagcttaaggtgatcaaccaaggtcctggagccaggctttaaaaccaagacttctcactctaagtcttctgttgtttttctgaagttctctgcaatgataacttttctttctttgttttagacattcacccaactcatttctccaatagatttctttacttagtaaacctcaacttggatcctttctctgatgaaatagggagtgaagaatcatgccctcctttgttaggtagatgaaggcacatggcgctaagtggtttacttctctaaggacctagagctgccttatgatggagctaagactagctctggctctcaggatagaagtttgttctgaaagctgctgaaatgcacagtctcttaaaatgctcaccctcctgctgaattataaaagacagccactgagtccaagagacgcagggaagtggtatctgcaataaaataattctataaatgtgcattcattaatttcttcattcagcaagaataaattaaaggctcactcttacagaactgtaattaatatatgatttagatattaatatggaaaaggctggcagggaaattgctaaaatttgtctctggggtttggctttttagacatcaaagtgcaatgtatcacctagcacttagtctgatcaagcaccaaattctttttcttgcttacattagatccgctgaaggtctacttttctgaaataccatccttactcatgagctaggatggtacttcatcctgtgatactcctggcatcatttcccaatggactagagtattgatttctaatacaactcctttgtgttatttactaattatatcctttctaatatcttcagttagtaagtttgaatgatgtaatgtgacaaatcataggaatatttatttttctaggtcttatggaatccttttcctcctgggtaatgtttccttccaacctggcggacttatttgaagttttattagcaaaccaaaatctaaatcagaatacttaaattgcggaaccatcaaagctgagttaccttatgaaagttttaaaaggaatagattttattccaagtgattaagccaagtatgatcttagttaatcccatgcacagcacggaactgttgtttttctgtctatcgccacatctccaagtttgaaagcatttggggatctaagctggccatttacagttgttaaattcagtggataagtatcaatttgggcttttttagtaattcagaaagaatttcagaaatctttgatacctagaggaagttggtaatcattgctattaaaagcaatgaagtgaaggcttcatgcagtgaaggcttttggtctcaaaccactgactggacccttcagaagcctgtgttgactgcttttgtggatcaactgtgtttggaaagtgaaaaaaaaaaggagaaattacagtaatgctttggagaggccacagaggccaattattttgtatttggaaggaaatatgaattcagattttgtcatatttgtatgtagagagcctcttacttctgtggtcaacccagaaacactacattttgatactttcacattttttttctggagcaaaaaccaacagccatttataattaaaacctttctggaaagaatactccaaccttcctcactctcactcaattgaatttcaattaacatttaataattcggctcggctttcagagtctataaagcataagcagtcagccttgttgaagatggagaagcgatgttttcacagttccacaaatgtttctaattggcatgaaccacttgctaatgggagataaattgcccagggtgggtgtgggtgggtgtgctgcgtgtgtgcacactcacgcaggcacacaagcatgcacgctcgtggcagtaatgacgtgtgggtgtacccaggcttcactcgacatgccaatgatgcaaacttgagctaaacgggaaattaaagagggaccagggctgggccatgacagcagcggccacactcggatgggaggaggcgaatagttggttccttaccaagaacccggcagcaggcccaccctcccgtcgcggatagtggacaggagctgagaaaatacatggaccaaatgaaaatgactccttttgactgaaactacctgtgcgtcaggcttctcgccgcctcccctaattttctctgatataaatgaacatggtagaagatgacagaaagtcgacaagaatcatttttctttctttcttgcagtcatgtcagtaatagccctgggttttatagctgaaaaatatatgtttatttgctcattaattttcctctctctcccttgccttttcttggcattaggtggaatgttatttaaaacaagacacagtccagcttcaaaaagaaaaatcattctgcaaaatacagcttagacccatttactggtcatttatcatccctaagagagtggagtagaaatttctatatttgggagatttgaatgatttacagtgcaactgtgactcttgttggcaccaggatccagggacgcagtaggttccttaggacttcgaagagtgtcccacactgtttcgaaatgacatggagaatattcactgtggcacatgcagagcagcttgataatcacttatcttcactgcattccttcaaatatgacacaggctgctgctcagagggtagactcaacccagaggcctatcattttctgaggggtgatcaaaagtcttcatctccacatctaagtgtgtatttcttctctctggtgttttaaaaagcttggttttatgcatcttccacttccttcaaatagtgggcaaataacaatgtgcctattatggtacctggcacatagttgaagcccaataaacatttgttgagtaaataaatagttaagtagaatgttaaaagcattgctagcattattgtcttggccttaacagtgcaagaatagacttgaggcaatcaagtaatttcccttaacagtataagctaattatttgagagatgaagatctggtgcatcgtatttatttgtcaggttccatttgctcctaattaaaggtggaaaagttgtttgtagctttgaagggatggcacaatgacccactcctacatagatttttttattttccttgccacgttttcaaggaaaatacatcaagataaaattaacaggcattcctcttacttacttctgttttcttttctctgttactgttttctagagggcaggcagggtgtggagcagtaaactgttttgactgtacttttacagcccatctgcctacatgacttctgtagttgattctgctaaccttggttgactaataaaatcatcctcccacataaataccagctacagtgatccaagattaaaatgctgcatttatcataagcctcagaaagtttaattcattcattccttcattcattccacaaatatgaattcagtgtatcatatgtatcaggctctgtgctaaagctgtgtatttaacactgagcaaactctaacatggtttctgctctaagcttacaatctgagatggttgatgaatattaattaaataatcatactcaaattatatcgctacaaactaaactattttttaaaagaaatatggttctactaggaccatataacaacaggaactgatttacactaggagaccagggagaagtttactaaggagaaggctggactgaagaaaggggatgtctgaagtacatctgaagaaagggaaagagcgtcctaggcaagaagattgtgaaacgcgaaggccccatgtctggagggtgcatgacgcgccctccagaaactgaaagttggccagtgtggctgggtgggaagagaaagggctgacgggaaggcaggcctacgccctgcagggaccacagctaggccatattaagggcttggaccttcatcccctgagcattagacagacttacaagggttaaagccaagggtgaggaagtagaggcagggagaagggatacatggcccttatcatgtctgtgttttggagtaggggaaatgtaagtgtcagttcttcacaaatacaacaagggagatgaagatgctgagccctggacaatcctttctttgctgcagatgaggttcctggaaattctttaccatccactctcccttccactaaatttcagaaagagtgcatccaggtccctagctgtgtgctgagtaacacttgcacgtggccattgctggaccattcggcaataacgtctcctcttgtcagctcttctagccccttctcgcgctttctgcttttccttttgatgatggggaggtggcaaaacacagttcatttctctctttggcaaagtgtgaatggcatggcttgtggcaccttctctcttggtttagagaacaggctttggagttagagtggctttgcctctcctttagccttacacggttgttctgaggattaggtagcttgatacttgtaaaacatatagaacaaggactggcacatagcatgtacttagttaatgttagccattattattacctatttttgcagatatagaaggctgtcaaagatatattgctaaagggacaaaaagcaagatacaaaactatgtattaaaacagcttgattttgtgcaaagcaaatgtctgaggatatgtggtggttacatctgaggaacaggactggggtttaggggagaaggctaggcaagtggcttttactttattatctaatatttttgtagtaattgattttttattataaaaagtatacttttatagtaatgaaattacaaggaatagtttagaaagtccatactttccatcatgtcatttttttaaaaaggcatgatgatttcaacataacctcttttcatattttttcatccttaaattcggaagtatcatccaaaaacttctcctgggggtaaagaaacatgtatctaaaacccagcaattccccagattttcatttctttgctgtgccatagtcaaataaaagtttttaaaattacatgctattttaattccacagttacaaaattattctagttattctttcatctctccatatacatatatagagttgtctggaatgctgttcacccaccagatataaacaacgcatttggcttcattgttgctgacttcattgcaaagcattgcttaaatttttataataagcatttttataaaaacaatgaaatcattgcttaaaattggagatgagaagtgttagttcacttttctgtttagaagtaaacatggccgggtgtggtggctcacgcctgtaatcccagctctttgggaggccgaggcaggtggatcacgaggtcaaaagatggagaccatcacagccaacatggtgaaaccctgtctctactaaaaatacaaaaattagctgggcatggtggcacacgcctgtagtcccagctactcaggaggctgaggcaggagaatcgcttgaacccgggaggcagaggttgcagtgagatcttgccactgcactccagcctggcgacacagcgagactccatctgaaaaaaaaaaaaaaaaaaaaaaaaaaaggaggaaacacagtacccagcatctaatctttcccagacatttaggatgctgaacttcttcaggattatgaaggtcagtagctgttgtgcagtatctgttgctcatgaaagaggtgagaagtagactatgtggctaccgaatcgggatgacaaaaatattttaaatgatgaccgcatattaacatacagtctaccatcctttcctcttgttttttatttattttttttcttagcaggtagaggctctttatgtttaattaaggattttgattaattgaattggtatttttcaatagtgtatgtaactggttgagaatcattaatattgtacagtgttagagcatagtagctttgatcgtcatttaaatacaactgtttccttgcccagcaattatacaccactatcatgaatcagataagaacacaaatctggaaagaacttgcagtcccctggtaaatacttcatgaaggcaatgggagcttgccaattagacaatcatctctgcataagatatatttccaacgagtaactgcattatacagtccttagcacattatgcccctcgggatatgatgataattgactgtgtcacagaagaaacaattttgaagaaactgggactaagctgattatcaactgaatctttagaacggggttagcaaatgatggcccaagggccaaatctggcccgctgcctaattttgtccagtgtatgagctaagaatggttttcaagttttaagtgactggggaaaaaaatcaaaagtagaataacatttctgacatgtaaaaattatatgaaattcagatttcctgtccctgaagttgtatcagaacatagcagattcattcatttatacattgtctgcagctgcttttgcaccacagtatcagagttgagtagttgtgacacagaagataagagaagaaaatactgactatctgactctttatagaaaaagtttgctgacccctcctttagactcaggtacaagttatttgtgtgcatgtctgcttatgaatggataatgcttttgtgttagaaatacatctggccagttgatgtggccatcaaaggaggtgcaatacttcatattcttctattttcctcactcccttctcaaagtcaaaagaaagctattgagtgagaaaaattaagagtattggaagggaccataagaaaaatcatggtaacagaaaagacctacacattacctccgaagcttgtaaattactaactctaattttaagccctaaaatcagattagctctctactttttaaaatttgaaattatttattctctgtgtctgagaaatattttgagaggcaagagcatttgttcttgtgactcttacaagatacagtggctggccgggcacggtggctcacgcctgtaatcccagcactttaggaggccgaggcagatggatcacgaggtcaggagttcaagaccagcctggccaagatgatgaaaccccatctctactaaaaatacaaaaattagctgggcatggtggcagatgcctgtaatcccagctactcagaaggctgaggcagagaattgcttgaagctgggaggcggaggttgcagtgagccgagatcgcaccactgcactccagcctgagtgacagagcaagactccatctcaaaaaaaaaaaaaaaaaaaaaaattaaatacagtagcacaccagatggagtctctttgttcagtgctatcaccatattgaatggtgctctttggtgtatgcttgcattcagttgtagatacgatataatgcatgattggataataggaaataccttttagtagaatgtatgattcttgataggatatcctgcccattggctttgacagttgaattaacctatttggctgacattgaccctcctactgaccacgatatataagaaaatatgaaattaatataaaagctatcttgtactggtagcaagatagctactggtaggaaacattaacaatagcatcgtaaaatatagaattgaaaatgtgagtcattttgcttttaaatctctatcatgtacatgactgacttcagttgttctctctcctcccttttgttctgtttcagaggttgaaggctgcattgactcaccaccctgctgccatgtcaaatgggaacatgaacaccatgggacacatgatggagatgatgggctcccggcaggaccagacgccacaccatcacatgcactcgcacccgcatcagcaccagacactgccaccccatcacccttacccacaccagcaccagcacccagcacaccatcctcaccctcaaccccatcaccagcagaaccatccacatcaccactcccattcccaccttcatgcacacccagcacatcaccagacctcgccacatccgcccctgcacaccggcaaccaagcacaggtagaccttttccgtgatctctttccccttcttattctccttcttaacagtgcaagctctaatgctggggtcatttgcagcaatcttgtttgacaagcccaggtgttctatctcacattctaggggctctgtttatctcctaggaggcaagccttacccataagaccctaccagatcataatttctataaataatacactaaaaaatatcaggtctagtctctaagggcaagcataaactttaagttctccaaaatctatttttgcagtgtgtcagaaagttagcccctctcaaaagtaatatgaatcaatggattaggaagaacttaagcttgtgaagaaagatgtgaattaagaatgagaaaaacgagttaattctaaccctggttctagctgctatgttttaaaacatcatagagactcaattttgtcacctgtaaaatggaagttaaatacaacaggcaatcttctgagtaacagtgaatgttaaaaatctaaagagtaacaattcaaggcagacaaagaagctccatcatggatgctagggcgtaaggtgctgtgtaaatggtgaagagaggtgactcatccccctgaatgagaaatgcgttggagggaacagaaagagagccaagttctgtagatgatcagaccaagagaaaggccaaatcccagtgggtgagagtcaccaggagtggctgcaaagaaagccagcatttagacaaaactgaaagagggttgggggaccaggcagacattatgtcacccacggccaagaagagaggcgagtcctgtactggagtgagttttagtaagtggatgaagggcatgtccaggagcatggctgggcctagacactttggatcctcaagcagaatgactttcatccataccttccacccagtccacactgccagcttccaaccagctgaatcagaagggtgtcggaagcatggaaccgccaaaaaacacttattcactgtctcctctgtcatctgcctctggagacgtgactttatacccggcagctttttgaactcttgagcccccctccattaacatgcaccaaacctggacagccatccacagaatgggtcaggcacaagcaactctcgaagctattcattagataaactgtcttttgcaaggttcttagaggtgttctacattgtgaataagaattgagcattagaatgagataaccttaatttttttcctgccttcctcactgtgtgattgtgaacagaaacaacctctctacccctcagttttcccatctgtaaaatggggctgggtaatagtagactaaactcctaggctcttatgagtattaaataagagaatctctgtaaagcccttgacacagtgttcaaaatatgttattccaaaccagtagaagtttagcaaattgtatagcaatcaaatgctatccagagaacatttttagtcacatttttagtcaaacgccatactagaacatgtatttagaaagaaaaaaaaaaactacaaagtcaatgatgggcaaattgattcacatttgtacttagtttataaggaaacgagaacatcaaggtttggttgcctttatgggcaagttatttcacagagcaagttatataacaattctttgaatataaaagccattcactagctaattaccaattagccaattgccctctgtttcaagtcagtaagtggccaatagtatatgcaattagttaattgctattataattagctttatgaacagttgctttttttaattgtatgctaaaaagaaagagcccaggttggtcttgctaaaatttgaaccagatcatttaggcagtatcccaaaataccactcttaaattgtattaacttggctgattactgagatcttgccattttgcttaattgtatgattatctgaaagtaggaatagaatcctttgaactctgagattctaaggtgatttggaataaaatctgcctttttgaaattataatttattacttttgatcaaaattttcagagcatctatgccaagagaattctgctttaaaaataaaattacaagcgacaataattaccaggtatacaaattctggttttagggttgtatttgcattttctcctggcttcttgtgctcctcctgcatgtaaggatgtgattgtagagtgctggtttcaaggaatttctcttaatcaatcctgaacctaattacacctgaaaccacgtcacttatgcctttgggtgaaggcacaggaaaagtatcatgggttacaggttgattaaacttagggtaggaggatacagaattgaaagataagtccctgcaatggagattaaaaatcaattttttcctatttgagggttttgtctggggctggcaataagagattataattcacaaaaggaaacagttaaaggcaaaaatatccgagcagttagcacattccctcttaatgcttttctttgcagtagttagctcaggaattagcatctggaatgacaagtgctaagcccctgccaataacaaggatgacgccttcactagcaactctgatgagtaagaccttagacagttaatttattttgttattcctctataatcgggaggaaaagagtcaccaacaaacaaacagttctagaaaatgtctttgctggcctggtgcggtggctcacgcctgtaatctcagcactttgggaggctgaggcgggtggatcacgaggtcaggagttcaagacctgcctggccaagatggtgaaaccctgtgtctactaaaaaactacaaaaattagccaggcatggtggcaggcacctgtaatcccagctacttgggaggctgaggcaggagaatcgcttgaacctgggcagcaaaggttgcagtgaaccgaaatcgcgccactgcactccaggctgggcgacagagagagactccgtctcaagaaaaaaagaaaatgtctttgctttgcataaaattactaagatgcagttcaacctcaaccctgggcctgattcttttacagttagtcatagatggtttgatagagttttggattaaaatacatcaccatcagtcaactgatgtcaaccagtagccattattagtgcaattacagtcattctgattgatttcaatcatagtgctgcaatgtggtagaaaagattgttgagcttcatttttaaaacttttggcctgttatttctgcaggttaaatgtctcttgtaaaacaactttataggtattaccgtcataaacctgagtgactaagaaatgggagaggaaaaaaaaaaacaccttttattgagaatgaagaaggaggaaggagtgaagtgcatgagggaaagcattaggtgtccagacatataaagaaaagagtcaggtgtagaaatttcacaaggtgctgtgtgtctgccttatgaatagaaataaagctctatgtgtgggggtctccaagccttagatgttgctgagtcccacacagaccttgcaaggactctataagcatagtaaaactttttaataaagtgctttgccactcaggatttccttctaatgtaactgtatggtaatgcacaagcaactctcactatctcacacacacacagtgtgacagggctcagtgctgcttcaggcatcaatttaatgctttcaaaggcccagcttcccaatcacctagaaagctctcctggatctcctttcaccctggtgagcgctctgaggggcaggcaggcccggctggagtatgcaggtccagctagtcctctgcattaagaactgtgtaatagtcaaaataggatttcatctgctttcctggcttcatgggcttcttttcataggagtcacagtggcaacgatgtcccagaggtatgttaggaacacaattttaccactattagaatgaaaggagcccacaacctgctcagaggttttctgtagatgacagatgagtcatccatattgtgataataaccctgacctttctgttttcaccctgtagccatacattggctattttaaagttgttcatttgtttttgtttttgttttagagacaaggtcttgctctgttgcccaggctggagtgcagtggcacgatcatagctcatggcaacctcaacctcctgggctcaagcaagcctcccacctcagcctcctgagtagctaggactacaggcatgcgccaccatgcctggccaatttttcctttttttttttttttttttttttttttttgtagagacagggtcttgctatgttacctaggctggtctcaaactcctggcctcaagtgatcctcccgccacacctggcccttactttaaagtttttaaacacaccgtcagtaaaacatttttaatagttgaaggagaaaaataaatgtttcctctaccatgattcggccaaatgcctgtcagggaaaaatccatctgactacatcttttcacgagtcattcctatatcttgccaacacatcatagaatataggtcagtgatgcttttccttttctttcatgagtgtgatttcatcgtctgtttcattcataggaggcaagtctcatatgctgactgaaacgatagactttctgtgctttgctttttaacatcagcttgggtttcttcccttacctaaccacgtccttccctatccccatcacctcctccctctctggcccagcaggtttcaccagcaacacaacagatgcagccaacccagacaatacagccaccccagcccacaggggggcgccggcgaagggtggtagacgaggatccggacgagaggcggcggaaatttctggaacggaaccgggcagctgccacccgctgcagacagaagaggaaggtctgggtgatgtcattggaaaagaaagcagaagaactcacccagacaaacatgcagcttcaggtgcagcccacggtgtctttccccgcgactcaaaggccctctgctccacgggcatttccggccctgacaggcacttgttgacctaagcagtgataccacacacttagtccacagaggagccgcagccccactcctcgagttttattaattccaggacaccctgcaaaacaaaattaaccattcagttttcaatcaatttgcccacaaagctctgagaaggggggacctaccccactaagttgtaggggtgggagaacaggctttaatccgacagagatccaaaccatggttcagcaattacttgctaggcttaactctctggctctcagtttcttcctctacagaatgggaataataactttatagagttgttacgttaggagcaataaacaaactaatgtctccaaagcagttgcccagtgcctggcccataacaaaccttcagctgaaaaggagcttttcattaattatattcactaggttgagggggttgccttggcttatacttgattatctctatttttgtttcatggaagaaagaaaggttgatggtcattatgtagctctgaaagaaaaggcatgttttcatctcatttgccaactcaccaagatttgaatcttgcttaatttttgctttttatgaatgtcttaactggggagattttataatgaggcccagaagtgtctgggagtgtctaagaggaaaggaaggaactctagtacccaggcttctccaatagactttatagattataatgatgcagttcagagcatttgttctaatgttaaaaatatgtgcactatttatcagcagaaaaaaaaaaaggcaagtaaatagacatgtatgcaacccacagtccagggatagcattaagagttgtggattatactccagtgcttccagaagctgagagaatggccaaagagagtggggcagggaggaaattaccctacatagtgagactgcattttaagagttcatggggtccgggcgcagtggcctacacctgtaatcccagcactctgggaggctgatcactttgggaggtggctggatcacttgaggtcaggagtttgagaccagcctggccaaggtgcagaaaccccgtctctactaaaaacacaaaaaaaaattgccaggtgtggtggtgcattcctgtagtcccagctactcaggaggctgaagcaggagaatggcttgaatgcaggagggagaggctgtagtgagccaagatcgcaccacggtactccagcctgggcaacagggtgagactgtctcaaaaaaataaataaaaagagttaatgactaggcattggtaggtcacttttatcttcttcccacacctagttctctgtgcatccttagaaaggaacagttagggtgccaaaccccaaagcctttgcatatccagtttcattaaatggagatggcttggggtttccagtgtacaaattgaaagtatataaggaaagcatgtgttgtatgagggcctgaatttcataatttatggatgttcatttttccccctaaatgtgtcattctttttgtgatagacatgatgagaaagaaactgggaaacatatagcagatgtgaggaaaataagataatgattcccccactaacttgtatgccgcgggaagattgggactgtctcttactactccctccgcccactatctatctatctgctgtttatagtgtagtgtctacactcagtaacttatttgttgaataaatgaatgggttcccctgtttatagtatagtgtctacactcagtaaccatttgttaaataaatgaatgaattcctcatagctggagtgtctaagaattggctgcttgaccacttggcaaggatgtgattgcagggagtcaagccaccagagaaatggctggactcaaccacctttaaagccacttgtagaatctgacaggcacagtagtatctgaaaaacttttaggtagaatgtggttaagcatttttcttttttgagacttgtctcaaaaaagacagacctcactccattgcccaggctggagggcagcttactgcaaccttgacctcctggactcaagtgttcctcccacctcagcctcccaaggtgcacaccgccatgcctggctaattttttttctctagagacaaggtcttattatcttgcccaggctggtctcaaactcccaggctcaagcaaccctcccacctcggcctacaaaagtgttgggattataggtgtgagccactatgcccagccaagcatttttaacattaataatcatattttaattttgatgtgtattgaaaaatataattagaagatcaaatctgcagtttcaaagatattagtaagaaggctaaatcattcaaaattgagttaatttgcacaaacatgttaagtaaataaaagttcttgtatatgtgaacctagtaaatattaccgcagtggttctgcaataactgaagtggggggaatcccaggaatttgccaccatctctgaggtctgcagaaggatgatgcaaacatgtaggttttctcaatcttggccctattgacttccgggcttgatcattctttgttgtgccctgtgcattgcaggctatttagcagcatccttggcctttacccactatatgtcaggagcacatcttccaactatgacaaccaaagagtctccagacattgccaaatgtcccctggtggtggttgggaagggaggttgggtggcaaagtcagccttagttgtaaaccactgcttagatgaaggagccaaaaatagccagctggcacatatcagctgccaaggctttaaatcagttttaactaaaatgagtctttgcagaattccttcagggtattgactgtgatcctaatgcatgcaaacatggaaggatcatagcagagagccaggaaagtaaagatgtccacagactttgaggccagaggtgttcgtgacttggcatatgcgtatttatgattgcttttacagaacatacaaggtaaatttacccttcgctagaccctaatgcactgattttttttcacatttctttagagccaaatggctaaggaaaaaaagaaactagaactctagctcccaaaaccagaaaaaaagatcctactgagttcatgtaacaggcaccaatatcttttggtagttaaaacagtacccaaaaaagggacagtctctgaacagactaaattgttgatattttccaaccactgctttgccttggagggacagaagccacaaccacccagtgttctctgtgaagctgagtgtcctgcatcaggccccgggatgctggagaggatgctgcagattccgctacctttgaatgaccctttccctctcactggacctttgtcaaaagaaaaaggtgtctctcttgaggctggaccagtgagccaaattttaagtaaacagaaatggaaggtgctaagcaaacaaactccagccaaatggaatatccaaggtctggatggccagctgccacttttgagttgttttccagcgtagaaccctctagttaggctgcagcatttcagattggaaaaaccagacctaagaaaacaaaatcaaactcccagacttcatttcctagtctcacaacacatctctgcccaagaggtcaaaaaaggtataggaattggggaaaatattagaaaccacctaatctgacattttgtggagaaagaaactgaggttagggaaatggggggtcttccctaatgtcacacaacaagtaggtggcagaatgaggactcagggaagtctcctgttgacctaacccacttctttgtgatcttctattttagaaactccgtaagccaaagaaatccatgttcttttttctgataccaagggactaagatcagctctaaattcatcgactgctgatgtggtactcagtagaacgtctgtgttcagtagaggatatggaaatcatctggtcacccatggaaataattgcttttcttttttagtgcaaagacacatggtctaagttgctgctgaaattttggacacatgagcccaggtctgggacttggcaagcgaataggccagatgggaactgttgcttgacaaattgaaagttctttgtttcagagtgaaccaaacctggtctcagctaatctaccaaaacaaaaaagctgggggagggtatattgtagagcccattttgataattatttttttggcacaaactactgcttacaccaaaaagcattgtggatttatcatataaataatgacatccccaaagctgaacactgcaaatgtagctattagggacttgttggagtgcttgctgaaagtatgtttttgtagtattgaatatctctgtggcgtgctgcttcatcccaaggcaaactatgggtttaaaaatagatcagtccaactggatcttacagtcgctaaacagctaactgctttagaggagcaaactcaaattcgtttagaaaaatgaaaaaatgaagagttgatttccaccagacaatcaatacatattattaataccttgtatttacaaaatacttttatattaagacctaaaactctgattataaccttcataggggaatacaaaatggtgattttcctcaatttataaagcaaggtaattcagagtaagaaaatgcctccagaaggcctggtttttatttccctactagacttccaggccacatttgatttcttgtatgcattttgaaacatttgctatctggttgttctcttccaaaatgaattcaaggtgattccacttacgttcccttgaaaagcgtttttacttaaaatatagtctagtatttgtgcatttcctacactaatcagtctttcactatggaatccttaagatgattatgcatgtgcacagcacacaattcattcttctttctctaggatagtgattcttgacctttcttaagccaaaggccccttatgaaatataatgaaggctccgtagatgctctctcagtaatatggacacataaatggacatagaaaattttgctctaaaatgaaactataaatgttgctttggaatctgccctactaagatttagaagcataagaggtgctagaactggctcccttatgaaagataagacctgaattataagcatatttgagcatattgaaagtagctaagtaatgaataaaagtcaagatggactctttcattggataattgggtaatttgctttctcaatagaaggtgacacagaattgcttgtagaataaaaaaaaattctttctggaaggaactttctggaagtagttcaaccatcgtgttttatacttggttggcatggcagcttgggaactcaaaccctattattctcaactctcaagtgagagttccttttcctactggatgctgccccatgaatttctatggcttatgtggttattaggcctttatttagtccttgcagcatcatagttatatgtatatggataaacaagaagctgattgcccttctctactgaggacattaattggtgttcattttcccacaataacatggctaaataagtattaacatgttacattaagaaatatgtcctgccaggcacagtggctcatgcctgtaatcccagcacttggggaggctgaggctggagaatcacttgaggccaggagttcaagagcagcctgggcaaaatagctacaccccatctttgcaaaacattttttaaaattaggtgggcattgtggcacatgtctctagtccctgctactcagaaggctgaggtgggaggattgcttgagcccaggaggtagaggctgcagtgaactatgatggtgccactgtagtccagcctggacgacatagcaagaccctgtctctataacaataaaaaagaaaaaaagaatatgttcatattcacatatatctttaaatgatggtcagttgtctcaatattctcagggttctgcatttttacagatcctcacaacactcaggcctttggtctctgtacttacaacatattgctttattaataaagtgttttgctgttcatagactaaatgccaccaaagtcatatactttgtatggggttttggtgataggccagggcaccacatgtgctgactagtgctctttttatagtaaaacagacttatgaaagcaaaaatttattgtgaaactgtttggggcatgccaaatatcataggcagttagctctttgctaactgtagaaacccagagaatagaattgagtgttttcttagggaaggggcaatgaacactttgtgcctgggagatcgaatgctgccaagaaagggtttcattgcccaggacatagtgggggaagaaatggagactaaattcaacctctccaagatggccacaggcaggggtgttttttcttccaaaagtataagaaagcaagagaacccagttttgtttttaatacttttcttgtttgttttctaggtagaaaagtgtggattcactagaaattagaacttgattccattttctaagatccattgtctacattatctgcagctgagagcttctactcagggggcaaggtgtctagcagtttcgatttcagaaaagtgttatttctgtagtctaaatgcaaataatatgacatttccttctgaagcaaatatatacgcacacacacacacacacacacacacacacataaacacatctctgtttcctttcttggtttttgtttggttgtttttttttaaccagagattgccttcatttgatggtctagaagtgactttcttttatatgtgctattttgagcagaaggagaactgagaaaaagaaggaaggccatctgaatttagataggtgtaaagtcaaagaggaagaagttagtgtttaaggctaaaataaattgtcctgtaagttatcccactgaccttggaattgacagggtcacttttggtttccacagagccccttatcaatcacattcatttggagttgggaggtacaatttgccttcttgtatgttctgagatgtaagagcaattttcttgtttgattaagtgatttattcatcattaaggctaatttcccaaatagtcatttttattttgtaaaaataaagtttggaagagaaagggaatgagatgagatttgtagatgagatttttattattttgtcattgttttattttattatttttgttattaatgttactcaatatgtggttgcttataatttatttcaccaagaaatttagaaatgggagatattccttaaaacagatttcaattttttttagcgcaacttctagaatcccaaacatactttcctaggtgataaatacatggctgaaaagccaagttcatattgaaagtgtaggtacaacttaatgacagcaatgttaatcgtccttttcggtgtgcatgcattttttaagtctcctacatgtgaggtataatgcctggcagccacaaataaaccttgaccaaagagaggatattattgatcacaatttttaagtggcttattcaagatagtgctacatttacgttcacttttatcaagtggaagcatctcggagctaccatctattttatgtttatatttgtagacaatgggtgccaagttcattattctacaaagctatgagcatgcctttgtgaattaatattaacagataaagtagagatccgaggcacttacatgagtaaataagaagaaaaccccacaccatccacaatatcctgatattgaggggggaaagagtattttatagaccgaaattgaccaaataatcaatgaactcaatcaaattaattcaatcatggcccaaaacttcattgcctccttgccaccctgagctgacatcatccacctgcagctgaccaacatgtgtactgtatgcttccatacctcctgctcagtgggcatcaggcaggtagatgtgctctgctcaacagtatcccatgaacagtaattgagtaggagatggtggggagagcagggattcatgactgaaggtcaatttattttcagatattctttttagattgagcaacacagacttcttttggaaaatctgatggtagatgagtcagcttattctgattgcatttcaggtggaagccacaaatcctaccacataattctgcccaatgtgcgcctcatattcacattctcaattggatgtaaacctgagcttgtgaaggttacaatagttaaatgtattaagtccttattatgtgctgggtattgttctgtttcccatctattactgtatttaatcctcatagtaacacaaataatgtactcttcttatccccatcttataacgaggttgctggagctcagctgggttatgtaatctacctagggtcacacagtcagtgtggagtaaggattctcacctggcttcggttcccatcacctaagggtgtggtctagccttttaataaggttcagctcttgagttaaaacctaagctctgcagaaagcccctgggaaatgtgagggccaaattaaaggtaagctacaaactttcaggtgaaccacattaaataatattcttaatgtcatttagacataatggaagagtttgccagttttgttgttgaaagtgcacagggctgtgggtttgtatcctctggtcttctcaacatggttttaatacatatctcttttagaatgaagtgtctatgttgaaaaatgaggtggcccagctgaaacagttgttgttaacacataaagactgcccaataacagccatgcagaaagaatcacaaggatatctaagtaagtcgccgactttttcacttttctttagtgtccaatattttttgccactaagtttgcactgaatttgattgaaagagcaaaagtaaagtgtagattgtacttccaggcagatatacaagaattcttgagtggcttccagactattcttccaaggggatcccttttttctgacccctgtgcaacaccatgcccaccacctcctgataatttctggccactccttccctagcatttcaaagtatcaaaagaaataccaaattccaattttgcagccagtaagaaaagagccagctgaagcccaagtaccagtggcctagcagtcgccttcagaaatctgtggtctgggaaccaggccttgggtgaatcatatccagtgcctccagaaacactgcatgttactcactgggctgaaaagctagtgactggcctcagtttaccaatatgtaaaatgatcccttccttcagaccccagtttctgcatctggaatgccagttggttaaatgatagttgagtagggatggtgggaggagcagggattcatggctgaaggtcaatttattttcaaataattttttagattgagcaacacagattctcccaccacatgtgagtatttttccacatttgatatacggatggctatttaaaaagacaaaatggggaagttcacatatccatgactgaaacacatcaaatcattttactgatacagaaagcatggctttgctcgtagatataaactggaaaggcatagcattgtgacaacagttgaaaataaagttttgaaattaactttcagaagaaaatgtgtgaaacttctatttcaagtaaatatctagtacagtttctctgaggagtccacaagtccatacaaaaaagacctatattggtgtgtgtgtatgtgtgtgtgttgtctttttttttctccctaggtccagagagtagccctcctgctagtcctgtcccagcttgctcccagcaacaagtcatccagcataataccatcactacttcctcatcggtcagcgaggtggtaggaagctccaccctcagccagctcaccactcacagaacagacctgaatccgattctttaaaatgcaccatcagacctggcctccaagaagagctgtagcgtaccatgcgtcctttcttttaagggcatttttagaattaactcagacctggaagactcctcagttcttcaaagactggctttcatttttatagttattatggaaatgttgtcttttatacttagttatataagaaaaaagggagttatgcaattaatatctatcagcttgggaaacgctttggtgcttttctccagttttctggtaccagttacttgtttataaactgaaccttttctgtatatagccatggtttcattcttatcagtccaaccctttgcctgaaacattgaatcttgttaaaccacagcttttagctaaaatgaggtatacctagatgtcaagtaagacagatccaaggtaactgggtaggaaatcttttgacatcttaactcatgttgagtttgtgctgtggtgtcaccagaattccagataaacacacagcctttcccatacctttttttttcttactataaaatattataagatccattgatgtccaaataataccaccaagcatctcttcacctctcctcctcttggtccacttgctaatgcccagttttcttctccatttccactttttcttaggctccctatttactattcattttgacttccttctgttttatttttttccctttagcattgcatgtgaataagaaaataatgtttaaagaaaaaaaaaaaaaagcaaacctccaaaacgtggacctaaccattgcttcacttacacttcacccacagctggagttcattcaactcttgcttttcacaaaatagtaaccaggagatgtttaatgtgcctgatttaatgtttttaataatcacagcaaatgaaaggtggtttagttataagtgaagcatggttgaataccagctggggagacactagggaagggagctttgtaagccttgattgcgaaagtccaaattttgatgtggggctataacatgacacccttggattgcgactggttttatacggcctgcctataacgttgaaaatccatgtactacataataattcagaagggctctattcactacacagattacattgttcaatcatcagctgctaatagcctaagatttatttttttttttttcttaagcctatggaaccggctttgctgttctggggggtgaaaatagactaactactggagaaacaaagagagaaagaaaacccagtgtttccataggggcacttttagccttcccacaacagttaagcactctttgactgctgaaggaaccccatggatgaggtgcaggctacttcactctttttttttcttttttgagacagagtctcacctattgcccagactgaagtgcagtggtgcgatcatggatcactgcagcagcatcctccgagttcaagctatccttccacctccgcctcctgagtagctgggaccacaggttcacataaccatgcctggctaatttatttttacttttattttaaaataaaagatgaggtctgtcttatgttgcccaggctggtctcaaactatcctacttcttcctcccaaagtgttgggattataggtgtgagccactgcacccagcctacttcactcttctgaattattctgatttattttcaacaacttttgtgaacttgcccgtgatacaaagcagatagtccctgaaccacagtcgtgcctccttgaaacaagccattctactgtgctaatgttttaatatcacatctcacaaataacaggggtgaatgtttctctctagcaatctaggcaggtgctggtgtttcatctccatttgaatgcttgacctcttaatgtgtgtgtgtgtgtgtgtgtgtgtgtgtgtgttcatgggttttaaaagaacagtattttacaaaaggtgtagcttttataagagtgcagaaaagggaaggatgtgtttttttctctcactatagtataagaatctattttggagaaaaaaagaaaatatgagggtctcgaagcatgatttttatataactagtttcagttttatctaataacttactttttaaatcaatatttatcaacaatctttccttgtatgcagtgctttcaaaagatggttttgagtgtccagtgaaacttatgacttggatatatggttgaagaatcaaaacaaaagcaaaaaaaaaaagcaaaaaaagaaaagagaaaaaaagaaaaaatgcaaatggaataattttctattatattttagacaaacatatcattttcgagtattttaaatactgaattcatagttgttgttttttaaattccaacagtaacagctgaatggtttaatctgactggcttcctaagaaatgtttaagactcagctttaaaaagaagttaacattcatatctctgttttgaaatcaaaaatcatatttcaaaattctttcctaggaccatctatgtgtctcccctcccctccacaaaaaggagaaagagtgcattaaaatgtttagttgggttttttaatttttaatttttatgttatgttttgctttgttttaagtaaacaaaaatttttctttctttactgcatgcatagcacttaataaaatggatttttaaaaaatccactagtaatatcagaatgtccagggagtgactgtcactacaatgatggtttagtttacttctgttccaccttttgattgaaatatttagttgttaggctgaaagcctcggcagttaagaacttgcctgagttttcttcgttcagcaacttgacagtttgactgatgtgcattatatatagctcaattatgtctgttttttatgctaagtaggaaaaccaaccacacacattagcaaaccggcctcaacatataattagaataaactgtcttcttgttctactcagggcctttaggtgtgttcattcacggtatggaaatacagtaaatgaaagattccaactagttgtcagtgcttcttgaaattccaaacagaaagatacattggtcaaatccaacacttggcttatcaatattaagtcttttacctaaaggcccagccgtcaccagacaacagaataatcaatctgcctgaaaatccctcctccttgtcctacactttttgcctgtttgggagaatatctttgtactccattctcctccctcagccagttactgggtcacccatccatgtgttcatgaatcaatcatcacggcctgcagagcacctgtcctaaggagggaaaatcctgtcacactgcctctccccattcgtgtgtggttttcttgatcggtgagatctgtctctgaagtcactgccagcctccctgggaacgtctatagtgcctcccctgccttatgtgatgggagttaacaactcagataagtacacctgagagcatttctatcaggtaaactgtcacttaaatggaggtgtccacatcttaattgtttctccttgacacatttctcaatccacgaagccaggagaggtagagtgaaaatcccagccatggatgaatgtactaatttgaaagccaagtgttaagtcggatgttttcccgttacactactactcagccctctcctgcggccacatcaacggatgcaagtcacagtcttaacacagcctgtgggagacaagcagtttgtgtgctcacagtatatattatagtaattagggtgacttagagcaaatactcttcagatcctatgtagtcagtgaaacaaaatggagagcgtattctgatagaaggacgtcgacggtgaatgttctggtggttgttgcctgttaagtaaactttagtgtgtaagttgagtttgtcattaaaatcataaaccagctgcggtaacagacaagcctttggctggggagttttaagcctcggtaactgctataaaactagccatccagttaggatagaatgtgtttctttctggttaaaaaaaggaaaaaccatctaagaaaatatatatgtatgtatgtgtgtatacagtggaattcaaaggaccaaagcaaaatttgaacaggaatctattaatttagaattttataagatatttattaataaatgttatttttaaacattccatttgaacagtattctgtaggatctacttgtttttaaagtgttagtccataataaactactatagttatgtgtattttcatttttcagggtttcaaatggctattctccatcatttggtggaaatgtttgcttagatctctgtgcatagacatttcaaggatttttattgctctgtgagttattttttaatcaacattctgaacagttttttttaaacatttatttctgtgtgttcatttttaaagtaagctctttcatttaggaagcagagttcagctaaagggaatcagtaactctaactggaacagctttcttgtagaagtgtaaaaacagcttcatctctgcctctctccaccccaccccaatttcctagaaagccttgcactattcagctcccttagtgctttttgtcccttcccgaacaatatgcagtagctttaagccattcaagctccattatgcagtatatctgagaagggaaaggaaacaacccatttaaatttgaataaaaccgtgcctatgcgaacagtagcaatttagaatctcttttctgcttttaaaataatttatatttaaaaattgcactttagctttttgatccctttgtatttctcttattctctttctaacctcttctctgtcctcaaacttgcctttgctctcctttacaataccccccacccctcctccaaggctctgagcggcatcatttaaaatactttacagatatttgcaccaggtacatttatgtgcgtccattggtagcacagctgagacctgtgtctcacatcagcctaggtgaagcctactacaagaatgccaaggagaagagccagtacactatatggtttatactctttatccctttattcatagcatgttttttaaaaatgttatattatgcaacagatgtgaggcagcagctaagctatacttaagaattttctctcaccttccaaaccaaagtgtcctgaataagccaggagacttattcttttgtgcaccctggtgcacatctgactgttgtcctagccatagactctctgaggccactgaaagaacagtggccctatcgatttcattcctaggtctcaaaaatacaatgttgccttgtaacataattagggacagcacctctatttcacaattataatctaaggtaggataagacgacacagcagcaataaacttacaagtaaaattcaataccaaaacaaacacaaagaaatttaaaaaacaaaaaacctagctcatcatgttgtgaaaatgaaaaagtgaatgtccattcaaaatattttactatttcttgtggagtttttcagtgatgtaatgcttgtagccaaattgcttaaagagtgtttatatatttttttccttataaattgtctattttttaaaaaagctatttaaccacagctgaagtggggggtaaggccaaattgccaacacttgttaaaagattaatactcttaagtggcactctgatacctttccaacttgtcatcagaaaggaatcaataattaccaactgttgtatttagaccaacttacaatatctagctcattagaagccaggatctagaaagctccttctaagccatttaagatattcttacattgagcttcatattatagaactttataggattggatattttacaatagaataatttagcctcaggactgagaatgtggaagctgaataaattagctttaaatacatcattaaaatcttatgcacaataagctcattagattctagttttctcctttagaataccaatgccacagacactacaggagataatgaaaggtatcagttgtgttgagtggagggagtttaagagaaaggacccttcccaaccagcagccagtagaaaatacaacctactcacctttttcccttctaagttctgctaaatcacatctgcctcatagagaaaggaatgttgcctttgagaactgtcttggagaacagataagcttgaaatgttctctctagagaggacatagggtttgggatcctctgaaaaggcccagaaaaatagctcagttcaaatacaatgttctaggacaattggaatataaatattgtccaaaaatataattaaaagaaaaaagtttagcactgtgtaaagtaagtgttaactgaggaagtcccaaaaaggtgctgtcactttaagttctggacttggggttctttgtatttgtaaacagcaaagcatttgtgtttgtttgtctatttgtaaagcaaccaccttccttattggaaggagaaaaaaaggggtacatacatgtaaatacttgctgcagcatttaatatgtttaattttgtgttaagctttttgttgcatcgtgaacacatttattgttaccaatggacaatgagttcattaagactgttcaactaggtcagatttttacatctctttctagcaagaagagacaagattttgtgcatttgtacaaatgttaatatcactgcaattccaatataataaagcactcaaatgcaaataatatatgtcacctttgtatgatgaaatttggggttgggggtaatgacatctattcctcacatagtcttgtcagaggcatgtgaaccagagcaactccatcttgaataggagctgggtaaaataaggctgagacctactgggctgcattcccagaaggttaaggcattctaagtcagtggatgagataggttggcccaagatacaggtcataaagacctttctgataaaacggtttgcagtaatgaagccagctaaatcccaccaaaaccaagatggtgacaagagtgacctctggtcgtcctcactgctacactcccaccagcgccatgacagtttacgaatgccatggcaacgacaggaagttaccctatatggtctaaaaaggggaggcatgaataatccaccccttgtttagcatatcatcaagaaataaccacaaaaacgggcaaccagcagccctcggggctgctctgtctatggagtagccattctttctttcctttactttcttaataaacttgctttcactttacggatttgccctgaattctttcttgcaggagctcaagaacccactcttggggtctggaccgggacccctttccgataacagtctcattcatgacttataaaccaaggcttaccttttcagggtcaccattatctagggacaaaaggagatcagattttctccttcccagaccagcactacattcccactgcctcttccatccaacttcccaactgaggtcactaatccagcatattcacagtgggttggccatacaacttaatttcactttaagtgagtttggaattagcagattttaacagtcaagaaataaaggcagcctaaggtcatgttccagccgtgtctaggaaccaagaatcacgtgctggcttctcggacaatcaaatcctggggttctttgcttgatctccagaggagtcccaagggtagtcttagtccttttatgtgttcctttagatattgcccttcctttcttcctcctcttgcttttatttctttttctttttttagtcattctccttttcctctaacactcgatatctgatccatcagcaagatcagaatccaaccatcatgtagcaccaatcttaaagttatgccctgaccaagccatcaacatctcccacctggattattacaataatcttctaactggcaaccagagggaggctttgaaaatggatgtcagaccacgtcccctcactgctaaaaactctgcaaggacttctcacttcattcaaatcaggtaaaagcaaaaattcttccaccacccactttaagttctgtaacaacccgacgtgacccacccccacctcattcattgcctgagctcatctcctatcatttctcttccctctccccctctccagcttcactaatgtctttgcaattccacaaacctcagaagcaccatccacctgagagccttttcacaacctgtgaagaatattcttcaccccaatatcagcatagctcactacctctagcatctccctatcagtaaagccttttcttagcttcctatacaaaattacatcacttgtctgccttgcccagactatcttttctatagtgtttagcaccacctaccataatttatatttgttgtttttgttgccaccacaagagcaaaggtatttcctattttgtttgaatttgtcactaagatctaaaacagtggacacacaatgggcacacaacaaacatttctggaatggatgacctgtccttttctatcttcctcctattctcagaacattccaacccttccacctgttccttcagccaaagcagctgttttgttttgttttgttttgtttttgagattgagtctcactctgctgcccaggttggagtgcagtggagcgatctcggctcaccacaacctctgcctcctggattcaagctattctcctgccttagcctcccaagtagctgggactacaggcacatgccaccatgcctggctaatttttgtatttttagtagaaacggggtttcactatgttgcaggctggtctcgaactcttgacctcgtcatgatccacccacctcagcttcctacagtgctgggattacaggcatgagccaccacgcccggccaaagcagctgtattttaaaaccagtaccaagacatgtcactggacacatggcagtgggagatgatatttgtaatcagtacagaaacaactgggggaaatgatcgctgttctaatggcgatcccatctgttacatttacatttagaccactcagtattctcatagttcccaggagagtctttctaatgcccattccacactcatttgcaatttcaaaagccattactattggttaaaaaaattgttatgatcctacatttgtacttcaaatgcagccaattctaatctctatcctacctctcatccctgtgtgtccctggagctttgtagtgttctttatcttacacttgctgatgtggctggtaactggttgatgactagatcacgttttacttttgcattacatattctcttatccaacaaaaataattttttatcaagtcaacctgccttgtgttttgagacctaagtatgtttattaagagactgtaaaaatttggagcaacgatgggccctctttttaaagtcattgaaaacaagccactttgataggcctgctcccatggcagtaatgttgattttatcaaaccagctataaaaattaggctgccaaagaatgtggggggaaagactaagtttaaatctataaagatagagtctggattcagacttgcatccttcagaagatatttctttttggcaactatagatggcttttcaaaatggctgaaaggatggataaattataacatctgaaaatagttgtctgttagctagtagacctagcaaaacattattattattgaaaattattatatttaaacccagaaataaagccatgaagcttttagtaaccataaagtttcatcttatatgttgtcaaatactgtatcttcaccaacattatatttccttgtacccaactggaggctgaatcatagcaattgtcatcaatcttctataaatctttttactacaatattactccaatatatagacccaacaggctataaaaggtctcccataagtcacttgcacttctactttcttggaaggagagctgcctacatgttcatttaaatgaatcaaataggaagattctagttcattcataacacgttcttatttttcaatactcttacagcaagaaaattgttccaaccatctaagattgattgttttattccatatacacagcacacatccttgatctactattattacatttgggttattctaaatagagcattctctgtttaagtctagtccaccaactttgatcttgattgattcacctcctagtcaaagtagatttgctttaagaaagagaaaccttatcaagtaggctcaaatgataggagatttcttataagggtataaggggtagctagtggagctcaaccaggcactgtggcaattataggaggcttccggaaggtcattaaatggctaatctcctggcttgtctttggctctgaggccacatggtttttcattctgctctgtgcctgcttctctctctgtgtaaattgatttgtacactcactcaactgcttctatgttggcccataatttcttctccaaaacaacagcgtcacctccacaccctagcatatctatgggcttccaattcaagcacccgaccaactcataatgcctccatctttctattccaatttcccaggagagagaatctgattggccatatcggatgaggcctgcatccctactccaatcagctatgtgtggggaagcagggttacatgctcctacttctggagacagcaggatttccagaaagggagtgaggagaaaatgattgctaaaaagaaataattggtggttctaaagctacctcataagaatctagtcactttccattaaaacctaccgagggattaaagtacggtgaggagactagcacaaaattagacatctagtaggtggtagcaaatgtttgttgaatgaatgaatggttaatgaattcttggtttttttgttttttggggaggttggtgatggagtttctctcttgtcgcccaggctgaagtgcagtggtgctatcttggctcactggatcctctgcctcccgagttcaagtgattctcatgcctcagcctcccaagtagctgggattacaggcgcccgccacaatacccagctaatttttgtatttttagtagagacaaggtttcaccatgttggccaggctggtctctagctcctgacctcaggttatctgcctgcctcagcctcccaaagtgttgggattactggcgtgagccaccactcctggccctactaattcttgttttattgaaagctttgaagtgaagcaaatagaatattcattgaagattagataagtaacttcacaaagttaaagattctgtgtatgtaatagcttagcttgtattccataaaatccaaaatataaaagttaaccatcagcaagagtgagattttattttgccatgttttataatgatttaccgctctcttactttaaactgattttatacatatgctttcccagaaagactactgctatgttgttcttataaactcataggtgactccaacgtgttagtgtttttaagaatgttggcgtaatgtctctctaggatggggtcaggaaacactcttgtcccaaaactccctccaagtattatattaactatcttaataaatctttgtgacaaggaaacaggacagttcccatcaataagcctccaagaaagcaatgagtattgctacaaagaagagtagaacaagcgcttaatgaagaatctaaaaacctggagtaagaactaatagttctgtattttaataccaaattatctattgatttcctatatgacctaaacaaacacaaatcttggttctttgtctcctttgtcagtataaacatactcagggtgaagtgggcataatttctatagtggttttctatggaactctgcccaataccacaactacctccttctctggagagtttctcttcccccaactccatccagctggcttctgcaagagattccataaccatgcctccaggcttatgttcttagtctaatactcagcccttagctcacaacggaatcatcaatcccagcaactagatattgggacagggaacctagagagttgggttttctttctggcaggtgagtccaaaagatataaaacttaggagctgccagaagccatgtttctgtcagggaaaggaactcagttgcaagagagagaggtcaagtcaacacagcagatacagaagaaagaggcagaaagagggttctggaaatgctcatttcctgtttaaatagttctttttatcaactctttgtttttttttgagagacaagctgccactctgttgctcaggctggaatgcagtgacatgatcatggtcactgtggcctcagcctcaagcagtcctcccgcctcagtctcaagtagctgggactacaggtgcaccgccatgcctggctaatttttcattttttaatttttttctttttttggtagatacagggtcttactgtgttacccaggatggtctcaaactcctgagctcaagcaatcctcccgctgtggcctcctaaagtgttgagattacagacatgagccatggagtccagccttgcttaagcaattcataatagctcactgcaaccacaaccctcctcaaagcaaggttttaccatcagatagcccgaggtccttctaataaatgcctccttttgcttacattagttcaggtgggtttctgtcacttagaagcaatagaggtctattcttaaagtgaccataagaagccaattgaagactatcttcggtccttcgagtctatgttacactgccataggagaagagatgtgaagttgcccaatcaacacaaggacatgcagctccatacatcagagtgttaccatacttgaagagaacatgccctagaggtggctccctggaccaacaagctgtatttattctagaatatccacacctatttcgcagacaatgagttaagttattcttcttaaggaatgtttgcaaaattagcattatacctgcctactttgatgaatggataaaggactccaaggtaatgcttttcattccctatgtgtccttaggcatataatataatggaaaaaaatgtatgaggaatacttttgactacaaatacaagacaatccaatttccagtggcttaaacaaacaggagcttactcttcctgcaaagtaggaaatctggagatagggcatttggcattgatttggaaactgtatcagcagctctgtggtgctattaacctttcagtgatgcttgtcatctcctaatggcatgatggctgttgaagctctacaacacacctccagtgaaggcagaagagaaggggaagaatcagtaccagacacatcctgttttgtcctcttttatcaataaaacaaagattttcctagaactactctcacccctggccagaatggggtaatttggccactctttgctttaaaaacaggcggaaatcatgggtaacaggcttattatgcttccttcaacccatgcttctcaactagtgtgctatgttgaggaaggcctatgggttacagttattccatgtaaaactgatctgctcatttcttgggatggctggagcctcctggcaggttgtttatggctataagcacactcttctagagctccttagaaggtggcctgagtaagtggcatccaatgacatcccctgtggtctcttcagatgacgagcacagggagaaacatctggtacttgttggccacatgggagcatgtcccacctgggcatgcactggggcagccagcttcagggcctgcagtgatgcgtggggacacgtggcctgtggtgccaccaaagaggtttctatagtgtccaaggaggagactgtaccaaccaaggtgtactcattagaggttggggatcagggaatttaaatgggggttctgggaggccaacctctgattgaccacctctgatttcagccttcacctgtgtcagaaacttttgtccatgtgcaattgatgtgttgttttagtagcatccaatctacctgcaggctgaggacacattctgcaaattagagcttcactgcaattttttaaagtagatacaaggtctcacaaagttgcccaggcaggtctcaaacttgtggcttcaagcaatcttcctacattggcctcccaaagtgctgggattacaggcatgagctagcgtgcccagcctcatcatgatttttaaacacttaacataaaaatttgactggatttgaaacacattatcacatgaaactttatatcacatttgtcaaggaatgttaaacattttaaaaataatttctactactacaaattttcaatggttataaatatggttctaactttttagccactgattttggtgagcaaaagtgcaataattatcaagaatttgaagaagtcataattaaaaatctgtatgagaaattatatttaaccatttcaagcctaaaagctgattaggaagcttttttttaatcagccatcttgagtttctcatttaaatatttagaaaatatttcatgtgaaattttatccaaattcaataattcatatatttcaaaatatttatatttatttttcctgttgtaattagatgatatgaagataatataataggttattttttttctccaaacctcatattgatatctccaaatccccccgtgccaggttagtagagagtactatgcaaatataatcattttctatgtggcaagtcataaaaaaaagtttggaaacactggctgagaccatccgccatccatccgtagaggctgggcatgtgacaatcccaaacacattgaggttcctttggcaaagaagatttagaaatggacggcagcccaacagcatctgccacaatgggttataagcgtccactccactgaattcagggcactgattaattgtgtatgcttttctcttcagctctcatttaaaggtatgtgaagactagacctcctgtataaagcaattaaatagagcttctccttgcatagccccttccaccagggatatgtcttggagaatggcccaattacaattaccttcaaaacaatgttacaaaataaatccattttcaaccaaattctttgccaaccataagccaaatgttctggctaaactgggagagctacgctctttcctgtttctttgccattttccagcctctgagaacagagattgtaagagcaaaacatctcatgcaaaaccatgctacctgcatcatggggacagctgagtcagctttgatcaccttaaattctgtattatttatggtcctcactttttgacctttggtgtaaattgccaagcatttatttagcactgactgtgtgctagaactatcaagggtacaaaggtgatttagacctactgctggcctaggatgcagggaaatgatgtactgaaactggacagacaaaaggccatgaatattggggtcttattctgggaaggtgatttgtctagtagggtagggtgtgagaaagagtgaagaaggaaacaagcaagatggtaaaggtccaaagaacttaaaactctgtattgtagacaacagacaacaggaagccaacagagattttaaggctgggaatagtttaacttttttttccaaactgatctgatatagctgattttggggatgtgtttgattttttgtttttttttaaccaaactgatctgggagtagtgtgaaaaagcaacatgtcatgtcacattataatgttttccagtttgcaaagtgctttcacacatccactttcaggtgttctttagttttcagctaattaatttgggcaggtaccaagaaagatacagctagatgaactgtcactctagtcaggcacatgctttcagagcaacaggtaagagtgtgaactctggcttcaaactacctgcatttggagcttggctttgccgctttctagctgtctgatcctgggcaaggtatttaaactctgtctcatttactaatatgcaaaatggggatattaatagcatctactgcatagaattgctcaaggattaataaaaaaatatatatatataaagcccttaaaatgatgcttagtctatagcaagttcttaaaatgttattacttgtgatattatttttaatctcagagttcatatagatattttagaaatagattacatacatacatattcatgtacatatacacatgcatatacacatacacactagccacatgatttcccccactagaatttagatccgtaggaagagagtaggttgccatactccagtgccagctacagtgaaatggtatagagtagccctcaataaatatttgttgaattaatgaactgtggatgagaccatgctatgcaaacctttttgtcttccttctgggcaatcgcagatggattatggttcctaagcccaccatatccaggtggcatcacatgacatgttatagccaatggagtctgctctggcccctaacacctctgcgagatgccccagactcacatcactcccctgataaggattttgcagaggattcagaggacccacagaaggacaaaggagcaccagatgaaaggtgcctggatccctgagtcactgaatgtaggagggatgcccaagagagctgaccaacatgttggagtttgtagaagcaagaagttaacttccattttgttaatccattaaggtttttgtttcttttgtttttaatagcagttaacctagtttgagtaatgcagaagatagggaaaaacatttactttcatgcttttttctagtataaataagcaataatagcaaagtcagatttaaaactggaaggaagcttcagagagcagctagttcaaatttctccttctaccatgaggaatcagaggcccaatgtggttaaatgactcagtcaaggtcacacaattgaaactggacaccaggcctcctgatttctaggccaatgttttgttttgttttgttttgttttgtctattggccccaggaattaaaagtattattgctttccaaattgagttcataaaaacaaaataagaatattgtcttttaaaataaaacagaaaagggaaagaaaatgacatttaactaaacctcaagtaaattaaaactggctgcagattgatttaattcattgaaataaaaatctcccaatattgtccaaatcacatggcctaatttgtctatttgggtaagcagcctgcctctcaaatcctgggaactttgaaatgggaggcccagttactacaacaatagtctaaatccaagctctgtgcactaagcattaatgatggaatgatggtacttaactccattgcacctggccagttcttgattaaatcaaatagcattaactaataaaagattaaaatatttagattcaaattagagagtttccaaaaacaatctcccaaagccacttagttttattcattttctaaacaattttaaagttcttccaaacagcaaagtagagtgcaaattcattaggaacaataaaaataaaaattggaaatgaacaatacattaaggaacattctttaaatgcacaaatcccacgagtcagtagaaagtataatggacctgaagtcagcacttccaggcctacatgctggttctatcattggctgtttaacctgcaaattaacctctcaaagcctcagttactgcatttgtaaaatcaggaaaacaatacatatctcatgagatgcctatgagacgttacatgaatgccagtgcagtgcttagaaaatgtttgttttgcaacagtgaggaaaagcctgcagattaagaaactcggacttcccccatgttagctacaaaacataatcactgagtatgttgactgtaggaaaatttcaaaaaagtcgacaatttcatggaagtagccagatctgtctttggctaacatggatgctgaaaacccaagctgaagggattcagaaaggatcaggaagaagacacttatctgtactcctgattcctgcaaggctattgtcaatacaccagcatcatttccttacttgttgaatcaccactctgtagaacactctgtcagtcttcacctaaataaatttcccttccatccaagtttttctgctggattatgaccaacttgataacctagtttagtatcctatgagtgccttaaatacagaggatgcttaatgaaaatttattagactgcccgctcagcagctcactgggattgaatatgcatctggcattgaaaagaattgaaattatacaaatgaaggtagctgacatattcatgtaaaaagaaccaccagatatcatccattccttgggctgggagctacttatccctgacacagtggtgattcagaggcagccatgggggtcactgcctgctttttcctaatcatcttcagggcccagaggcaaggggaaggttcagaaaactacagttgacttcaaaacccaaaactcagttaatgagatttatctgaaaaatgaaaacaaactaacaatttagcacaggagaaagaagcctgtctcagagagagatctgaaaaatagcaaagcagagcatttgctaaataatctccagctacaaactagcaagtgtcaggatcacttagatcaaggggagagaaacataaaacccctagcttagtatgtggcagtagttatacaagccgaccaaatatttgatgtcatggctgtaagataagaggataaagcaatgatcagaagaaattaatgtgatggtttaggacccaattctgcacaactgcactggtgcatgcccatgaagctggtcctggtggtcatggaccagcctcactggcatcacctaggagctggttagccatgcagagtctcaggccctgccccagacgtaatgtaccagaatctgcattttaataagaacccaggtcatccatgagcactttcaagtttgatatcctttagagtttctccatcaggtggccttggtttggaaaccttaattatacaaaggacgtagtagaaacaggaccgaagggcctaagaagaccacagatattcactgatgcggtacatgtttcatccactcataaacatactgcttctacagactcgttcttttaacattgctaatttaatataacccaacccccctctgatgccgagccgaagctggactgtactgctgccatctcggctcactgcaacctccctgcctgattctcctgcctcagcctgccgagtgcctgcgattgcaggcgcgcgccgccacgcctgactggttttcgtattttttgggtggagatggggtttcgctgtgttggccgggctggtctccagctcctaaccgcgagtgatccgccagcctcggcctcccgaggtgccgggattgcagacggagtctccttcactcagtgctcaatggtgcccaggctggagtgcattggcgtgatctcggctcgctacaacctccacctcccagccgcctgccttggcctcccaaagtgccgagattgcagcctctgcccggccgccaccccgtctgggaagtgaggagcgtctctgcctggccgcccatcgcctgggacgtgaggagcccctctgcctggctgcccagtctggaaagtgaggagcgtctctgcccggccgccatcccatctaggaagtgaggagcgtctctgcccggccgcccatcgtctgagatgtggggagcgcctctgccctgtcgccccgtccgggatgtgaggagcgtctctgcccggccgccccgtctgagaagtgaggagaccgtctgcccggccagccgccccgtccgggagggaggttggggggtcagccccccgcccggccagccgccccgtccgggaggtgaggggcgcctctgcccggccgcccctactgggaagtgaggagcccctctgcccggccaccaccccgtctgggaggtgtacccaacagctcattgagaacgggccatgatgacaatggcagttttgtggaatagaaaggggggaaaggtggggaaaagattgagaaatcggatggttgccgtgtctgtgtagaaagaggtagacatgggagacttttcattttgttctgtactaagaaaaattcttctgccttgggatcctgttgatctgtgaccttacccccaaccctgtgctctctgaaacatgtgctgtgtccactcagggttaaatggattaagggcggtgcaagatgtgctttgttaaacagacgcttgaaggcagcatgctcgttaagagtcatcaccactccctaatctcaagtacccagggacacaaacactgcggaaggccgcagggtcctctgcctaggaaaaccagagacctttgttcacttgtttatctgctgaccttccctccactattgtcctgtgaccctgccaaatccccctctgcgagaaacacccaagaatgatcaataaaaaaaaataataataaataaataaataaataaaaagaaaaaaaaaatttaatataacccatcaagaagacgaacagcaaagtagccaaggagctttcatagaaaaaactatgtagtaggcagtatctactattagttctaattcagcctttctctgctcctttttgactcctctcttcaacacttgcctcagaccttctttttacccagtaacactgcttggccctaacttatgcctctggtctccatcaggtagaaatattttacatgttgaatgcttactttaaattttctataaagtagcaactcattccattcataaacaaaactcataaatagaaatttcaacagtcaattcacctttcccttgggaaaagaatccaacatttcagcttgcatttgtctaccacttactctaattaaatacacctaagattctaagattgttgtaaaaagtctactttctggtagagattagctagttttctggataatagaaatcagaggaggcttcttttctttcttttttttttttttttagttgatcaattatcatgacagaaaagcttccattaaattcaccggactgctgggggcacctatgggagggatctcagaaatcactgaatttagtgactctccaagtgtggtcctgggaccaacagcagctgcatcacctggaacctgtaagaaatgcaaaattacatgcccttcctcagactctttaaaccagaaactctaggaatgaggcaagcaagctgtgtcttcacaagctccccaggagactcaaatttgaaaactccttcttttaacattgttaatttaatataaccatcaagaagacaaacagcaagggagccaaagagctttcatagaaaaaactagaacatactgcaaatgtttccagctaggatcatggttcccatcctaagagccagcctactcaaaggccagccttaagacattcgattgtttaaagatttaggtagaagtacttgtttcccggagtggctttaattggtaggaaacagtgaaatatttgtttataaaataatgtctcccaagcagacagacactgttttataatcagttagccaactagaaaatatctaaagggatcctggccatttctcagagtagccacaaggggtgttgcttctctcatttgcaggtttaaaagaatgttctgctcctgggtcatttcattttattcttgttaacttacagtttcaggttacaaaacacttaataatcaaatagagtggctcttctacatcctatagtgcattcagctcttttagctaatggatacatttccactccccttccaagtgttcacttataagaagcatttgaactccattttcatatgcaaacagccaaatcaaacaattagaccgtgcccggttctccagaacaagcaggcagcatagacacaggtcgggactatgtgacttttatgttcaggagtccattacaccagctaagggagatacacttaagtaaagtgcactattctttaatagctgtctttatgataaggcaaaaaccaacatcttaatacccacctgcagtctcgttatcaagttaatcaaatgtttaatatcagaatgtatattaaagtcatgttgcttactacaagccaagagccttctttctccctcctagtttgttctgtaggccacacaatgccatgctaggaaaactaccctttaaacctgataaaatattaaagacatgtgtcctgatattgttatgtaagcaaataccaaggaaagtccaaccattaatgaacctgagcaggtcagtctctaaggactgggagaacaatgcagcagtggccatggtgctgctggggagaagagattatgaaggtgtggactaccacaacctcagagcccaaacaccacaatgtgcttcttgaaaagcaattcttcaatgtgattgtctctattactttaactacgttcaagaaaagttgcatctaggtgaatttcacttaagaaaaattaaaatatttgtgcatgaaacattgcaatcataggaaaaggtaaagaacaggtgttcttgcaaggctaagatgctttagctcacttcaaatatctttcaggaaccaaatggctatacataggtatgtgtacacacacatgtgtgcatgcatgcatgcacaaaaatgcatttctccttaatggggagaatccctgaaacaatcactctttcttagtgctctttttctgggagggaaggagggatggaaggaaggaaggaaggaaggaaggagaaggagaaggggaaggggaaggagaaggggaaggggaaggggaaagggaaggggaagggagggaagggggaagggagggaagggagggaagggaggaagggaggaagggaagggagggaagtcagggaagggaggaggggaagggagggaagggagggaagggagggaaggaagggaaggaagcaaagaaagagacttgctaagtcatgctaaattaagcactgaggatgaggggatcaaataacttcatgagatctttgtcacaggtagctactatctgggcccagaggctgaggcagtaaaggaatgtaccaagacagctgtaggtaaagaaagacagatttattaaactatgaaaatacattgcaaggttgcaatgggcagcacagcagagaagggactgtctgcagaggcaggggctggggagaagttttataggatcatgctgaagggggcttgtggggaacaaggtcgttgtgccctaggaagaaggttcttgtgcctgtgggtttgtgattggccatccctcagaacaattgctcattattctttcccacttgtggccctcccacaactggggcccttccacattgctacttatttatcttatcaggactccacaaccttcttcccacagattgccaaagaacttcctccctaatgaaccatttagtcccctggattcatggatcacttctagaagaacaactcccaaatctgtaacttggaacctaattactcttatgacattctgctccaagcccctggagcaccatatctgccctagtccttatatctcagtccccagttcagtgcctgcagcatgctcaataatcatttgccaaagatttgccattaatccaattaatgaatgaatacttggatatgcaaacttgttccttcttctcattccccatctcaggcatgacaagactatgccagtttggtgtttcagagcccctattcatatttcccatgctttcaccccctgttctaattagttagcaaaccctcgcaagtttgcttcataataaaacttaaacctgcctcccctttactgtgtccacttcctttttgtaggctgtcattagctctgagctgaatgactgcaatgccctacctagcctgccctgcttccattcatgtccctgtaactaccaaactgccatcccagtagttatttaaagcacataactcttctgtctctctctctctctctctctctgtctccctccccctccaccccatctatctctctttctctctctttgacatttcacacaaatacacacactcaccacacatgcttgtgtacacacacatacacactcaagcacacacctgcccacacacacaacacactcccacccttagacaccttcagtggctcctgtgtgtctaccaagcaaagcccagattcagtaatttagagcatccagatgtgattctgtggaatcaccataatctacctttttcctccatcttcctccatcatctacagcctcttccccctccattctgccctcaccatcccagtgatgccttttcccatgcaagacctgtatcttctccagggatgactttgctcatacacttccctcttccaggaatccctccactgatcctctaccctgatttctgtctgccaagctcctgcattctccaagcccaggccctctgcctgttctttcacaaagcctttccaaaaattgccaattagagtgttatctatctggctactttcacagtgcttcagctatgtctttatcatagcattatcaaaatatacttcatatcaatatttatgtgtttgtctctctctcccatgaagctatagcatctgtgggatcggtgttgtagcctactcatttctataaccccacatggaacttagaacttagtacagagcttggcactgagaaaaggctcagaaatgtgtttgaatatatgccattaacttccataataatgtcagaaatatacacaatctatctgcctactatatctatctgcctagtatctgtctatcaatgtatcacctttaactatcacctatctggtatgtacgtacacacagttggcccccacataaaatgaaaatataaaaatcctatgtaagggctcttatacccacatgcaagaatattttgcctaacaatgcacaggctatgccttcacttttctcatataactccttcaggcagttcgtatgatagacatgtgaacatgtaacttgcaatctccctgaaaaagcacacgtggattgaaatgcacagtgcagctcttggccatctctcactgactttgccttgggagagccattcatccaggggttcagagagttctccagcccaaaaccacatgtctgtgctccttcaggaggtcacactgggctccccggtttgcattcattctgaatggtaccaccatccctttgattcagtgggtccccttaccccaaatcagtcatttcccgacctcatgcctgatagctttggtgctaacaaattttatcagataagcgtgttaaatggtgctgaatttgggaggggttttctaagtctcctgtaggattagagcctctggtgacctcactgcccccagctgcaggactttctgctgagagcagatcactaacttaccctttttatctgggcattctaatctgcttcccaactaggcaaacacaaacttttgtctacattttcctcggtgtaacaaataaaccattctggacagtaggcaaagctcaaaggtgataaactacagaaacgcaattaaaatgccagaaaactaccttgaaatgttctgagcaaaaatgacatttggcctaaaggaaaaaatagacactgtagagctaaatatgaaattgtaaaattgctaaacataaaaccaaaaatatttattttcatattttccctgactcccagttcaaggtggagaaaattatctttcttccagataatttcctcctgagaggctgtaattggcagccagagaagtcctaatgctttgattggtacaagctgctgaaaagaatgtttaattaaatcatattttatggagataaacaagctggttagctgctatttgcagctcttcaattctcttgtcagtggtattatcagatgaaggagatgtggattcatttcacccctcatgcaagtagaaaaaagccttctcggccttctcaggttttttgtttattggtgcaatgtatttgaagaaaattatatatgtaaaatgcactataatatgtcctagatttgagaagtattagagtaattctagtctttaacttccctacaacaaggctgtaatgttgatcaataataatattactataaaagtcatgttttcagtgccttctctctctttctccctctctctctctaggtagacagatatagataaatagacagataggcatgcatgtgtgtatctgcacatgccagtggtctgaataacagaaggagtccttccaaggccatcctgacctgcagccatgttggtgtaggaactgtctccagggagccaaagtcataagatgacggcagtggaaaagggagagctaaagctggctctccctgacttgatgacttgcttatccctactttgcatctgaaaatccaggttctctctgccacttctggagactaaaacactcccacccacacaccagtcttcctttttcagtttatactcacttatctgaaccaacatgattgaaactattgagccaagctcctggaatcaggctaacatttattcattcattaagtcagttaatgtaagtgaactgagctttaagaaaactcacttaaaagttatagagacaaataagacaaagacacaattattgccttgactcacaatccagcagtaagagtgcacagggaatgttagacaagtggtgtctgagaggtgagcccaggattggaggccgagagcaagggtgacagatggtctggtgggcttcagggaagagtgggtgcttgagcggaggggacgctcatggaggttcccaatgggcacagaggaagtggaatttatgacagaaatgcaacctttgctatcagagtgttaaatgaacactttatagatgatgtcctaacaacaataaaaactttcttaagcgtagcttttaggtttttgtatcttcctgtgacagatgatagtttctaaaagtgactacaacaatacatctcatcccacgtatctttctgctgtgtccccgtaagagaaggagtctataggtccacagccctggaatgtgggcgggccatgtggctgtgttcaccaacagaattcagtggaatcaacattcattgttctgggcatggcctttagctggtctggcttcttccacttcctgcctcttaggagccagccaagccccatgtaaaggtcctgaaggatgagatgccatgtgggaagggaggaaggggatgtggagggagggagacacagagagagagagagagagagagagagatgccaaggagcacagaggtaccagacgtgtaagtggagaagccatcttggaagggagcctctggtccccaaagcctgagctgacgtcacatggatcaaagatgaactgcccagccaagcccttcctgaattcctgacccacaaaatagtgagcaaaataaaatggctggcttaagctactacattttgggatattttgtgcagtgaaacgttcaccaaaacaccaagatcctaagatggatatataatgctaagggaaatagattcttaacatgacttaggatgttagcctgttagcccatacatattaagataaaagagaaatctgagtcccttcgtattcccttctacttggtgtgtgcttgactgtccttctgggactgatcttcttctttcatgtaggtcaaaggtaaacactaatgcaattcataatattccttcctcatgggtgaaagatcttgcgtggaatctgtggatcagtgtgttgtcttctttgtgcccccacctctaaataagaagttatttaagtgttagcttgtcaaataatggaggaaacattttttgttcatttttttaatctccaaaagtattaactccaaaggcatactcctgcacagattaatagacttaggtcttcatccgacgtcaagagcatgattacctgctttgaaggctttcgaagtctcccagagagcaaagtcatgtcccattgtagtgtcttagaggagactaggctagaatcaagtgctatgtgactaagagtccccattctaccaaacactgaggtgtcccccagagctttccaaaaagcagttaactcacccaatacattataaatatattaaggtagactgaatagttcagccttattccttctttccctgccccctccattcccagccccagctgagtccgggattcatgggttctgatttcatcccacttggaaataagcaaatggtgagactgaccagaaaacttgtcatcaggcaggactttcgtgaaatggctaattagccatttcatattttttgttatttcttttgcaattcacgttaaaaatatgctccatggatgccagtctgctaggacgcaaggagcccctgtcactcagcagtaattccatgaaataataaatacctagaccagcagctccagacgcctgcttcagttcatccccaaacgccctgggacatgtggccaggctcccacgccagccaccaagctctgcgggggcagagagcgtcaccaccaccaacaaggggctgtgcccgcccaggggtcttctctgcacaggtttccttcaccatgggtctgtctcctgtttccgaggtcagccaaggactgggtgtgaaaggccgtctttattctgcacggttatcacaggcagcccatctcctgagtgaaatttcaggaatggaagttcctcagggaaagatgccatttcatcctctaagctgcatcagctggagctgggaggcaaccggttacatctgcggaacagcttgggccgggaccgtgtgttctgtcagcttttaggtggggtccactcaggctcgcgccaggatttcagccgggccctccctgctccccgccctggcctagctgagcatctcaggaaagaaacagtaacttccctgcagaggctcacccggcctcatctgtgttaggaaaacagtagggaactatcaaaatatgacagaggaagatgttgttcaggccgccctgggctgtggtcatcctcgctgtgacagcaagccaaatgtggcccgacttacagcggccctcccggtgggagacgatggcggggagaaggcagggaggcacagggcatctggcttccttccccaccccacacaggactaggtcttcatttaggacccaggattttagtccagactaaaactggagatatcagtgaaatcagagaattccataataggattagaatcaccctagatgcatcttcaaccagcgacactcagaagtactcgttctttctagaactttctgtgcacgctggacagagctttggttagacagccctgttttatttcgtaccctccttagtgcatatgtcccagggagggggtcttgagtgcttttgacttcatagcattctagaaaatatccgtctcttgttctagcagccataggtaaatgacaatggcgacgctactgaaaaatcacaactcgtgtgttctaaaatgaccacaaagggtagcacggaggcaagcagttttgtcactccttcaaggccccgtggggtgtgataacgaatacaggcagtcagtgaaatgttctagccatttttcttcttgacctttctaagccataattttgtaatttgaacatctaaaaaataaccatcattttttttttttttttttgagacggagtctggctctgtcgcccaggctggagtgcagtggcaggatctcagctcactgcaagctccgcctcccgggttcacgccattctcctgcctcagcctcccgagtagctgggactacagacgcccgccaccaagcccggctaattttttttttttttttttttttttgtatttttagtagagacggggtttcaccgtgttagccaggatggtctcgatctcctgacctcgtgatccgcccacatcggcctcccaaagtgctgggatcacagacgtgaaccaccgcgcccggcctaaccatcattttttaaagttccgtatttctttcacctatcgtttccaaacgaagaattgaagtattttacaaataggttttttcttagactgtcattgctgcctgcattacaaggtaattgattttagaagtcgattttttcatagcaatatgtggctttctagagatcttcgctttagtcaaggctttccgattgtttggcgcctttttgtggagtgatttgctgtctctactggcagaatgtcttattcccaaacttataagtcatacaggcagaatccatgtattccataatttcttttcctgccactccaaacattggctaaagaaaccaaatttactttaaaactatactgctcagggagaagatgtgaaacactctagtgcagcagaataatgacataatgaaaaatgggttcttgagtgcgtgcatggagtttttaaaactggtctttgctggagagagagaaagcactcttcaccactgtttgtaaattatgatggcatacccaaataaaaacaaacaaaaccaaacaacccccccaaaacagtacaaatggataattatagaaagttgattaaattaattttgatatgtatacattttcttttcaccacaatcaaatcaaatgttctcaagtcttttaaagtggtcatgaagattctgtatttattcatatcaaaatatgctcctgacacattgttaagtgaaaaagtagtttagactgtataatataaatgcatattttgggttgtaaaaggtgtgcatatatccacagaaaaatgtccagacaaaaatatatgtcaaaatgctaacatgtaagcactccgcattcctgagcattgggttgtttgttttattctttatcattttctttatggtatgactttcattttaattcagaatatccattactttgtattaaaagaacaatattttcaattaaaatatttttaatgtggattttttacacatttctaaatgtgttagcttcttctttcattcaaaacaaaaggttctgggatagctagaaagatctctgtcctcacagacacttttacaggggaggagtgtatagaaaaattggtataggtgataaagatatgttcaagatatagagtggcaataaagagtgaatgatcatatatccaggatgttttaaaactctcaacctaaacagttttttggaaatgctagagaaacattttattaattaaaaccacacaaattcagaatttgtaaaaagtctcttgggactgagtggagattacgttttgaatgttagtaaataagaaacatttattaaacaacaagtacactggattccatagtgacttgtttaatttttctaagacatctgactgtgccttctagggaacaagctggatccttcttattccttgtgtaaatccactctgggcagagccaggtacctcatgggtgcataataaaagaagttttaaaattattattattgaatgacataatatacacggcttatatgcaaatgaggctacttacaaatggaagttatcaatagtcagtcaaacccacttggaagtaacactgtgaaaagggctcttctcatacctaaaagtaattcaacttcactctataatattcaggctttcaattattccttccccttttagtctacaagattaacatgttgtataattttagatttaattaataaaattatttaaactggtagtagaatgttagatgagtagtaatcaaatatatttcatctgacaaatcagatgcttttacatattttgcttttttgactgcttactagtttattttagtacattagcatttttcttttcaccacaatcaaatcaaataattctaacatgaaatgtcatttttctgcaatgtactgttatggtataacattcttttcatacatagcattgtaagtagtattgtttgccactgtcattgaattccatccattatattgaggtattgcttttgcaaagacagaacattgggatgtaacacaaaatgagatgttcttcacattttcattgtcagccaacagtggtgatattgaaagagaaagaacaattgtgtgtacacaaatttctctctgaactttttcagttttcaatctataagtgggtatcatacacaaaagtcggtcatacattacatccctgacattgttcatacactacatctgaacaatggcagaacaaaatagtcacctacaactgtcactaattttgaaaaagaaggggggatttacttctctataaaatattctttaaattcattgtgaataatagaaaaggaaaacatgtaatattccaaagcagaggctttctgcatccccaattcctctccctttcttctactgccctgcccacttgtgttgccttcacacacacacacacacacacacacgcacacacacttcatgtgcatgaagatattcacagcacttagctccctctaaaaatgggctggaattctatagttgaaaaatctagattcagacctctgactccagtacatggggcttttccatgcaataggtgaagtcagacgtttgtcatttgagacacagaaccctgacttgttacttcatgacacagccggtggtttaactactcccatcttgattccagatttaaacacatagttgaaaagaaatgtagcccttcctgaattggagaatcataaatgggaaaaggggaaccaaagttcccttttaaacctgcatctttgcttttgttgttaactaataaagtctgtagttgatagctaagcactgaatgaaaattaattgttaaattctgagaattgaaccttcttgtattttaattttgttcaaacgtatttttttctttttcttttttttgtaaaaaaaagaaaaagcacaaactttcttctgcctgcaacatttcagtagggtaaaacatcctttctttgtatttgaattcacttttttgatgcaagaagaaagggaaagatcttgatgcaggaaaatggcattggctcacagatgctatctgccatgcttttgtgcagcttactttataacatacatggggcaggatttctagactctacctttcctcacctaataattcaccctttcagtccctgtgcacatatttatcaaggttgggaactttttttccgattatttaaaagtcgtcattgcagttacttcctctgaaacagaccacctctttcattaggaatatttatgggaaataatatatttgtacagttgaaagtatcacctgttttgctaagtcagttcttgtctgaactcaaatatgctgttagagggtttactcaacaacactcactaatggaaagcactaatcaaaacttttctacagcagtaaatttttatattctttaaccactggattccaattaaatgtattcaatatagcaagctttgattaaacaaatttttaaaaagagattatgtatacagccctgtggaaaacaaggcaggttaggtatgcaggcacttgtatattcttaatagaagtctttacctgaaggtaaaacccaataaagtgtaccctataatgtgctagagaccctatgttgatttacctgtgttacatcgtcagcagaaatcaactttaccaggtacacaccatgcttatatatttaatgcatataaaaatgcatataaaagatccttttttctttatataaagaattactgaatttcattaggccacatttttctctaaaaaagttctttgttaaccatgggataactgattgcaaataaaggaagttacggcactgtgccgatgtttataaagggagggaaaatccttaatgtgagcctacaatttcgatgaaaaagaaaaaccatcataaatacaagagctggccttactctaacatacattagcaagatctttcaaaggatctccctgctttcactgacatataagtattttcctaaatgactcaaaaaaaagacgttaggatacttaattgaagtctataaggagaggtctgggaataggaggatgaaaatcatttggtttttgttttgaaaaaacaaaaaaaaaatccatttttcctcatctgaggatatttaaacacaacatctctatacattttccataaaaatatcacagacctttcatatgtcagattcccctcccccactataagtttcaggattagttgcagccttagaaaaatatttaattctctttgctctgtgacttggcttaatgaatctaggttgagtttctttaggaaatataagaagcctcttgacaactgagaagcctcccagacactcatttctgtcagagttttccaaaaccacacgaataagctgtggccagggaggtgcctacatccgacaagaaaagaagaacacgggcttccttccctgacctctgctatgtttgagtgagaaatgtgtttattgctcagtctcactgagtgtttaactgttccagttgtgcaaattatgagcactttcagtgaaaattatgagcgcagaagcctttctttattatttccaactgtctgatctgttttgtccttgttcaccaccacctttgagaattgcaaaaaaaaaaaaaaaaactatgccagttatttttgtaatactaccattgcattaaaacctttaaccataaagtcctctagtgatttttctttccctcaaaatttgtattgcttttaaaaagcattgcattaagattctgaacgtttaacggagagaagggtgacattagtacacatcctttttaaactcctgattgaaacaaaacaaaaactacgcaaaagacctgcttctttgccttgggccctgactttttagggggcagggtcttctgcgaggggcggttaagtggcagggaagcgcagatcccgctgcacgccgcagcagcccgggtgtggagcgcgcagagggggcacctcggctgagtttcgggcacgctgcgcacccacgggaggatttcagggaggcggtggccaagtcggggagcgcatgccggggccgtactccctcctgggacagcgagccttccgaaagtccgagccccaagaaaagttgaccctgggtctgagagtaagagggaggagccgagagcatggactagagaggcacggagcctcccgggccctgaggctgccgcctccctccgcagcagccacctcctcccgccctttacaaagacaagctccttgctcccaggagtcggcctgcccatccctgaaatgtgcacgtgaaggaggtagccttggtagccagggaaggtgcggtgcccgtgccggggccgcggggcgtgcgggagtcctgggcgtcgccgcacctgccggtctcctctgggagtcctgggccgaatcctcagttcgggcgccctctggcgccgccgtggggaaatcatccggcgccaggcgccatgccgcacaacactgtggagcagccctgccggcggggtgggtgcctcctatctaaggcactggaccaggggctctgccagcaaacatggttcttccatcagcgtgtcggggttgcagaacctcagggcatggtttccctcggcaaggtgttagacgccaattatcttcccccgacagacttctgtgagacttcaaagggaagagaaaggaggatcccaagacttccaactccctcttcctccctccctacacacgcgcgcacgcgtaaacacacccacatgcacacaaacacacacaccctattctttacctatccacaggatctctaacattattcttaaccccatgtgatggcttttttgatatgtcaacttgactaagctaaagttcccattgattcaccagacactaatctagctgttactgtgaaagggtttgatgatgtcattcaagtcattaatcagttcacttttaagtaagggaggttatactggataacttgggtgggcctggcctaatcagtcggaagccctcaaagcacagccaagactccccagagagagacagagaccgagacagagaggaggtcacatccatgaacaacagcgcagccatgcccagagctccattctgctttttagcttcccctcctgactccctgtcctgtggactttggatgtgcttaggcagctcccacaacaccataagccaatttttttttttttttttttttttttttttttttgagatggagtcttgctctgtcacccaggctggagtgcaatggcacgatcttggctcactgcaagctccgcctcccaggttcacgccattctcctgcctcagcctcccgagtagctgggactacaggcgcctgccaccacgcccggctattttttttgtatttttagtagagacggggtttcaccgtgttagccaggatggtctcgatctcctgacctcatgatccacccccctcggcctcccaaagtgctggcattacaggcgtgagccaccgcgcccggccagcataagccaattcctagtaagacatctctgaatggatatattggttctgtgtctgaggttgaacactagctggtacaacccacacaatccaaatcagaaaaagtatgaaggaaattcagagtgccagaagatgccacctcatccctcctatctgtcagtcagtattctctgaatgtctagcagtggcaggcacaagacactgtactctggagatacctccaaggacagagcacactgggtttcttcttcgatttgggcttcagtgcctgctgctaagttagatgggtgaataagagaggcagtggctataaaggttagtgaagctctctctctctctctctctccctctgacacacacacacacccctccatgtgacaactttggagtttttaaacctagaccagaaaccagctttaattaatggtttgttgtgggtacttgtggcatgcttggagctacacaaaaatacagtaggaggaggacgcctgtgaggagaagcagacagcagtctttgccttgcgggccctctatctatcaccactaaaggtaaaatgctgtttatccattgccaaacctcctgagtcatccacccccacagtgcattttctttgcacttactgtttctatgcatggcaaaggggtgacacactgataatggatcagagcagtaaaatgttggcaaagactcaacaggctgggaagaggaagcctcctctctagattgatccagggctactggtcctagaccaaattggaatgtccaataaagaccgcattccttctctaacatctaccccttccctgagcatcaaggcctgttccaggatggcagtaaccctgtgtaattcaatccaacaaatgtttaatgaacacctaccatgctacaagtccaccctctacaatctggtgtcctgaaatggcttttgtaattatcattggcctgcaaatggcttgctatattaagtggataactttcatggatattctgttggcttctccatgaatttttacctcttgggctattttctcctggagattcacaccgtcccttgggctcagtcacaactctgtctggattttatctcctgtttgtcttgtttgtttcttttcagccctctttagaaggatttccttctcacccccactcctccagattttaaagtaggtgtgttcaaggctctgtattggccaccttcctgaccctattcctatctattctccctcctcgagagatgaacagacctctgctgacctccaagtccttatctctagcgtggacctctctcctgaatccattattctctctgtgtggacacttgggcataccataagaaccacgaatgtaacactttgttaaggaacctcatcgtcttctttctcttgcctctaacctcttaatcatctggaaaacacgagctgaattaacaatgccagaaactgcattctcccaagagctcatgacagaaatttcagaggcattccagatttcctcttgcttagctctcacatccaactagaacccaagatgtaagggttctctgaagagtacctctagtccctgctcctccctctgatccccacatgggtttaggccttcacaaatcttttcttggggcaaatggtcttctgttgatctctctgcctccatatcgctattctctctcattcatcttcctaaaatgcaaatccccccgtgatatctccctactttaaaagaaatgtcaatgacaaaaattccttaagactgaatagtattccattatatatgtacaccatattttctgtcatttgcaacagcatggatgaacctggaggacattatgctaagtgaaataagccaggtgcaaaaacacaaatactgcaaaatctcacttatacgtacaatctaaaaatgttgaactcacaaaagtagaaagtagaacggtggttgtcagagactgggtgtgggggtggagaaggaaggggaagatgatagtcaaaaggtacaaagtccagttagacaggagaaataagctctggtgatctattgcacagcatggtgactatagctcacaataatgtattgcacatttcaaaattgctaaaaaattgaagtagattttaaatgttcttgccacaaagaaaacataaatatgtggagtgacatcctgatttaatcatttcatgatatatacatgtatcatagcatcacattataccccattgtacgaatatatacaattcgtctttgtcaattaaaactaaagacattttttaaagtgtcagtggtttcttgaaagctttctttgactctctccactgcttcccacactctttctgggctagctggcaggtggatttatctttgttcctttcatatcctaagttaatccctaccattgctcttggcacaatgtagcattttcttatttaataagatatttcaaacatacgtaaatataacaaaataacaaatactcacatacctaccacccaaactgaacaaaattttatggtattaatttcagtacatctttttttttctaagatagggtcttgctctgttgcccaggctggagtgcagtggtgtgatcatggctcacttcagcctcaacctccctggctcaaacaatcctctcacctcagcctctcaagtagctgggactgcaggtgcttgccaccatacttggctaatttttattttttctttttttgtagagatgaggtctcactatattgcccaggctggtctcaaactcctgggctcaagcaatcctcctgtctctgcctcccaaagtgctcagtacatctttttaaaagaaattctccatgataaaaataggtgagatccctatgtgatccatctttcattgaaggtactgctgcccaaatgtgtagctgattttcttgcctaagctcttgcacttggccaccagctcctcaagaaaactttctctcttgctcatcactgaatgccagaacttgccagattacttggcacacaaaaggactgagtaaacatttgttgaaaaactgcatgagtgaataaattcacagtcattcactgttcctaagaaccattcttcaccacattagaatgcaatatatgagtttattgagtattaactcacacgatcacaaggtcccacaataggctgtctgcaggctgaagagcaaggagagccagtctgagtcccaacgctgaagaacttgaagtccgatgttcaagggcaggaagcatccaccacaggagaaagacgtaggctgggagaataggccaatctctcttttcacatttttctgcctgcttatattctagctgtgctggcagctgattagattgtgcccacccagattaagggtgggtctgcctttcccagcccactgactcaaatgtcaatcttctttggcaacagcttcacagacacacccaggatcaatactttgtatccttcaatccagtcaagttgacactcagtattaaccatcacaggcacgctagttatgttcgccatcttgatttcacaccacaacctcagtatttttattatttctattttacagatgaagaaagtaacaatcatagcaatcaggtaacttgcccgaagttgtcaaatagctcattattggtagaggaaggattcaaaaagatcttttctaattttttttctgctgagtcagtctccttaatctaccttgactgcccctggagaggcacaactgccttcctcacccagcattctgagaactttggctgtgaagacaaatagcccctgggccctgcttttcctaaagccccaccggttcccaccgtgaccatgatcccgtgccctaactagactgtctctcttacaaagcccaggatgatgagaatttcaaatactcttgaagaaagtggctgaagcctgaccttcctagtgctaagacctgaggctttagctgtcaaccctgcttctgtttggggtcatttgctgacacttgccattaactccttcctgtacggctgccagagactcagaaaggtggaatcactcttgcctgtgcccaccacaccctctttggccatagaaattactcctccccaatcctccttagcttctgttcctccctgccttctcacaccagatagctttttccctgaatgtctttcttcttttactggatcaacacagtaccattacaccaaaaatatggaagacttaacaaccaaagttatactactgctttttatagggtgaataatttaattccatgttaattaaaaaatatatgtatatacctttatatagccatgcttagaacaaacactggaagcacatacatcaaatttagcagtggttatccagaggtggtaacagcatgtgtgatttatctcattttaggctttcatgtgttttacactgctgcctcttttatctccttctgctcttttaaagcaagcaaaggaggaaaatacacatcgatatttactctgagtactgatttctgtatgggtataattcacacactttcaacaatattgtttgagcaacaggattctactgtgggagaagccaaatgcatcattttagaatcacagaacactatggtttgaagagatcttggagatcacctaatccagggatgctgccatgtcaaaaaaaactcaaacttgaaatatgcggcactgtctcagtggttaggtaatggacagggaggagattaatgtcaaattttgcaaaaatcgtaatccatactatgcagtctgtggcctgccataatatagcaaaccatggtgtaggaggtcgcaggagtagtgagcctactgcttcagggaaaagaagttgccatggactatgtgtggcaagatgttaggagaagcagataagctcgagacagaaatggctgttttgcaagtagaaaacaaagaaaatacattccagaaattcaagacctgatcaaaattggtcaatggaccacttcttgattcctaatagtactgagaaaacatttgagcaataaagacacaaataaacccaggacaaaaatcagacggatggtgtggtgtccaagaaaacctttctgttgggttgaaagactcatgttaaaatcctccgaaagggatagttttcccaccaagcagacagcactgttaacttgagacattgagagtcttggaggtaagaaagcaaggaaataaagattaggtcatttctctaaaagaacagtggagggtcattttgctgatgcatagaattgactggaagcagatagatgagaaaactgctcttggtttgaaagagactatttgagacttaaaatgaccttgggccctaatattctgcaagcaggagatgatctgagaaagccacacagctctctagaagggcacattccctcacactcactttatatttgaccaaatggaataataaaaaggaagaaacttctagaggttggaaacaaagaccatggaaaaccctggaccttggtgttgaccagagactgctgtgtgtcccacaatcttctctttgccaaaagggagcatgtttttttcctgcaccaccattgtatgctgggtgtatatggggaggaaagataacatcattttagcgcacaggtctcaggaccacagtaagcctcatcgtgtcctgatggactcatcacctagacatcctggacttcgagctagatgaaataaccagacggaactttagatcattaccctggagaggtattagttgtctcatgtgtgttcaagggtagactatggcagagacattttctactcatcaaatattcatttaatccttcattttgcaagctcccttgcaatgtctcaagatctcatggcgaatcttggccaatgggcagtgatcagaaatagtgttatgttgcttctgggccaaagtacttagaagctggagtgtgaatggccaactctctcttcccctgctgtgatgataccaggaagccactcatattgatgacaccatcataatatctaagctgtccccattgttgacttgccacatggagaagagatacactagaaagtgacccagcctgccatggagttagtgtgaataaaagcttttgtcatattaagccactgcggttttgcatgcatttgttaccgcagcctcgtctcgcctagcctgcctaatacactggctgtaatttctggtgtgtcattctgttatctatgtgactgtgaggcccaccgagctgtggctgaccattttcttaatatcaccagagagactgatccagcaatgttctccccctagaatgccactcagaaaaccactgagcgggcaatagaaatgaattttcattacaactggggacccaacacataaatattagcaggggagacctcttttattcatttcttcaacaatctttattgagcttctacaatgtaccaaacatttccaggtgctggacatccagtgcccaagagtgacaaggccctgggtctcatggagctgacattctagctaggataaccacagaaacaaaaagaacacgtaagataatttcaacaagcaagtaagtgttactaaggaaacaaggtggtacagagtgagggcagtgagagaagatgtccaggaaaagctgacagttaagcggagaccctattaatagaaaccagtgatgcaaagatctggaggtggggcttctagacagagagaacagaagttgcaaagccctgaggtggacaagttcgaactgggtgggtttgacttttcaatttgacaaaaatctgaattggctgaaatgccgtacatggagaataaagagaacaaagagacctagagggggatcatttcaagtcttttgagccatcacaaggtggttggattttattttaagggcaatgggaagccattagatgattttaaggagagaagttacaagatttaattggggactgattagcaggaagttgtggcagtagcccaggtgaggaaaatggggcttgaagcggtgattgatcatggctatattttggagaaacagcacttgcagatggtttggatgttgcaagtgagaacaagagagaaagacattgagactgacttccaggttttcagcttgagtaacagatagtagtggtaccatttacagagatggcaaggcttggagaagcctgtgctggggcattggagcgggtacagtatcaagaattctaagtttgcaatgcctggtagacactcacatgcctataggagggaagcaggtggagtttcagggcaagattaggcctagagatataaatttggggcccatcagtttataaacgttatttaaagccacagaactgaatgagatcacttaggaagagagtgtaaatacagaagaggtcccaagactggggtgttggatccaacatcgatccagagggcagggagaggaggagctgctcttccagaatagtgagaccttttccactccagagggctgtttgctttttaaaagatgtcctaagacatatagatttttccacatatcttagtaataaatgttacagcagtgtctcctgtgagttctaagtcacatgtgtcacttcgggaaggcagctgtggcaaagtagaaaatgcatgcagccgagggtcagaaaaccctggatgctttcaaccactttgctgctcgctggtgacgtgacaggagtgagtcaccgcccggctgggcctcactttcctcccctgcagcttggaagtaacgatgcctccttattgggttgccattggcattcatggaggcaatggatgtgaaggggtttgtctactcctgccacactgcctgtttaatagccactagccactggcagcctcttaaattacaatgaagtccaattaaatattcagttctttgagactaagaagacatgatgatcacatgcaatgtggggtcctggattggatcctggaacaggaaaaaaatgacagtagtggaaaaactgatgacacctgaataaattttgtgggttagttaatagcattgtgccaaggttcatgtcttcatttgagtgggttctgtaagaggttcacatcaggaaaagccgggtgaagggtgcacagggctttctgcacttgtacaatacaaagttgaagaaaattcggttcctcagtcacactcgtcacatttaggtgcccgttggccacatggatggtgctaagatggactattcccactgtgacagaaagctctatgggacagtgttgcctgcaatataaaaccaatgtctggtttcactagataaagcactgaccactacagcatgcctcaaactgacttctgtgggacaaattcagtggttcccattaaaggctaaaagtcatgtctagaaataaaactccagtcttctctcctatgcccaaactagtcatgttattttagactagattctacctctctttggcttctgctttcttttccaaaatgtgacaggattaaaccaaagggtctcgcaaggactgtttacatctaacattgcctagatctgaaataaataacactaggaggaagtggctcattatctcagtagcccacggggaggtgttctagtggcaaactaagtgtgcttgggttgggagggaaccagccgttccccacactgctggatctgcctggttccagcccattcagcctcaatactgatgctgatgatacagaaaggacccaaagactcactctccttgtcagcgacaggctgcacacacagggcttgaatgaaaagacaacagaggagaataaataggaagcagttttttaaaatattagaagcatgctattttatgctaattttttttgttcacgactctcagttttaaaaagtgaaataactcaggtcagactacatagggatttagaaaacactattgaccagggaagttatgactattgatttttctcctcttcatccccagtgagcagtcagtaatcataacccgctgttctaacagagcactttctatccaagacatttaagatgaagcacgaacattaacccatttatttccaccatgttcattgatgttaaaatatgttcttttcctatctgctatttacagggaggaaactaaagaaaatgtcattgtagagggaaagataattacgtgcctgaatagaatttgcctcagtggaaagttcctttcccactagatcaacttggggaatatagagcagaattaattttttagtttttcatcaggtcatagttattaagtatatcttgatcactctttacttactttttttttttttttttttttttgagatggagttttgctcttgttgcccaggctgaagtgcaatggcgccatctcagctcactgtaacctccgcctcccaggttcaagagattctcctgccttagcctcccgaatagctgggattataggtgcctaccaccacacctggctaatttttgtatttttagtagagacagtatttcaccgtgttggccaggctagtctcaaactcctgacctcaggtgatccacccactttggcctcccaaagtgctgggattacaggcgtcagccactgcgcccggtctattgatttacttcttttccttgttcttcataaagtatacatcagttcggatccttggttaaaagctaaagaaacattttctggccaacttaagccaaatgcattctcataccacagatctgctaggaggcttccactgagatctgttttccttgaaggaaatgagagtgcagatagaaaagggcaggcagaaatgaggacatgcccaccacaaagttcaacccacctacactttgatttcttatttatattcattttatatattaatcatcaactgaatgcataagtgtggaacttttattatttaaattcccagcatactttctctctgtgtttgcataagtatcagaaagggtatatgtagtgactgatattcaccattgccttgagttaatcagcaaataaagatcctgttaaaagtccttcatctctcaacactataaataggacaaattagatacatgaacaaaggagtagatgccagggtaaggtatcatttaccaaggcttactcaatattggtttgatgtgttagtaagtcttataatagaaattattgttcaagtaaccaactatttgctggaacaaatgtgtaaaaagaggtcctttctaccaataatctaatgattctaatcatggaagacataccattgctagcagaaagaccacaagaaaattccattgttcttctcaattgcacgcttgcagcctatgtatatccggaaactaagctcttgactgtaatttaatagctgatgcttgtaaactggatcttgtaaaaacccttaggggtataaaggaattccttctgttctatccaagtttggaagaaggcagtattatttctctttgttacaatatttgagtttattttaacagcatgttagagcaatcataaataacagtggcttcataactttctccatctccaccattgttacaatcctttccaccaccgcttagaaatgattccttgcatttcttaaaagctaaactaccatggaactgcatgttattttatgtctcttgagattaacagtgtcttcctaagaaaaatgcaaacattcatcgcattccagaggaaagacagaacttggccagtgagattccgagccgtcactgagcattactgtatacttctgagggagagggtgctgatgttcatcttccacacccttttctacaggcctatcatccagaaaagacccagggagccatcatcactgtgaattccctctcccaggagataacaggactgttaatgatattgttagtcggctcaatgttctaatcacgtggagaccatgtcagggatgtggcttaagtatgctaagcagaggcagccccctcctctgtatggaaatctcttctgcatccatttaaaaggcaagcctttgggtttgagaatttcaaaattacccagtatttttgacattgaaatttctggagggctaacactgtaagtctatcagagagccccttggcaaggattgctaatggctaacccatgcgggttgtgccccaggaacccaacaaagtctaaggaggcaccctgaagagcagagtctgtgccacggtgaacctgctctcaggtcaggtcaacctaacagccctaagtgagggtcacagtcaagagaaggcaggggcagagctggcagtcaggcataaagggtgagatgagaacagtctggggaaaagtagatgactaataagtaaaggtcaagacagaatcagctggaaggtcccccacagctcctgtttgctgggcacctttacatgggatacaaggactcctcatagcttacaggagcagagcctgtcctgaccaggcatagagaactcatctaatgaaggaagaaggagagactgatagagagtgctaacatgaaccccatatctgaagaaggcattcctctccacctgctcctctaccaagcacatcgctgcctccaagcctttgaaatcgctcttccttcagccctgaacactgtcgtcccaggatccacaaggctcccgactgccctcattcaggtctctgccccatgttaccttagcaagaggccttccttgactaccctatctaaaatagtaccttcaatatgctcttcctctcatcctacttaatttttctctgtaggtctaccccaatttatagattaaatatttatttgcaaatataaaactcaatcccccttaagcaggaacttaggctgttttgtttatcacagtgcccctaccactgagcacatttcctagtaggtgcttaagaaatcttttgtaaaatgaattaactgagacattgtccctgaatctccacgtgggttgaatttacattgtgcaattctcttgcgtttgggatgtaatttcatgctctttccttgttatgtagagtaattagatatgccatgcagtccccatctctctgctttgcccatactcccttctgtgatttttctcccccacgcctcacttccagagctggccaacaataagatatctttgtgtcatgttttcatgcatccatttaacaaacatttattggacactcactgtgtgctaggcatgatgttaggtgctggggatttaacggcaaagcaagaaaataaaatcaatctctgccaccaggaaagttactgcctagtgaaggggccaggaactaaattttaatgctcacaaacagatgtaaaattgccatgtaatggggctgccaggaaaggtgcatgtgctctgagtacctttcactgggggatgagctgctcaaagagatcagggaagacttccacgaggacgtgatttgccctttccatggggttggggagttgatgggggtcaggatggctgcaaaaggaggtaagggagatcacacagggcctcaacagctgtgctgatgactttagccattatcccgagagccgaagagcaaggggaatccactggagggtcgcaatgggtgtgcggagcaggaagagacagcgtgagagaaaagcacgaacacacaggtggaaattcaggcagttaccatgcatacactgggataggtttttgtaaaagatacgaagataaatggtctgtgtcctcaaagatcttaatccaaaacaccaatttgctagataaaggacaacttacatggtatgaatataaatgatttctggtcaaagtctccaaaagaataaagcttattcacgtaatagctctgttgagttctttctgaccaagatcaggagaccaaactgaatgatccggaaccaaactgttgaaccctgctacagtcgtgggctgaatgatgacgtctcagtcgacgacaaaccatgtaagatgacaaaggagctggtgaccatgatcctgaccctgggtgggcctaggctcatgtgtgcatttgttcgttgttaacaaaaaagtttaaaaagtttaaaaaaaactaatagagaaaagcctatagcacgaggatataaagaaaatatttttgtacagctgtacagtacgtttgtgttctaagctatgtattataacaaaagagtcaaaaagtttaaaaagttaagtttataatgtagaaaagttataataactaaatcattaaagacaatttttaaataaattgaatgtagcctaagtgtacagtgtttataaagtctgtgctagtgtatagcaatgttctgggccctcacattcactcaccactcactcactgagtaacctagggcacttccaggcttctgcaaacccattcatgaaaagtgccttatacacgtgtaccagtttttgtcttttgtacagtttttttaactgtactttttctatattaagctatgtttagatacacaaatatttcccattgtgttacaatcacctacagtattcagtacagtaccatgcagtacaggtatgtagcctaggagcaataggctatatataccctacagcctaggtgtgtagcagactacatcatctaggtttgtgtaagtacattctacggtgttcaaacaatggcaatcacctgattcatttctgagaacatagccccaacgttaagcaatacatgactgcattcccacttgataaagaaacatttccttcaaagattaaaatttaagttttctgtaattcttatattgacaatggggaagactcatctgccttttgcctcttacaggtgtcggccctgtctcatgaggtttatgtatgaaaggctctgtgttcggttgatctagagaaactcactggcccagtgcatagctagtattaactgtaatcaatgaaaccatcagctttactacagaagcataaggaaatttagtgctttctgtgtgagggatatcacccctctctgaaatagcttaggaaaataaaaagtgttattatacatcagattcatgtaatgtgtattcatttatttgactttaaagctacttaaaggataaaagcacccatccttaagtttcctccagcatgggtggaacactactaaataaatctgaaagagacaataggcatggaagaaaaagaggcagaattaagaagcgaatagggaaagggattgtggtgcactgatagcatctaaaaacgggttccttgatgagctttcagaagggcccattgtccgtgtgcctatagttttatttttccaggaaaaatcaaatgggctgagtgtggagttgtgaaagagtgaagaaaggggagatgaaaataccctccccaggaaatgtctctctgcccctgaaatcctttattcaaactgaaaatacagacagcatgaaaaccagaatccccgccatccccacagtgtggtttgtgttttcggtgatgtttgattgcattttagttagcatttaatattttcttaatctgggctgccttttatctgacaccctggaactttccctgtactttgttatttccttcccctgctaatgatgtctctggaacagaagtgcactcttgaaatggattctcttcattaacacagggaacactgtgtttgatttatctgcacaacccctgggatgtcttttgtgcttagaggtcaaagaaattcttcatctctttctaaaccattaattttatcattatggaaatagcttccataattgataaaacattgtcaactgagtttgacagactattaaaacacttctgaagatttgtaatctcaagcttctgcctcttgggacttacttaaaacatacacacccatatttatattctctcttaaatgtcaatgggaaaaatcttcttgataaggtggttatgatgcacacagacagtgattaagaatcatttccctctggccctggccaagttgtgttactgttaataaaataggataagccattcatcttttctcactagctgagaaagttgaagctttgccataaataggaagaggaccaccctgtaaaagggatagtttgttgtgaagtctggaactctttttttttttttttttttttttttttgacagagtctcgctgtgtcacccaggctggagtgcagtggtgtgatctcagctcactgcaacctccatctcctgggttcaagtgattcttgtgcctcaacctcctgaatagctagaactacaggtgtgcaccaccatgcccagctaatttttgtgcttttagtagagacagtgtttcaccatgttggccaggctggtcttgaactactggcctcaagtgatcctcccacctcagcctcccgaagtgctgggattgcaggcgtgagccactgcacccagcctgagccaccacactggcctggagcatctgtttttttaattaaactttttaattttgaggtaattgtagattcacatgcagttgtaagaaataattgagaccccatgtgacctgtacccagttacctccaatggtagtatcttagaaaagctataggaaaatcactcagccagattattgacatcgatatactacatcaatcttactcagatttctcattttatttgtactcatttgtgcatgtgtgtgtattgagtaagcttcaagcaattttatcatgtgtgtagacttgtatatgacccctacagtcaagatacagaacagttccaataccacaggaatcccttgtgttggccttatattactacacttacttccctcctcttctcctcccgatggggcatcaatttttctttgagcttttctgaactcttatgcataataaagagaaattgaattatgaaaattatttgccctccatgaagcatttgaggttttagaaaaggaggcctcattgtgttggatgcagtcagagcttctttcctgaacatagacttgattcaatccccattcacctccctggctgggcacctttgtgaagatcatagcctgctgtggctttgcattcaaggcaacaacagtgataagagccatcgcatgttagtaagctttgtcttttggaaaaattcagttgacaatattccactgaaataataatgaatttccagataaataaagatattgcttccaacctcagaggtttcttgggaatttacaagtaatagcatctaagatgcatgattagcttctaattgagactaagatggtatcattctctggaataaccgatttacacttaatacagaccgtgagaatttcgaaaattcttctttttttaaagtaacaaatcagctccagtttctaccctttattgcaagctgagagttaaaaaaaaaaaaagaaaaaaaaaaaacagaaagaaagaaacctcccaggctgacactccccatctgctactctaggcatttttgcccatctgatataaaatgccagcaaggaagtcctcaaagccagcccaatggctccataaaatatagtcttcttgtcacccttagtgtttaaatcatttgttgtcaaactgggtggctttcagagttgacatttactgctgtttgctgcaaaagagattacagcctcaaggaaagggccagaactgtcattagcactgccaactatgagaacaaagaccctggttaattttttttgactgttgctgtcctgtagttctcaagtgatggattttcaacaagagacactcatgaagtgtttactcagtggtcccaatagtctcatgtatatacagacactcaggcccacacaaacaaagaaattttaaaagatcctttactttccctctcctaacccccatctctcactctctttcacttcttcctctttccaaagtctctaggttagctccaatatggatatgcccttcatgcatgaggaattcataccagtagtcagaatgaatttaaagaagctttcaaagatttaattcaacaaagatgtatcaagtgttatttatgtttatgacgctatgacaattgctccagaggacaccaaaatgagtctcttccctcaagaaaaagaaaactaatatttatcaagcattcctatgaaaccgagcatttcctatttgtcacttcctgctattctcaaggcaactctgtgaaataggtactacgatttccacatcaggaaacagaagcccagtcaggttaaggggtttgcccaagctcacacagctagtaagaggtaaagccgacagttaccccaggtatatctgactcaagtccatgatttttctataccacatccttgagggagctcacaaagaagggatatagagttatggaaatatagaaatgcaagtatatataaaactgtaatacaaagtagattataggaaattgtgtaagaaatgttgaatcaagggattataaagaaatccaacatatgattgatatggtagatgctatgataatcccctttcagtaagtgcccatcccagctgctgggagtgcttggggcatatgacttttagctgtcagccccttcagggaatgtcccatctgcagagagccaccttgtccaaggtcatgccccttcttgagaagcccacagccctgactgattgatacagaagtaaaaggcttgatgacctaggctcactcgggacacttcttaaggaccactccagctcccgatctccccatgtgtcatctgcatctgtggttcattgtagctcctgctttcttcttctctcttccacaggtgttgagccaagggcattcctgagtgtgaaactttagctcagagattgcttccgtgagaactcaactcatgagagttgggtagaaaattattcacagtaaaggtgctgcataaagtaggccttgggtacaaagtaggatttcaacacaacagccaggtagttattttcagaaaagcagtttctactgttctgtggaaggtcttgaagactagatgagtctgtacacagtggagaaatcaagatccactgaaggctttaagcagaggcatcacatgaagcaggctgtgccttggaaaaatggtgtggtcatactattaggctgaataatgaggatggaagcaaaagtccaggaggccatggaggagacagtggtccagataatttccatcatcagagcgttaggctttcaggcagaaaacaggtttgaatcctggctctgccacttcctctgagagattttgggaagtcacttaattcctccaaatctcactttctttctctgccaactaaaataatatttatagtgtgcaatgtgtgggagtttgcaaagcattaacacacatacacacacacactcacacacacacacacgcacacacacgcacatataaatccctaaacaaacataagttctagttgtggagataaagaggggtgacctagagcagtggttggcaaattcagttagcctggggtttttttttgtaaataaaattttactggaacataaccatatccattcatttagatttcatccgtggctactttcaagctacaatggcagagatgagtggttgcaatcaagaccatatggacccacaaaacccaaaatatctgcgatctggccctttccataaagagtttgccacctcctgatcctgagtatcataacagaagtaaaaagaggtgactgatataaaggatagaacaggggtaaaatctataagacccagcaacgctcgggattagggaaacagaatgacatgaaaaagaacaaataactctgggatttccactggggtcctcgtgagagtggtattgtcttaaccccactgaataaattaagaaggatagtttcatttaatgactggtgcattttgaatttcagatgctagtaaaactgttcagcaggcagatgaaaatgtgaatttggttctttggcaagagctcagagatgttttcatttttggaacagtgtacatagacatgaaaaaataatgaaaaactggtgattctgtgggcaatataaataatctcaattttaatctcccacttttaaatggatcaagttctgtcttacatttgagaagttatccaaaggttttaatgcttaaaattggagagttaaggtaagactttgctaattattatcatacaagcagaaaatgagaaaagggcagtgatattttattgttgctagaaaggaaatgttttagaacctggcaaaggcccctgcaatggagggcatttgactatgttgctgacactaagccacatttgaaattcattgttcaacggctgcacactagcacgtcccaagtgatgtgggtcccgtgagatattgaacagttttctacaaatcaaaggatttcaaagttaaaccagattaaagaaatttaaagctgtctttattgtgggacttctcagatcctttagtatggtaataagcattgggaataccccaatgccccaagaggtagacacagtaagaagataagaaaagtaaggtttaaagcagtcacttgcccaggattacacagttattaagaaggagagccaggagtcaaatttagaaaatctgcttcagagttctcagcaatgacactcacctaccaacccagctttattgggatataattgacaaataaaaagtgcatatatttaaagtgtacaacgtactgttttgatatatgtatatgttgtgagatgattaccacaatcaagcctacccataacctcatctacttaccttttctgtgctcgtatttggtgagaatacttaagatctactctcttagcaaattttaagtaaacaaaacactattataatattatctctaattaccaggctgtacatttgatctctataacttattcatcttataactgaaagtctgtaccctttgaccaaaagtttgtacccttgacactttcctaataatgatggtgataagagaggataatgatgtgttggtgaaaactgtcattactgccgagcagtccctgtaatacttgatgtcccttgaaaagctgtggtaattcttacaccagggtatcagttacctggtgtcaaaacaatgctgtgtcaaccacccaaaactcagtaggatacaataacaagcatgtattcagtctaatgcatctgcaggttggctgggatagctttgctgatctcatttgtgtttgacttcaggctgcagatccaaattaggtctgctctgtagagctctcatttgtctgagaccagccactgggaccagtggcatatctgtgatgcctccatttgtgtcacacctgcaatattcattggccaaagcaagtcacatgcctggacccaaatcaaagggcagggatgtatacctctagaggagaaatctgcaaagtaacaaggcaaaaactatgcatacaagaaagggagaagaaatggaagccattattccatctaccacgacccatgtgtaaaattcatcatgggaatatgcaataaaaatttaatctatgctgtttaaataatccacagagccttggcactatgaattcaagttcagataatgcattatatgacaataaacttttattcatcttatcccaacttattttcagaatctgcccaagcctaggctaaataaggtatgtactctaggaatatagctctaaggattagctaaatgaattagtaagtggtcaagtcctttggttcaagcatcagaattattcacttggcctctctgttaatgcttctatggctctcaggctgccacacttgggtgctgctcttccatcacccctcccaggccagcaggacttaaggtttgaatcgaggttaaagttgtaggagactagatatggcccacttgcttgtgtgtgcatgagaatccctgagcctgagagggctgtctgggccaagggtccaggggaatggttagagaagagtgaagagcagaaaactggcaaaatgagcggagggaggaggagggtttagtaaatagaccctgaaaggagtcctctgagaaaatgaacgaaaggaggctaacctttctgtgaagctctcgtggcctagatctccaaaggttaaggaagttggaataatatctctgaaactggccgggcgcagtggctcacacctgtaatcccagccgtttcggaggccaaggtgggcggatcacttgaggtagcgaatgcgagaccagcctggccaacatggcgaaaccctgtctctactaaaaatataaaaattagctgggtgtggtagtgcacacctgtaatcccagttactagggagactgaggcaaaagaactgcttgaagccagggggtggacggttgcagtgagccaagttcgtgccactgcattccagcctgggtgacagggcaagactctgtctcaaaaaaaaaaaaaaaaatctctgaaacttacaagagtccttgatgactctgatgatggtgataatgaatgaatgaaatatttgatacatgaaagagaatatatatagcatatataaactttgaaaatattataaaatgagcttgtgacctcgtcactcaacttaaaccactatattacatttactggtatgctccgcctccttcctgaagaaaactactatgataatgttgcacttactctcttgctgttttttaaaaatattacatcctgtatgtacatagccttgaacaatgtgttgcctagttttcctcgtatttgagttttatagaagtgctgtcatggcatatcgtggcaccttgtcatcattatgttcctgaaattctttcgtggtttgggagctgctgagtttcattcactttcactgctccagtatatgctttattagaaatacaccatagtgtatgtatttcttctcttgtccataaacatttaggctgttctgtgtttgctattatgaacaattttgttctgagcaaacttctatgtgtctccaggaacacagtgaccaagagtttctctggactatgtaattcagagtggagtttctgagttataaggttttcaactatcgcttgaaattttattccatagtggttgtatctgtttataaagccactagcagaggatgagagtttttgctgaaccacagtttcatcaacactgtgtactaccaaaattctaaatgtttgccaatcaagaagatataaaacaaatcccattatagtttttatttgtatttccctgattactgataaggttgagcatcttttcacagtttaattcaccatgtatgtttcctcttcagtgaactatttatttcttttgcttattttctaatttctgttagtttctttcttatcaacttatcatagtctgctattaatactgaatattaatctcttgccaattatgcgtgatatgaatatcttgtcccattgagtggctttacctttccactcctttttgagtgacctttggtaaacagaaatgcccagccttgaggtagtcaaatgtatcaaacttttctttgtatgcgtgtgtgtcttctttaagggatctattccttcctcaagtttataaagatattctctttgtctccgaaaagtcttgaagttttgctttgtgcaatctattggggatttttttttttttttttttttttttttttttttttgcctgtcatgtgaagcagggattcattaaatatgttatctcaatcaacatatttaatgagagagacactctcactcactcacctccttagtcatctgcaatgccacctcttcctcatatcagattgcctcgtgtgtgagatattgctgggccctctatgctgttgcattgatcagtgtgtctttccctgcaccaaaaccacaccatcgcaattactctggctttataataagtcttgatatctggtagctctcctggtaactgggctacaactagattttgagggaaagaatgaggttcaaacattctaattaagagaatgagagatagaaagatgttaagggtttaggtccactgtttatttacaaataatatctattatctaacttctgccccttacgactggtctaaggtagctgccattggaaatacacacgagttactttagctgttgcttataccctattatcaggtcattgaactgttgctttaaaacacagataattcagacttcccagtgattcagatgaaggtagtgatttggttttctgcttttgctccaagacatcagctattttgcaaaaaatgatcaacactttctgctccattagaaaataaaggcacgtgaagatgttaacttctgtgcttattctgaaggggctttaatgctaacatgtcttgcatttcttcagtattatttatatagaacttcatgtttataaagctaagacaaggtgcctggatgaactggaagctttctcaggcgggtcctaggaactctgctatgaactctcttggctctctatggaccacacattttataattcattctgtataaacaacacaaatcttctgagcattttctgtgcagtgaatgttgaataaattcttttcagtggtgacattgactccttaggctgtttatttggacttcctcagtagagatatattcatacaaaccaaataatcttaaatgttgtgcccgggatgtattgtaagtcatgtttatgaatggagttttatattctctatgaaggtgcagaaagagaatatagtacacataatgctcagtccagtcaggtacatggtagagtgcataaaaagtagccctgggcatgtgaaatgtgtatctatagaaatgcatattttaaagaactttgaaaattggctagtgaaaaatattaaagttgaaaagattggcaatgtatatttaaaaatcactatctactagagggaacatgaatatggttcaagagagggaatcaatagttagtaaggataaaatggataagaaaagaaaattgaaatacaggcaggaaatatattcaggcaagagaagtgatgtaatgaaaagaaagcagaattgaaaccacagcctcttccataacaaatgtaagtgttaaaatcatagcggatgattttttcagtaattttggctagagcaggaaaagggggtgtctatagaacagcacttttagtgtttgctgaggtggacaaaagcaatcacaattaatgagctccagcagggggcaaaggcaaacaaaggaagtttgatttttgctgtgattacaaattaagagtagctcaaaatccgttctctaaagcttgttgggtgctcccagtttcccagcttcccctcctctctacccaggttcccagagcacccataaactctcttccctctccacttgtaaaatatcctttcagatcacacttttcttggtgccctgcaacctaggaaaatctctccactcaacagtctaccagtaacacaaactctgcatttagggacacattggccacaataaattagaaggaaattttaccaaaagaaaataagtataatgtttacatttttagatctgtatttatagatataaatgcaaatgcaactgataagggatggcagttatataataatcaaaattcttcaatattatttataattcttgtatcaatagagttgcaagagttagcaaataaaatacacgatgcccaggtaaataaattgcaaagaaacagctgtttagtataagtacatcccatgcaatattcaggatgtactaatactaaaaaattattcattgctctgtagagtacaacgaaagcccggacatctcacagaataaacaaaaatagttcttaaaagttgaggaagcatcaatactgtacataattctacttcaatatttatatgcctctaacacccactaaggttcttcaggaatgttctcagctctctgagacgggattttctcacctttctctctcctggtcattcaggagtccccaaagcttcttgtcaaccctagatattatcagagattctctaaggctccttctcatgcttgttggttctaagtgcaactctgttgagaccacagacctctctagaaagaggctgctggatttgaggctcctccattcaaagggccaaccctttcctgagattccaccgcttctgagcgctccagcagtcgctgccttgcacatggttggacctccccagtacaacgttgaacacagcagtgacagcagatgtccttgtttcatttgcaatctcacagagaaagctttcaatatttcttttttcttttttctctacctccaggttcaaacgattctcctgcctcagcctcctgaatagctaagattacaggtatgtaccaccacgtctggctaattttgtatttttagtagagacagggtttctccatgttggtcaggctggtctcgaactcccaacctcaggtgatccacccatctcggcttcccaaagtgctgggattacaggcatgagccaccacgcccagccaaagctttcaatatttctacacggagttggagctagatttttttttggagatacacttaattaaatttgcaaagtttccttccattcctcatttgctaacaatttttatcaagaatgggggcttattctatctaatattttttctgcagctattgagatgatcatttgggtgttcttctttattctgataatgtgaagaattacatagtttttcaaatactggtcttgtatccccagaagaaacccaaagtgatcacaaagaatcattttctgatattttgctgaggattttgaaaatctatttttatggaagaggtgggcccatgcttttctttctgcctatcagtttctgaaagggatttgttaaaatttatacctatgattgtagatatggctatttctatttttcagttctgttaatttttttccttttttttttttttttttttttttttttttttttggagacagagttttactctgtcgcccgggctggagtacagtggagcgatctcagcttactgaaacttccacctcctggattcaagcaattctcctgcctcagcctcccgagtagctgggactacaggcgcctgctaccacgcctggctaatttttgtatttttagtagagttggagtttcaccatattggccaggctggtctcaaactcctgaccttgtgatccacctgccttaacctcccaaagtgctgggattacaggcataagccaccacacccagccaattttttctctttctacagtgtaagcctatgttatttatttcacacaaattcaggattgaatttgctagatctttgtccttataaaatgttcctctttatctctagtactatctcgtgttgaagtccatttttcgtcagaataactatcttagttttcattatcttaatgtgtgcattgtatatgtttttccacctttttatttttaatttttctattttcttcatatctaaggtaagtctcgtgtgagtggcatattcgtgtttttttgttctttttgtttttttgttttgttttgtttttgtttttgtttttgtttttgtttttgtttttgagtcagggtctcactctgttgcccaggctggagagcagggacacaatcttggctcactgcagcctcaacttcccaggctcgggcgatcctaccacagcctcaggagtagctgagacttcaggcgcaggccaccatgctcagctatttttttgtatttttagtagagaaagggttccgccttgttgcctaggatggtcttgaactcctgggctcaagcaatccacctgcctgggcctcccaaagtgctgggactaaggcatgagccaccacacctgaccaatgttttgttatttattaacaaacaaagttacctttcatttggagtttttcgttcaattacattgaatataattaccaatatgtttgagtttgaatttgccatcttgccatttgttttctacatgtcccacctattatttgttcttttgtgttttcctatctttttagcttaatcagatatttttagttatctcatttgttctcctaatagcttgtaaatggtatatccttctattatctctcatagtcttctaaacaaactcttgagattggtttgttaaataatgtttaaatgtatctctttaacattttatcagtgatgcttttgaaagtacaaatgattcaaaccagaaaacatttagctgtgatatatgagtccatgttagacttcatatttactggaagagaaagtctttccaggaaacactgcgctatggaagtttacattctcattcctgaaccatcagtataaattattgcaaattcatcattaagaatgctgtagctaaaaaatcccatgccagggaccactcaccgaagttctctggggaaaaaacgtgtatataaagtgaaaaggctgagttcttcaggaaggagtgaaggttgtaatgatggacttcactaggaaaccagaatatatatggagattcctgaaggatatttatgaggacttggcccccatattctaccataagatggacccctggctgcacttgccatggggaagtctatggatagcctaatctacctccggctctacttgatggactagcagaaaatttacatgggagtccctaactcacccagggtttagctaccatggcatagatggtggcatggcaaacagaccactggaaaatataaaatccctccagttagacctcggagccaagttgcttctaagtcacctctggctttttcctgcatatacaagggaggtgcctgcctcaggaacaaaactctgcataagtgtcaagttcacagaaagccttgccagaagctggaaggaccttgagatgaggtgtgattcttgtgtcattgagcccctgcttagacttcctttgggtgtgtcatacatctgccgagggaggcgccaaaggaaagttttatgacctctaaggaaggaatataaattaacctacctatccagcttgtgtagtgttttcttttccaaaatactttctctcctctccacttcttccttctttccttccttctccccctccttgccttccctccctccctttctttcttctccctttccttccttccttttcctccttccttcctttccttcttccctccttccttcctttcttcttgctctcacctttcattctctcattcttaacctggattttttgctaacccaaatgtttttagcctttcaaacaaagtcccaccttggctcatggcacatatagaataaagatgatttttcacttggacagttctcatattcggacacttcagtatttgaatagtcctctggtgcctactccacttctccagactgggagaagggagagtattatctcccttcattaccatctggccaggtgtcttcccatttgtaatcccctgattgggtagtgttcttcccctctgtgtgcatctagtgaactgagaagaatatattcagtgtcacccagctgtttattccattaaattctcagtgtttgccgtatattagctgaagaaaaatattaacatcctgtggctggattgtaagctattatagtatattggttacataaatgaagtgtacagtggaaagagattcaaactggtgatcataaagcatgaagaaaaacattttaactgtgtcattagtattgtaatttattcattgatgcttggtttgctgctgatatgttcgtaagtaactgcttggttcatacctgtctctactctgagaatatggtgatgagaagcttccagttgtctccagaaaagcatccttagcatcaatttgaaataaaggtgtattaggttaataaaggctaagctgctataacagaaactcccctagctccccgccaccaccaaatatagtggcttaaataagattgaattttatttctctttcacatacatagatagtgggcagttctgctccacaaaactgtcgagggacttagatttatttcatcttgctaatatgtcattcctaaaatgttgtctttatttaaatgatcaaaaatgacttattgctttgcctggttttaaactcttgagaaagagaaaaagacgaaaaacaaggcaaataattttctttctgacaagtaatgtggaaatcgttcacatctctgaagcttacatttcattggcaaaaaagtctttgccacatagctatacctaactgcaaagattgttaggaaatttagtctctagctgggaagctatgtctccaggaaaaaagtgaagataaatttgaaaagacaaatatacctcacacatccaatttgaaatcaattacaattaccattagctctataagaccgtataacataatggttaagagatctagttctggagacaaaaagcatgaagtccagtttgggctctaacacttactagttgtgtggtcataggcgggtcacttaacttccttaaaaccttagtttcctcacctgtaatatgggaaacataacagaacctttggtcaagattatgtgaaatatataaagggtaacatagtaagagttcaataaatgttacctgacttagtttcctgaagggagtgaatgaacctcttatggataataagacttccgggccaatgggaggtcatccaattaagagcctctttgtctcaacaaaatttatttagcaagactctactttgtagaaggcactggaatagtaggtattaatttatcagataagttatatactttgaatgagtttttattatgtaaaaaagacatataaatcactctaaattccccctctatgtatgaagataacaatagttcttagtgcttttctcactgaatatagaggaatggatgagataacgtttgtcaagagcttagctcattctctagcataacatacagtaagtactcaatatatgttacctccatattatacaaggcgagtgctaaatattattacaagcaatgctatgggaatacaaaagaaggaacaattaattctggctagaaggactagggaagatttcaaggagcttctggaacttctgcaggatttttaaggatgagtaggatttcaaaaatttgaagattttaaaaggatggtttcatcaaagaaaacaacatgagccaaagcatgaaggtgagctattgtgtggcgtgttcaaggacagaataactggataagagattcatgggataatgaatgggagaagttgtggaggagattataatgtgagatcagataatgatggacttccttcattaagcagtggagaggtttctgaggggattttcatactctgaactatttattaggttgaccacctttgttagcagcatacagtatagattagaagggagatgggcgtttcaaatgagaggctggaagagcagacagtggctatgaaagttgtccaggaaaaggacaatagggtctgaatctgggcgctatcattgagaatggaaagtgaaggacagagaagagttatagaagaggcaaaaatcagtaggtttttgcaactcacctaataagaaaagtgaaggagagtggagagctgaaaatatttaagatttctaatctgagcattataaccagggaagatgtacaataacttcaaagtggtatctgctaaaaccaaaatctactagggcatagctattcagatttccaatatcaatggcctgaggcaatggcatttcttgcatgccagtgtggtaatcagtttcagtaaaaacgcataaatcccaatgtgagcactcaattatcttcaaaatctagtcttactgggtcttcagaattcaccaggaaatagcattcacttgagaaatatgacctgaagataacttccgcttccagctcaatggagtacctggtatcagaccatctgtcctgctgaggacaccatcaaagctggatagaatacaaagagaaaaaaaatccagctgtttgaaggtgtcagaggataccccatgatgctaagatacgggggaaaagtactcttaggataccttaagattctgcattaatttccactcacagtacttgctgattcctaaaatgcacatgtataaggtgaaatttgtgaaactaaaccaaaagtatcaattaagtggtagagattttgacagttttatagtcctgcaaagattaaaaaacgggggccccaaacctacaaaaacaagtctttaatgatttttacctgaaagcttgaacagtgatacaccttgagaaactaacagtcccaactagatcaaagagtgattttttcatttgttatgtacccattagaagaaaattaatttccaaattcaggaaaataactattcagattctctataatttttcatactcgatataatttttcatatttaataaaacattaacaggcattttcactaagataaagaacaaggcaaggatgaccactaactcttctactatcccacactgtactagagttatgagtgaaagtaatcaggtaaaggaaatcaatcaaggcctaagaatggataaagctaaagtaaaatgttctctatttgaagatgctataacagtatactagcaaaacctaacagaatcaatgatgaaactaactcaaacaataaaacattgagtaagctagcaggatattaaaatgacagaaaaaatcaatagctttcatgtccacaaacaatgaaaagttagaagacatgatggtagagaacacctcatttacaatagttaccaaaaagataaaatatttagaaataagcttaaaaagaagtgtgtaaaatatgtataaggaaaattttaatacactcctgaaagacaaaaaaagtagatttgaacaaatagaaagacattttctgttcttaggcaggatagtttaatattataaaagatgtgaattttccctaagataatttacacatgaaatgtgatgccaataaaagcaccaacaagctattttatggagttaaaggtgacacttatgagtagtggacattaaaacatactataaagcctctataattaaaacaacatggcaaaggcacatggccagtgaggtggagtagaaaattcagagaaagactcatataagaaaaagtagtatacgatgaggatggcatttgaaaccactggagtaaagatgtttaaaaataaatgatgttagacaattgagtacacattcggaaaaagataaaatgagatccatatctcagagtatacataagaatagactccaaacacttcagggatataaagaaaaaaagtgaaaacctaaagtacttgaattattctttaatcttaatgtaggaaaaagccttgctaactatgactcaaaatccagaggcaatgaaaaagagataaaaggtaacttttgacaaataaaaaggtttttatgacaaaaaacaaacaaaataccaatttaaaaagccaaaagataactgacaaactgggaaaaaatatttgcaacatatctcacagataaagggctagagaatgcttaaaaattgagggccaaggaaccaaaaaaattttatttttattttatttcagtagttttggggggtacaggtggttttcggttccatggataagttctttagtggtgatttctgagattttggtacactcatcacccgagaggtgtacactgtacccaatttgtagtgtcttatcattcaccacctcccacctttcccctgagtccccaaagtccattatatcatttttatgcctttggatcctcatagtttagctcccacttataagtgagaacatacaatgtttggtattcctgagttacttcacttagaataatggcctccagctccatccaagttgctgtgaaggtcattatttcattccagtttaaggctgagtagtattccatggtgtatatatatgacattttctttatccactctttggttgatgagcatttaggttgggaagcaaaatgtaatagaaaaattgaaaaaggcataaactattcataaagacatagtaaaatggttccaaaacatatgtaaaatgataatcattcattaataccatttctcaacaactgattagcaaaacttagaaagcctgacaatacattttgttggcaaagctgtgaggaaacaggtactctcatacactgctgatgggaatacaaactggcagaatcttcctggaagggaatttggaaatacctaacaaaactctgcatgcacttattttttaagacagtaatccgacttctaggaatctacactgaagatacacatctcacaatacaaaaatacatattcagagttattcactgtagcattctgtaaaattgcaatagattagaaacaacctgaaagtcatactttggagagtggctgaataaactgtgatacttccacacaatgaaatactatgtagctgtaaaaagaaacaaaaagataaaagaaaatgaaaaaaaggaacgtctctattaattgatatgaagtgatcttcaagataccaggctaagtgtaaaaagcaagtgcagcctgtaatcccagcactttgggaggcccaggcaggtggatcacgaggtcaagagatcgagaccatcctggccaacatggtgaaactccgtctctactaaaaatacaaaaattagctgggcatggtggcacacacctgtagtcccagctactcaggaggctgaggcaggagaattgcttgaacctgggaggtggaggttgcagcgagccaagatcacgtcactgtactctagcctggcaacagaatgagagtctgtctcaaaaaaaaaaaaaaaataaaagcaagtacaaaagggaataagggaatgaataccatgctacctaccgcgcagagaagaaggtataagaaaagacacatttctgatcatttacacaaaagaaacacaggaaagataaaccaagaactatagcaggtaggtgacagataaaccaagaactacggcaggtaggtgggaaaggaatagatagaagaaaggaatgggagaggttaaaatggggtgaggaaggagtaacacttttgagtatatctttttgtatagatcccactcctacaaccatagtaatgttacacgcattcaaagaaataaacaattcaaaccaaccaggttgtgaagggaactcaagatggagtacaaacaataccacattaacttacctacattgtaaacaaagaacataactacactgaagggagtaaggaagaaaagaactaacttgttggccaggtgtagtggctcacgcctatagtcccagctacttaggaggcccaggcagggggatcgcttgagcctgggaggttcaggttacattgagccatgattgtgccactgcacatcagcccgggtgacagagagagaaaaaaacaacttaagtaactttggacaacaagatttttgattggtactaaagacaaaaagaactatacataaatgctgtagcctagttggtaaatttgtttcttatagaagcccgggttaaccattctgaaattagtttatgcatatgctaggactgaaaaaataagtagataatgaaaaccaagtttctcaccgtcaaagaagtgacaagtaaggaaagtaggaggctaaaatgaacctttgctgctggactggaatctgaggtttcaatgcaaattcatgttttgagagtctatacagatagagaaataaaatggatgtttgtgtatgtgtaagtatgcacagatatatttcctacctctcattgctaagagggcctagaagcaacaaacccatctagcactcagatcttagtttctttttttttttttttcctttgagacagagtcttgctctgttacccaggctgaagtgcagtgggtgatctttgctcacctcaacctccgcctcccaggttcaagcaattcccgtgcttcagcctccctagtagctgggattacaggtgcctgccaccacgcccggctaattttttgtatttttagtagaaggagggggactccagactgaaaaccccatgggtggttttactgggaggctggaggaaacggtgtctgatttgcatagggtccaggggattggtttgaccaggtgtgtcattcatgtagcccaggaaaaacctggccctcccgccctagcctcttaatatgcaaatacgggtcaccatgatgtcctgcacctgtggctttatctggaggcagccatgacacctggcacacattatgacaaggagaagagggcggtaacctccatattgggtagacttgttttctagccaccagcatttacataccaatgcttgccggtctggtttttcaagctgctttctgttggaaaaaaaatgtttttgggggtggcttttttattaaaagaaaaagccttactgaggactgttttaccctatctgcctaaaataatttcttaatagctcctgtaataaaagtgctaaaaacgtaaggggtcttgtcaaaaggacaaaagagccaacttaaaggggctcctcataaccaaagctggaatgatccgagggccaaaataaataacgatagtattggactgcaacccatgaaataaaataaatatccataaacctataatgctataaataagcaaccaaataaataaatggggagaaataacatctctttcatatagaagagtgtcttaatgaaactctttttactatatttgaaacttttatgagagtctaaaattagttagaaatagaaagttaaaaaaaattaataggtatgccaagaagtagaaacaaatgaccaagaatgtaaagcaaaaatacaatcacagggatcctgatacggaggtcatcaggcaaagaccttaaaatgtctattaccattaatattctcaagaaaatgtgaaaattaaaccaaacaagtagaatatattcttaaaagcttaaatagaggaggcagaacaagatggccaattagaaatccctagcactttatctccctgacaaacagccaaactagcaaacaaccacacatcgatgaaaataactaaaggagagtgccagagcacatcaaagaaatagcagaaccggtagagcacagaaacccagtatggtcacatagagaacaaaaggaaacaccttgcctctgccacccatcccccggtcgagatcagcttggaaccaggagggacttccctgcagggaaaaggaaaacagaaggaccctgacaacccccatcaccaccttgaacaactacagtcttcactactggggactcctgcagtattcacaggtgctatgtccagctgcaggagctgtccagaatccatactgctgcatgccttgaccactcagagtaggagctgacactgtgccttgcctccccatggcccacactgacactgcactgagctaccttgaaaccagagccactgctggaatgtgtcgcgttctgggggccagtagtcactgcaccccttcatccctcaggctttgtcaccactgaaccacctctgcctggtggcccacaattcctgagctgaactgctgctacatcctatcctgtggaaccactaaagacctcaatagctaaagcaaaaggaacaaagctgtaagcatctttgtaacttacaaagttacaaagatttttgccaaagttacaaagttacttttgctaaagcaaagttacaaagtaactttgcaaagtaaagttacaaagtaactttgcaaagtaaagttacaaagtaactttgcaaagtaaagttacaaagtaactttgcaaagtaaagttacaaagtaactttgcaaagtaaagttacaaagtaactttgcaaagtaaagttacaaagttactttgcaaagtaaagttacaaagttacttttgctaaagcaaaagttacaaagctgtaactatttgacctcaaaatatactagagctatagtaaccaaaacagcatggttctgacataaaaacagacacatagaccaatgggacacaatagagaacccagaaataaatccacacacttagagccaactgattttttacaaaagtgccaagaaaatacattgcagaaaggacaatctcttcaatacatggtgctggaaaaactggatatgcatatgcagaacaatgaaacttgatctgtatctctctccatatacaaaaatcaaatcgaaaaatatatatacatatatacacatatatacatacacacacacacacacaataaaaaagtattcagacataaaaaagagtgaaatcctgttatttgcagcaacatggatggaacgagatgtcgttatgttaaatgaaataagccaggcatggaaagacaaatatcacacgttctcactcatatgtgggagctaaaaagttgatcttctaaaggttgaaagcaaacttttctgagagtctaaaattagttagaaatagaaagttaccagattctgattgttaccagaggctgggaacgatgggttcaggggaaggagaggaaaaaggaaaggttggttaaagggtataaaaatacagttatatatataaagaataaattatactgttcaatagaatgatcatagttagcagcaattttttgtctattacaaaatagctagaagaaaagatttggaatgttcccaatacaaagaaatgataaatgtttgaggtgatggatatcctaattaccctgatttgctcattatacattgtatgtatgtatcaaattatcatatataccacataaatatgtgcaattattatatatcaatgaaaaattgataaaacaacaatgagacaagaaaaagaaataaaaggtgtctaaatcagaaataaagaaataaaattatctctgtttgcaaataacatgattctaaatgtggactaccccgaagactccagcagaaaactgttacaactaataaataaattcaataaagttacaggatgcaaaattaatgtacaaaagtccatgacattcctagatacaaataacagcctagctgaaaagaaatcaagaaaataatctcatttacaatagcatcaaaataaaataaaataaaatgcttagggataaatataaccaaggaagtgaaagatgtatacactgaaaactatgaaacactgatgaaagaaattgaaggggacacaaataaatggaaagataccaatcttgtggattgcaagaatattgttaaaatgaacatacggcttagagcaatatgtaaaattcagtgcaatccctatcaaaatcccaatggcattcttcatagaaacagaaaaaataattctaaaatttatgtggaaccataatagaccccaaatagccaaagcaattctgaagtttttataatttcactaatatttttaaaaatcaactttaggctttgtcaatttccacttttgaatatttatctcattgattttggcttttacttttgttgttttcttcatcctaatttattgtaaactttctctttgcttttcagcagttttactttgatgtgtctaggtgtggttttctatacaattattttggttgagatatgcacaacttcttgactctcaaactttaattgtgtcaacttgcctggattaacgaaaacccagaaacctggtaaagtgttgttttgggtgcgtctgtgagggtgtgtccagaggagattagtctataagtctgattgactaggaggggaagattggccttactgttggaggccccatttgattggctgggagtccagagagagcaaatgcagaaagcaaaatgggtctttttctgtgagctgggaccaacttttcctctgctgccttatacatcagaactccaggatagctggcttttggactcaagaacttacatcagcagtccctgcaggtctcgaggctgttagcctcaggctgagagttacaccatccgcttccctggttttgaggccgtcagatttggacacagccaccctaccagcgggatcccacaggtctccagcttttggagagtggcctgtcgtggcacttctccgccaccataattgcatcatatgtttatgtagataaatagatatcctattagttctgtctctctggagaacagtgactaatacaaatttggtgttagaaaaagtaaatataattccttcttactttatttcttccaacacagtggaagagatctgtgaaattttcccttgcaaaaaggctcttataaattaagcatatgtagctctttaatggggaaggacaaaactgttaaagctaattattattggtactgcaaaagcagaaattgcttaattgtaacagctgagccataatcaaactttcaaatggacagcatatatttagaaaatgtgtagaccacataaactctccaaatacaagtgcagtgagtgttttgaagatcacaaaagaagtgaaaactcaggcgaaaaagacaaaaaaaacctctcattccaagttactcaactgtgtaggacttctgccccttcacacatagggtcaattcactatactatgcatttcgtcttcacatcatttccaatattagaggtatacattatgttaagacctttagagagttctcatttgttttatgtgttttttgcaaatttggctccataaaagtgcacgatcacaatgttgattttgtgcataagagctgcgtgcactcataagaacgttgaaacttcctcaacaaatgaagagatgtccttttgtacatccgtatttgcgaaagataaaatttcttgagatcttccaacctcgggcaactgcacatgcaggggtgacccatcatagttttttatctatctcatcaaaagacttacgtcatggtatttcaaatgactgcattataaactcaatgcacacaattaccaaccataatgatatgcatctatataggcataccttggagatatcatggatacagtctcaggccaccaaaataaaacaagttacacaaactttttggttccccagtgcatataaaatttatgtttacactatattgtagtctaagtgtgaaatagcattgtctttaaaaagtgtacataccttaatttaaaatttcttaattgtttaaaaatgccaatgatcatctgagccttctgcaagttgtaatctttgctggtggagggtcttgctttgatgcggatggttgctgactgatcagagtgttggttgctgaaggttggaattactgcggcaatttctaaaaataagacaacaatgaagttggctgcagcaattgactgttcctttcatggcagatttctctgtagcatattatactttttgataccatttgatccacagtaggacttctttccaaattggagtcaatcttctcaaaccttgctttatcaactaagtttatgtaatattttaaatcctttggtgtcacttcaacaatgtccacagaatttgcaccaggagtaaattccatctcaaaaaatcactttcttttctcacttataagaagtatctcctcatcccttcaaattttatctaagattacagcaatttagtcacatctttaggtgccacttctaattttagttctcttgctatttctataacatctgcagtgacttccctcactgaagtcttgaatcactcaaagtcatccatgaagattggaatcaacttccaaacttctatcattattgatattctggcctcctcttttgactcataaatgttcttaatggcaccaacaatgatgaatcttttttttttttttccttgagacagagtttcactcttgtcgcccaggctggagtgcaatggagccatcttggctcactgtaacctctgccttgtgggttcaagcaaatctccaggctcaaccttccgagtagctgggattacaggcgcccaccaccacacccagctaatttttgcatttttagtagagacagggttttgccatgttggccaagctggtctcaaactcatgacctcaggtgatccgcccatcttggcctggcaaagtgctgggattacaggtgtgagccactgcgcccagcctggtgaatgctttccagaaggtttccaattgacttttcccaaattcatcaaaagaatcactatccacggcagctatagccttacaaaatgtatttaagtaagacttaagtcaaaatgactccttgatccatgggaggcagaatggatgttgttttaacaggcatgaaaatattaacctccttgtagatctccatcagaactctaggatgatagctcttgggtgagtagtaatattttgaaaggaatattttgatcagagcaataggtctctacagtgggcttaaaatattcagtaaaccatgctgaaaacagatgtgctatcatccaggtgtggttccatttatagagcacaggcagagtagatttagcataattcttaagggctctagcattttcagaatcataaatgagcactggcttccatttaaattcaccagctgcattagcccctaacaagagagtcagactgtcctttgaagctttgaagtcaggcactgatttctcctctctagctatggaagtcttagatggcatctttttccaacagaaggctgtttcatctacagtgaaagtctgttgtttagtgtagtcacctccatcaattatcttagctagagcttctggataacttgctccagcttctccatcaacgcttgctgtttcaccttgtgttttatgttatagagaccacttccttatttaaacctcatggaacaacatctactagcttcaaatgtttcttctgcagcttccttacctctctcagccttcatagattcaaaaagagttagggccttgctctggattagactttggcttcaaggaatgttgtagatggtttgatcttctatccaaaccactcaaactttctccatgttagcaataagcctattttactttcttattattcatgtgttcactaaagtagcatttttaattttcttcaagaactattcctctacagtcacaacttagctaagtgtttggcccaggaggcctagctttcagcctgtctcagcttttggcatgccaccttcctcatcaagcttaataatttcaagcttctgatcaaaagtgagagatgtgcaattcttccattcacttgaacacttagaggccattgtaggggtatagatcagccctaattttaatattgttatatcctagtaaatagggaggcctgacgagagggagagagttgcgggaacagctggttggtggagcaatcagaacacacacaacatttatagactatgttcaccatcttatatgggtgcggttcgtgatgccgcacaacaattacaataacatcaaagatcacagattaccataagagatatcataggagtaaaaagtttgaagtattgtaagaattaccaaattgtgacacaaacacatgaaatgagcacatgctgttggaaaaatggtgctggcagatttgctagatgaaggtttgctgcaatccttcaatttgtaaaaaacacaaatatctgtgaaacacaataaagtgaagtgcaataaaatgagctatgcctgtacattttgcttgttgacttatttctttacaaatatggtttacctgctcatcatttttacacctgtgtgactgccattagtatacctgtttatatttgcaaaaatatgtatgttattattatctattttattatgtaaagtggcctatgaagtattctgttgtttttggtttcttaaacaaatccccttttataaatgcaaataaatgtgttatgaaaaatttttttataattattttttccagaattatattttcaaggttttggtcttttgggattctgatttttgaaattttagactttaggaattttgatcttttgggatttcagcatatgggattttggcattcagtgttgagtcctttgaaattattgcccaaaccccaaaagaaaatacccaaatggccaataagcatacaaaaaggtgctcaacatcattagccatcagcaaaatacaaattcaagctccaagaagatgctacacacctactaaggtattgttttaaataggatgataataactcatgttggcaaggaggtagagttctcatattctgtgaatggagtacaaattggtacaaccactttggaaaaattttttggcaatatccactaaagcttacacacatacacctgatgacccagaaattccactcctacatttgcacccaacagaaatgtctacatatgttcaccaagagacatgtacatgacagattagaacagtctgatcccaaaggcagaaacaaacctaaatgcatatcaacaatagaatggagagatatattggcttgtatagtcacacaatggaatgctatagaattatcaaaaaagaatgaactacgacctcacataacaacatgaatgactctcacagatgtggtgctgaatgaaggaatcagatgcaaaagcccataactatatgattaagaaaattctgaatcaggcaagattaatcacgatggtagaagtcagaatcatggttacctttaagagaaaatgcctagaaaagaaacatgatcaaggccgggcgcagtggctcacgcctgtaatcccagcactttgggaggcccaggcaggcagatcacgaggtcaggagatcaagaccatcctggctaacacggtgaaaccccatctctactaaaaatacaaaaaattagccaggcatggtggcacatgcctgtagtcccagctactcaggagtctgaggcaggagaatcgcttgaacccaggagatggaggttgcagtgaactgagattacaacactgcactccagcctgggcgacagagtgagactccatcttaaaaaaaaaaaaaaagaaagaaacatgatcaagcccccttaggagataagaatggtctgtatcttgatctgagtggtggtgacatagatgcatccactttgttaaaagtccattgagtttattaagatttgtgcactgcacaatatgcatattatacttcaataaatgttttttgaaaagaaagaaagatggcctgggaccagatttaccttattaatactctaaaggtgtctgttcattagttaagcataatctattctaattaatgctctattgcatatgaatgctgcctaaatggggtgaatgctaagggatactgaatgagattatatcagagtaaagctgggtaatttctcttacagaatatgattgggtttgggaataggtcatgcgatttacctaggagacatttacttttagtacatctcttcatttccatttcttgtgattttgagaagagtttacaaatggaaaatctgggttggtcttttcacttcatctgtttctgaaaacccctccttttaggatgtggcccctcgtccatgctggataacatcaagggcacctggcaaagcagacttttctccccatgagtctgtagaagtggcggctgccgtattgctccatgaaattagggaaaattctaataatcatcataaaataaaaacagcaataaatgtaaataagggaattaatatttcacagtacattcgagattgaatccatgaattttcaccatgcttttaaggtgggtgaccagtatcatgtctgatactttcatatggaggaaaaggggcagaaaaagaacaaagcactttctatcagcaactctattcctccccagtgagcaccttccagctttctttgtgcaagcccttctcactagtccacactctcataactgagcctttgttctggattttcttttaccagaaacaatctccctctttctgattatttcactgtaactcctggccacctctctgatttccccagcctaccatgccccagaagtcatcgttgaaagcccactttctttgaaagctccacaatcctgacacatttatccaccatgacacttttttttaaaaatattgggttgcaaattgacttatctcccaagaatcttcacattatgacactcagagcttgtcttcccaactcttctccctgtggtaagaagagagtatatagtatactctatatgggaggaaaactctttggagtgcaccttcgaagccacattcagttgaacaaaccagtcatttatacttgctcttacttaaactatggtatgtgtgataatgactgagtgtcatatttagatctaaggttttgagagcgacaagaaacattcagactacagaggatagggattgaagttttgccactctttgtctccctattcaccagtataacttcctgctgagctccagttcagagcttcccaacaggtggggcttaatccccagccaattctgaagatttagctcagggccagctgctgcccccaatcccctctctgacagctcttgggatcccaggccagggggaggtggagagtaaccagaaagacagcaattgccatgctctcatcagggccttgccctgctagcaagctagctctttccccaccaccttcctcagtgatgccccagtgaagccttctctggcttctctttggcattttgtcctttaaagtcattctgctagttgatcagagcactgatccacattccccatgaaagcaaatagcagagagcagagaaactgaattagggctgctctcaactctgtagagaatggaatttttaaaacatctagtaagttaaatagttataagttttcttttgtcgaacaaaaaacttgaaatttccttttgtgtatgtgtacatgtcattttctaagttaaaattgtattcccatggtaaaatatccaagcaaatatgagtatgccgagaaaaataaaaaacaccctttatccgctacccttccctccaccctgaccccatttccacctcttccccaaagcaacgactcccaatattttggtgttcacccttccaattctctctttctctcaaaatatacactgataagtactcaaatccatttctcttcttattctatttatattaatggaatcatactatacacctatacactgtgactcttttttcacttaacaatattttgtaaatcctacattggtctacttcattcttattaatgactatatactagtatatagcctgaatgaaccataatcacttcctattttacattaagtgtgttttcatatgctacaggctacattgtgtcccctccctcacaattcacatgttgagtcctaacccctccaaacctcagaatgtggccttatttggatacgtagtctttaaagaggtaatcaaggttaaataagtcattggggtgaaccctaatccatatgaccaatatccttgtaagtagaggagactcagacacagaaacacacagaggaaagtccatgtgaagacagagacagatgtcagccatctacaagccaaggagagagacctcagaatgaaaccaactctgccaacaccttattcttggacttctagcctccagaactgtgaggaaataaagttctggggcttacgccacccaatctgtcatcacagaagccctagcaaactagtaccccagtgttttacacttacatagaccactttggtgaacagctttgcacagccttgcacatacatctttgtgcacacgtgtgaatatttcactaggcaatgttactagaagaggaatctcaaaacatatcattaacttttaatttggacagagatcataaaactacctttcaaaaaggcctcattagtattattttgttcatatttaacaatgctggacacataagtcctttccatctttaccaatgataggtaatacgcggtatttcattattttacctgatgactaatgaaatgaggctcagaattcttcagttgattgaccattattgtatttctagtgtgaatgaactatttgtttcctgtgtatattattctgacggtttcttgataatttgttattaattaataggcacactttatagatttgaaaattaatcatttgtctattacataactatttccttccagtttgttacatgatttttaaattttatttatggtatcacacagaggctttttgttttgttgagttttgtatcttgcttattaaggtcttctcttcctcaggttatggtttaagaaaaaaatgcctgtatttttttctgatagttctttgggtttattttcaatgtttaacattttaagccatctggaatctacttacatacatggtatcaagtgggagtctagctttattgtcttctgaatagtgagtcaatttatcccaataaatcccaaaccatttgttgaatagacatacttttctatttattttaaatacttgttttttatttttattttgttgtgtagagctggaatttgctcctagtagagttatatctttatttcaattaagcttttaaaaaaaatttaaacaccaatagaaggtgtttaaatagaaggaagagagatttgggatgacatcaaagtctcttttcaatcatacttcatttttttcaattttatcctcaataaataactacattttagaaaggcatccaatgtattacgaaaaatgtattttataaatgcagtgttttatgcaagctggaagttagacaatagcgtcgcaaatagtgaagactcacgcctccaatattttttaagctacagaatagaacacattccttcatagtctccctgcacaatcttcatcacaccccactttacccattgtcttttggcttctttaaaaggcacatcaaaagtcctgcatttactctaagattgccttttatcacacaaaagtgggaaagcccaaagagaaaactaagctaagtaacccttcggcaggcatcattgagtatctagtggcgacgctaagagctcccacttaccgtaagcctccctgttcccactgctcagtgtgtgagggaactaacaataagtaagacacaaaggccttacaggctgtttgtgtatcaatctactaatgtaggtttgttatttttttatcagattctgttcaatgtgttggcaatgcctgtgtaaagccagacagcacttaattgcaaataattctggagcttcttggcaatgtaggactagtcaaaatgagagaaaaacaagcatacttatatgatgaataatactaagacccagggagcatttagaagatggaaaaaaagagtgggttaattttgaaccattttcaatttccataccagtcattacccacattagtggatttattatgttctttttctttccctaataagagccttgtaaaattcagcacatcatcaggcaacctaataattaccgtatttaggggcaaatgttagatcccagacagagaccgtttattatgttccattccctaaagtttgactgaatggccatttttctgcttcctcattaataatcataataagtaaactgcaagaaagaagaggaaagaactcagcaaatcaaaacttagaaaactagaaaggtcagagccataaagcattctgccattactcaccgactgtgtgagatattagaattatgattcttaattttcatgaccaaaattctaaagggaaagaaaatggcaccaaatgaatccattcaattaatgtggaagcccagatggaaaaaaaataagcaaaataaataattccctgaatctgccttttatctactcaaaccccaattgtaggcctcccctgagcctaaggatcacaaaacaaaagcttaatgtgaccagtaatttaagtgtttgctaaccttttgtcctttaagctctgtagaacaaccagaaaaacattacgtgataaagttacattggttaatgcacactgagtaatagtatcaatcttccaatattcctgatccaagatttgagatacagaaacaactccaccccaaagatttttttagaaagctcttttgtttctttggattgctctcaaagattttcttgctgattttccaaaagcacattattcatttactaagcttaccagttgcttcatcacaaaaaatgttacagacacctaaactctagcacaatatgattctatgtcaaggaagtatttttgagtaccaaataattttttggttccccattgtttggctttcaatttgaaaatatcttctgcacagaggatcataaaagcttgctccggaagatttgttttgttttgttttgttttgttttttcctgcctttctattttcttagccaaaagtgaaaccgatagctttgttcccactatggtcttctttcttcctgctaaaatctgggcattttaaggaggtgtttaaagacaccttcttcaagtattccctgaggctaaagcaacaagcactcactctctgtttttgaaaacttataacagttggaaccttttgaacaaccacttagtgccaacgctgcccttgatcttctctttacagtacacggggtttacactttgtgagccagatgcaatccccgtggacctctgttggggaacacaggaagaattttcccctcatgtctgcagggagcattttccagccagaatgcataaaccattgagaatatctcccatggagtccgctgagaggaagataatccattaccctccagacatttggctggcttaggaaggactgggcagccccgcctccaaagatactaatgggaattacatttgaaaatctcccaaaagccagatcctgaaatacagttctctctccccacgggttttgcatttctcagaaagcaacataaggagagatagagaaccggaatgtaaatcatgacgtttaagaaaatatataaatcaaacgaatggataaatattttctatttacatagcctctctgaagagtcgcattagctagatcaagacaaacccccacgtcccagtttcataaacccgcaccacattggccagataaaaatcagcctctccaagtgactcccaactttaacacttcaaagtgaagcacagaattatttttattatcatcacagtatttgacagcaacgcagagagaaccaatgaaaaccaggacccgagttcatgtcttcatagaaccagaaagctgtgtgccgtgctgagcacacgcacttcattaaggaaagatgggagagaggccttcctaagcgctgatgttaaaaattgaaatccattctgtaaaagacagaccttgtgtattttttaaagcccagagccataatagctaaagggtagtaaaaaccgtatataagaacattatggtggttagattgttcctaagaactcttgatccaggatttggtatatatgtatataaacgcacaactcaaagctagcggaacttttcagattgtagggggtgggtagtggagaaacaagagtctaatagaaaaatgggcaaggattaactgcatgaaaacatgtagttcccagaaaaatgaaatctaaatggaatacaaatatatgaaaagatacttggccacagtcataattccagaaaatcaactcagaaaaaaaggaaagcttgtcacctaggaaactgaggagctagtttgatgacacacaagttaaggagcgaaataagatgtgtattctctgcagatggaagtgtaagttggttctgtgtttggagatatcttcggtgtaaatggactcagcttaacaatatttagcacaataaaaatgtatatactttttgacctggcaattttacttccagagatttacaaatgaatacacttgtactcatacacagagataaatgatgtacacaacagcaagtttttagtaacagaaaacaatttaagggcttaggactggccatgttaaatatggtacacccgttagtggaatacttggagcattgctaaacatgagggagaccaacagcaagcattgatatggaaagatcttccaactatactgtaaagagtatttttttaagtatgatagcattctcccctctgtgtaaataagaacaaaagaataaaagaaagaaagaaaaaagaaatatatatatataaatgtttatatgcttgtatatacatagaaaaattcaggaaggctacataagaaattgttgataatggttgcctctgtaaaaacagatatgtcagctaatggcacaggctagagagcccagaaataaacccacacatttacagtcaattgatttttgacaaaggtcccaagaacacacagtggggaaaggacagtctcttcaataaatggtgttggaaaagctggatattcacatgcagaagaatgaaattagccccttgtctcacatcatgtatgaaaaccaactcaaaatagctgaagacttaaatataagacctgaaactgtaaaactactaggagaaaacataagaggaaagctccacaacattggattgtgaaacagatttctttggatatgatcctgaaagcacaggcaacaaaaccaaaaatagacgaataggacagcatcaaactaaaaagcttctgcacctcaaaggaaacaataaaaaagtgaagagggccgggtgcggtggctcacgcctgtaatgccagcactttgggaggccgagatggcagatcacgagatcaggagattgagaccatcctggctaacacggtgaaacccatctctactaaaaatacaaaaaaattagcccggcgtagtggcaggtgcctgtagccccagctactcgggaggctggggcaggagaatggtgtgaacccgggaggcggagcttgcagtgagccgagatcgcgccactgcactccagcctgggcaacagaacaagactccgtctcaaaaaaaaaaaaaaaaaaaaaaaaaaaaagtgaagagacaacccacagagtgggagaaaatatttgcaaaccatacatctgttaaaggcttgatatctgaaatatataaggaaccaaaacaactcaatagcaaggaaacaaataatctgatttttttaaatggggaaaagttctgaacagacatttctcaaaagaaggcatacaaatggccaaaggcacatgaaaaaaatctcagcatcactaagcatgagggaaatgcaaattaaaactacaaggaggccgggcgcggtggctcacacctgtaatcccagcactttgggaggccgaggtgggcggatcaagaggtcaggagttcaagaacaccctgaccaacatggtgaaaccccatctctactaaaaacacaaaaattaaccaggcgtggtggcacatacctataatcccagctactcaggaggctgaggcaggagaatcatttgaacctgggaggcagaggttgcagtgagctgagatcgagccactgcactccagactaggtgacagagtgagactttgtctcaaaaaaaaaacaaacaaacaaacaaacaaacaaaaaacctaccatgaaatgttgcctcacacctattagtatagtacagcttttatcaaaaaggaaaaaaactggccaggcacagtgactcatgcctgtaatcccagcacttttggaggccgaggcaggaggatcacttgaggccaagagttcaacaccagcctggtcaacatagtgaaaccccatctctactaaaaatacaaaaattagccaggcatggtggtgggcgcctgtcatcccagctgcttgggaggctgaggtacgagaatcccttgaacccgagaggcggaggctgcagtgagctgaaatcacgccactacactccagcctaggtgacagagacagaccctgtgtcaaaaaaaaaaaaaaaaagagagagagcgaaagaaagaaaaagcaggtgttagcaaagatggagagaaaaggaaactcttatatactggtggtgggaatttaaatttgttattataaaaaatggtatggagattcctcagaaacctaaaaatggaactatcacatgattcattagtcccacttctgggtatatattcaaaagaactactaacgtcaatatgtcaggggaaaaaaatgttcacttttaggttcattgcagcattactcacaatggccaaaatatggaatcaaactaaatgtccattaacaaatgaatggataaagaaaataaggtatatatacacaatggaatactattcagccttaaaagagagtgaaaatcctgtcatttgcaacatggatgaatctggagagcattatgccaaatgaaataagccagacatagaaagacaaatactgcatgatctcacttatatgtagaatctacaaaagttgaactcatagaagtcgagagtagaatgatggttaccagagactgagggaagggggtgaggagggagggaacagtaatttctgatcaaaagatagaaagtttcagatagacaggaggaataggctctgagagctactgcacagcagggtgattataatccataatagtgtactgtgtaataactaagatagtacatttcaaatgtctcaccataaaaattgataggtaattgaggtgatggatatgttaattagcttgacttaatcatttcacattatgtacatatatcaaaacatcacactctgtcccataaatatatacaattatgatttgtcaatcaaagtaatattcattttttttaaattttaaaccatagttgcctctggggagtggtagtgctatatgtatttgattatatgcctttttacaaagtttgaaatattttatcagatataatatggaattctttttgtggtcaagaaaaagtgcagagagatgggaaaacggaactgtgaagattaccacagttgactggatggaaaacaaggaagaggcctcggtggacagctaagacatggacatgctgttctggaacgtgtcatcggaggacagctcagtcatgtgtatacagctgtccctctggtgtttggttccaggatgtcctgcagatacccaaatccctggatgcccaagttcctgatacgaaatggcataatatttgcatatagcctatggaatcctccaatatattttaaatcatctctatatgacttatattattctatatcacttatctaatacaatgtaaaggctatataaatagttgttataccaaaaaaacctagatattatattgtaaaatactaagccactgctttgagttacttttcattgagatttcttgcacgtgatgtgcactccacatgataataaacatgtttggttttctcttgttaaaaaaaaagttatactgtactgttgagggaataatgaccaaaaaagtctgtacatattcagtacagatgcagttttctttccaaatgttttcaatccatggttggttgagtccacaaatgtgaaacacacagatacagagggctgactgtacttcactcttagaaagtctttgttttttggttttgttttttgctttttgttttgagacagagtcttgctctgtcacccacgctggagtgcagtggcgcagtctcagctcattgcaacctctgccttctgggtccaatagattctcctgcctcagcctcccgagtagctaggattacaggcaggtactaacatgcccggctaatttttgtatttttagtagagatggggtttcaccatgttagccaggctggtctcgaactcctggcctcatgtgatccaccagcctcagcctcccaaagtgctgggattacaggcatgagctaccacacccagcctaaaagtcttttataggagagattttgctagacctcacttttaattgatgccgtgtacatacagaaatgattttcatgttttaaaactctatttaaagtagtaagtacatggattcaaacaaagtaaatgttttgccagctttgtttctcaaagaaagtattcgtttcaacagatatttttatcaaataaatgcttcctttgcaggcagttagtatttccatgagctttaacaaatactttcaaatgctcactgcctttaattaatcaagtagttctgtgaatgcctgctatatgcttagtttgcaagtgtatagaatgagtgttaaaagaggaagaggaatgcacaactaatagaccgtggtatttcaggttttcattgataaataagcatttgaaatcctggagtaatgttttccgttgaaaacatggtgccaatgttatatcaaaaaataactccattgttcaaacatcaatagtgggcaaacttgcccatataacctgcatgactgtattttgaaatattaaaatggaaataaaagggctcaagaacaataaagctatcacaaaactctgaaagaggcatggcgcacctcatatttgttcatgaaatcaacagggagagaaatgaaaagtgaccatagggaagtgataaaagagctttaagaccctttcatggcttccagagctccttgattgcatgaaaaggctcacagagaaaccagctggtatataggatggcagggttatctggctgcagacctataacctcaccaatggtcagggttgattgcaagcctctgtttttttcctcatccctcaagctttgaacttccaagttggctcaggattgctttccattgtggctataagtagggtggctctttggccaggtttaccagagatgaccatggattactcctgtagtttctgaagtaaatactaatagtacctacttccacgtcccaaagtgccctggtttggatgatacattatatggttaccctaatagaagtagattaatgtagggagtgagaagaaatggccccttggattatgactggtatatggaaaacctttttgattacctccttaaactactaagcaattggtgggatattaagaaaattaaattattaatttaattttgatttaattatattgaagaaaattgactgaatttctctccagataccactccacatggctcgaaaaaagaaaaactcattttcctattatgtacctgaagtctgtttcctatagcacagagaacacaaagtagtattttttaagtcctgccattttctctgtgtagtagacaaacttctaaggcagccctcagtgatgccaacctcctggtgtttgtgaccttatagaatcccctcctgttgagtgttggctggaccaagtgacttgtcttacctaaccaggtgaatatggcaaaactgatgggggagagtgtcgcttcatgattaggttataaaagatggttttcattttgacagcacgcttactgtcttactgggttagatgaaacaaactgttgagatacctcaacccaatattcagcaagaaactgaagccctgaattcatcaacattaaaagataagaattctgccaacaactacataaataagctcagaagcagactcttccccatttgagccttcagatgagatcccatccctggctgatacattgattgcagggatgtgagaagaccttgaagccaagacctaactaagctgtgcctagattcctccccaacagaaactgtgaaataataagtgtgttgttttaggctgctacatttttgagtaatttgttacctacatagataactattagatcccgcctgatgctggaaaaaccacttaactcctctggcctcaattttctcttttgcatggtgtatagtaggcctgaatcaatgtttgtgaccagaataagtgtgaaataaaggggttagactagataatgtctaagacccccttaataaaaagtctggacaatgttttgctcacaaagtgataactcttgacagattgtgaatacatgttattctttgtagctacctttttttctttgtagctacttttttctattcttattttaaattgcctaaatttcttatttgcaaaaagaaaaaaacacctcaaaacagaggcctcttgtttgaaactttttctcaccaactttttttttggttttaaaactatcctggcctgtgggtgtctgtgtagcctggctgaggatctccgggtaccccaactctgcctttgatgtaaatggtcatacgccctgcatccttcaagtagataaatgtgtattttatgaacactgtctcacctagctgcagagcaacacctgctttcatttaaaggccttttcattgcaagacaaatgcagacagggcagggtgttggacacatttcattttgcctctctctaaattcactggtggaagctttttataaatctcacaggtcatttccaagaatctctggtactaaaacaccacaggtctgtgctaaccctactttcctgaggattaaacttagcttcattgtgggtaaaaatggtgttttacaggctggaaacaacgtctttgatgctaaaatcattcccattgtgaactctgaaaaattttttggaggtgacactttaaaatcttcagcaaaacttttctttaacatttaaaattatttcattttattattcattttattttattttattatttttgttttttctgagaaggagtttcactcggtagcccaggctggaatgcagtgatatgatctcagctcaccgcaacttccacctcccgggttcaagcaattctcctgcctcagcctcccatgtatcttggattatatatatatatatatatatatatatgtatgcacacacacatacatatatacatatatatacacacacatatatatacatatatacacacatatatatacatatatacacgcacacatatatatacatatatatacacacacacacacacacatatatatatatatatatatatatatatacaccatggaatactactcagccataaaaaagaataaaataatatcttctgcacaacttggatggagctgaggccattatcctaagtgaattagctcaggaacagaaaaccaaatactgcatgttctcacttataagtgggagctaagctatgaagacatgaaggcacacagagtgatagagtggacatggaagactcagaagtggggagggtgggagagatagtgagggataaaaaaactacatattgggtacaaggtacactactcaagtgaccgatgcactaaaacctcagactttaccattatactattcatccatgaaaccaaaaccacttgtacttcaagagctattgaaacaaaaaatgtatgtataaataataatattacttcaaaaagaaaacaaaaccagaaaataactagtgctatttttaaaaacgtgtgcattgttggtgggaatataaaatgcaacagcaactatgaaaaatagtagggaagttcttcaaaaaatgttaaaaagatgtatcacatgagctcacaattccacttttgagtagctatccaaaagaactgaaagaaggatctcaaagaagtatttgtgcacccatgttcataccagcgttattcacaatagccaagaggtagaagcaacccaaatatctatcaatggatgaatggataaacaaaatgtggtctatacgcccaatagaatattcaaccttaaaagctacgacatggatgaacctcaagaacgttatgctaagagaaataagccagtcacaaaaagacaaagactttctgatcctgcttatataggtacttagagtagccacattcatagagataggaagtagaatggtggttgccaggggctggtgggagggaagaatggggggttatttaatggaaacagagtttcagttttgcaaagtgtaaggagttataaagatggatggtggtgatggttgcataaccatgtggacgtatttaacaccactgaactgtacccttagaaatggttaatcttggccgggcgcagtggctcacacctgtaatcccagcactttgggagaccgaggcgggagtatcacgaggtcaggagttcgagaccagcctggccaacatggtgaaatcccatctctacaaaaatacaaaaattagctgggcatggtggcggccacctgtaatcccagctacttgggaggctgaggcaggagaattgcttgaacctgggaggcagaagttgcagtgagccaagatcatgctactgcactccagcctgaacaacagagcaagactctgtctcggaaaaaaaaaaaaaaaaaaagaaatggttagtctcgtaaattttacattctgtgtattttaccacaactacaaatttaaaaatgtgtgtgtttatgtgtgtgtgtgtatatatatatatacatatatatatacgtatatatacatatatatatacatgcatatatatatacatatatatacatatatatacatatatacatatatatacatatatatatacatatatatataaataaatggtgcaaaaaaaaagaaatgttttcctttttgggtagaatagcagggaaaacaatatgaaatgtatgtacatgaaagagatcatatatgtatagatcataacttcatgtttctagcatcattaatatctctttattatcttttatctcttcagagaattttaaagattcctcttacctccccactgcaagatcctgtttgtcccccaggagtgggttaatatgttagccatgcactgttctcagcagaagtcattgaagtggcaattgcaaaggtcttatagataagtgtatctggtgatgatgcattcattttaccatcctaaccagtgagaagcagcagatcagacatattttggttatgaacaatgccagaagtttctggtcaatgaaaagaaattgctaaggaagacagcttattagtgccaagaactgtgatttctgtaagctggcttgttttgagaccaatttgggtataattttaaacccaagcacaattttgtatgatgttttagaaaagtgtggaattttttattttaagaaatcttagaaatcagtttaatgtaattacctcattatctggatcgagttaacccaaatcatcagtgagtaagtgaattatacaaggtcagacagctagcagaagatacaacactctggcttattaaaaagcctattaaaaaggtgagtgaatggcattggatagtttataaagaattcatgagaaaacaagattgaaagattgctaaaacatgaagtctctatattgatagtttttgttattacttaaaaatatgtttgtggaaaagtacattagaaagctgattatataatagtggaagaagatattctagtacctataactgttagcgatttcagaggggacctccctcaatgcttttctaaaatctgcccacttctaagaaaatatgaaatctcatagtatcaaaaacttagactcacagtcactttattaccacagtctcagaagatttttcattaacttctactaatacggggctggactaaaaactgaagagcagtaaagcccagagggtttgctagcaacacaaaacacacctgccaggccaaaaccaaacaaggcagaaacaggctttattcctccctgatggtctcttctggtctctctcttggctcagaggctgagactcagcaaaacactagaaagctaaaattccaataacaaaaaagtgaaatcgacagtaaaatggttaagagcaaaagtgatgctttaggacaaaaatcaaggaggtgggtaaatatcttggaggatcaggagagaggcaaaaacgatgaagccagtaagaggtggtagctgtggaagcagaaaacaagattcgacctctaaagctctgggactctgagaaaaaacacaaggcagctgcagcagaactgataccaaagaggtgactgaaaagaagctaattaatacctgtcaacttaccaattttaatagttagaattatttagggtttcgatgttttaaaaataaagcaatgaaaagaaacatgaaataaatcaaaacaggaaacataaaaataagccaaacacatcaaccataacaaaaaatacaaatgccttagaaaaatctcccttttaaaaaatgttgtttataatgaacatgtaataattgtacatgtttatggggtacaggggggtgtttcaatacttgtgtatgctgtataatgatcaaatcagggtagctggtatgtccattgcctcaaaccttaccatttctttatgctgataacattcaagatccgcttttctagctatcttgaaacatacaattcattcatatcagctatagttaccttaaaaaatccaaaatccctttttttttttttttttcttgagacggagtttcgctctgtcgcccaggctggagtgcagtggcggcgcgatctcggctcactgcaagctccgcctcccgggttcacgccattctcctgcctcagcctcccgtgtagctgggaccacagtcgcccgccaccgcgcccggctaatttttgtatttttagtagagacggggtttcaccgtgttagccaggatggtctcgatctcctgacctcgtgatccgcccgtctcagcctcccaaagtgctgggattacaggccaaaatccctttttaaaaagattatttttttcttttttctttctttctttttttttttttttttttttttttttttttttttttgagacggagtcttcctctgttgcccaggctggagtgcagtggcgtgatctcatctcactgcaacctctgactctcgggttcaagcaattctcctgcctcagcctttcaagtagctgggattacaggcatgcgccaccatgcccagctaatttttgtatttttagtagagatggggtttcaccatgttggccaggctggtctcgagctcctgacctcaagatctgcctccctcggcctcccaaagtgctggaattacaggcatgagccacgatgcccagacaaaaagatgataatttttaaactggatttagaacgtttacatctagttatatgctgctaataagggacatgtctaaagaaaaaagacaaagaaaagttaaaaataaattatagacaaataagagagtacagcaatagtccaagaataaacaaatcgaccaggaaacacaacagagtattgagaagcacacttttacagttgcttgacttatgacaaaggtaatactacagtacaatacggaaagtatatatttttcaataaatggtgctaggttaatttgtatagccataagggaaggtggagagaagctcccataatcccctcatccctcatctcaccattcacaaaaataattacagataactgaggaatataagtatgagagacaataaagctactacttgaagaaaaaaagtgttcggagagtatcttcatcatcttggggtaggcaaagatttctgttttttttttttttttttttttttgagacggagtcttgctctgttgcccaggctggagtgcagtgacacgatctcggctcactgcaagctccgcctcccgggttcacgccattctcctgccttggcctcccaagtagctcagactacaggtacccgccaccacgcccagctaatttttttgtatttttagtagcgacggggtttcaccgtgttaaccaggatggtctcgatctcctgacctcgtgatccgcccgcctcggcctccgaaagtgctgtgattacaggcgtgagtcgcctcgcccagccgcaaagatttcttaaacaggttgcaaaaaagcactaatcataaaggtgaaaaaataatcgtatgttaaaattaagaacttctattcgttataagacaccgttaagagagtgaaaagacagaccacagagtgggagaagatattttgcaatatgcatattcacaaaagacttacatgatggatagataaagaatttctgcaaattaaaaggactcaaacaatcacttcacataagagaatgttcaattggcaaataaacatttgccaattgaaaaagtgtttaaatatcattatacattaaggaaattccaactgaaactacaatgggttatcattgcatttccactaggatgactgaaagtaaaaggattggcaataccaagtgctgtgggacaaccgaagctctaatccactggtgctgggagtgagattgttacaactactctagaaaactcttcggcactatctactctgaatattaccatagccaattacccagcaattccaatccagttttctaccaagtcaaaaaatacatatatgcatgaaagataggtttaagaatgtacatggcagcactacacaattgccaaaaaccagaaacaatccacacgtgcattaccagcaaaatggataaatcacggtatattcaataaaatgtatttctattcaggaatgagaatttgtgtgctatttttacatgtgagcacatgaatgaatatcataagcataatgatgaatgaaagaagttaaagtacaggctgtgtgatttcatttatatcaggtaccaaaatgcaaaactagtctatagtgttagaaatgaggttagtgtttatttttggtgtggaactgtgcctgggagggggactggggaagaggccttctggggtgctggttccatttcttgctccggaaactggttaccttggagtgttcgctatggaatattcatcaagctatttattctcatttctgtatgtttgtcacacttcactgtaaacttgttaaaaattcaaagcaaattttagactgtgttttcaagaaaatgcaaactaaaagtaagcagaggtagcaatcatattctgatattctgatatcataatatcagtagaggcaattcacagcctgaaatactgcatgaatcaaagaatggttttctgtattgacaacagattaatccgccataaaggtaatcagttacaaacccctatgcctcaaacaaactagcatccactgatattaagcaaaatatttgtaagagaaaatatttatcaaaaacatattggtaggtgcatgttgagcatagaccagctgaagaacaatccagatgtagatacataataattcacaccagcagaggcatagcctacaacagcatgaatcccccctcctcactaaggccaattgcactcttgccacttcctttgtaagaaaacctgtaaactaatatggctctgttcctggtaaatcaaccagctacttgctacttgatggcaggtcccatacatggaccctcctagaggggaagtgatgatgtgttcttattgttcacagtacacttggaatgagacggcatggcagatatgctgcagcatcgggtaggccaaagtggaaggagaaggtttccaagctcctcgctgcgtcagttcctccccaaggccgtcactgaccttggtccatgtgtgcccactctgtaaattttgttgctttgagaccttcattgtccactcatgacccaagttaattagcaggaacactggccctaacaagaatctccagtcttagaataggcccatccattacttagtgtaagacgcttgatgggctcacaccacgttcccgtcctatgtataggaaaactgtgcagaatcaaagaatgtcagagcctacgtttttatgggcatttggcctaattttcttgtgctgtctgggaaaggaaatctggaagtttccacctacacaaacttacaactttgtttattttcctttcaagtctccttctgaggccaagacgttggtgagatgaatagtccatttattgccccgggtcaggccatcacagtcggtcattgcacaatgtgttttttatgtgtgaacttggatgctaaatgaagaacactaaagcaggcgggcggataggggaaatgacacaaacagccattgggaatgaatggccttgtttaaagactgatttaaaagatgacggggtcacagtagaccctaccctgaatttcagtgagcaatggctgtaggaaaataaacaattctagaataaaatatatggaagatagtacccaggatgcagtaaataaagttgccataatttaatctgttagagttcacttgtgatctctacagccaaaggggaatttgtaaatacagtgaaaagtcacaggagatgataaatgatgttgccaagtgaaatgtaaccattgttataacaaacgtatactgagaccacctgcccagctgccatgctaagagaacaaaaaataaatgcccatgccctaagtggggcaggggcagaatctattattaatcactcacacataaatatgaaaaagtctagtaaatccatttcattgagcttagtctgataaagaagaactggggaacgtttcagggcccactgaggaaaggatgaagttcaggttggggtcagggtagatgggaaaggcaggctactaaaaatggaaaataaaaatttttgagggactggggacagctgtctttcctccaacccaggagtaaggagcctgccaggatttggatcccatctccttctcctgcgtctccctctgcgattgatgaacaccatcttatttttaactagaacccagtcaagcaggagacaattttttcttgtcttagtagcccagtagctgttgttcctccttaacaatcgactcatctatgccttgtgggcctgcgactcctggagcttaccctgtttctttgaattgctagtaaactgcaaaccaaatctatgattcacccttaccaaaagttttgcagaacttcattttcattagtgtatgttgtggactcatctcacgtctggccccatttcatgtccctacactttcctttcctcccttttccttatcccgcaccccaaaaccaatgtctattttatatcatgttattttaaacattagatatagatttccaaaaccaccttaaatgttttgattcaaagttctaatatacatacatggaatcagagtgatttttaataattgtggtgtacaaaacactatgtgcctttttggattggctttgcaggaaaagacatttttttaaataagatcaacaaataaaggaatagctaaattggaacttggaagcagaattccaaatttcttgccttaactggtggctcacacactcctcagcaagtaacgaaaatattttagatctgtggtcaagtaagctcctccatttcataagttcaaaagcaagaaaaatatcagggaattaatacaaattctactaaaacttttagagtactctgttttagaggggctctatgattgctaatatttaaagctatatattgtgaagttctaaaacgtaagatgaattacaacatttccctaacccacttatcacattttcagggcatgttacatttcagaggggcatatatttggttcttataatttgtttactttgattgtttcattataaaagaaatacaagtttgtgttaataaatgaatgataaagtaaaagacaaaagtcttcatcctcttgccctgtcctcaccttaatccccagaggttacgattgttagcaacttggtaactatccttctagatcttttctatgtatagatacatacaaatgcttgagcattgatgtaatgtatattataaaaagaagctttctatttcaaatggatccagtggatacaacacaatttacttacccattcggttatttaacattttcaatgttttctcccatttgatttcagagctgaaggggaaaacagagagtggcatgttagccccttattaacgcccatcattttgtatgctcctgtccacattccatattgaatcctagcacatcagtggatcattcacttactctctctttcatctacagcaggaacgtaataagaacaaagatggtcatactctaacagtcacatcccagtggcttcatgttccctggacaggactgcattcaccaatatgtatcccagtgcttgtgattattatagtactgtgtgacatttgcattacatctgtaaattcccagaatggccaccagagggaatcaaccacccagcgcattcagagctattgagtctagcgccaatgacactggcttagctcttatctcgaatgtgtgtctgcttacattggctagcattttttaaaattagattatatttttaaaatggccattactgaactcctctccaattaatatacggaacaatgcaggcaaagtgcttcagacagtgcctggctaaataaacacagtaagttattattgttattgtcattcataagccattttaaaaagaagagaaccattccttgctgtgctattatccctaacaaatatttcctggcaaaggctcatctatttagtaacagtccaatgcatagttaccacgccgctccccaaagtgctttggtcttggttgcttgattaacttcaggataaatgagtggccctagccaagaagacttttacaatttttcattcttattttctgttaaatatatgttgccttatatacctctctctccccctccgcatacaataaaatgcatttcatgaaatacacacattatatagactctttcatcagagaatggagggagatattctggaaaaatgcattttttagttaccaccatcgccaagatagacttttggacaatattaagcttgttgtcactcacaaaccttattcaagcatgtccatgccaatgatgaatggatactttctctaataagtgctcacaaatacagctatgggaggattccaccaaatttacctcaatttccattatttcaatatgcatttacacatattctgatgtttattgaccaatgctccgtaaaaatccaaaggcaaatgagtgaatgatggtaagcctcgagaccacacggtggcgctgtttcatcatacttgagagaggctttagcactttgcaggagaccacggccccctgaaaacagaagaccatgaatacaagaattgccttccctgtgttactccaatttgaatgagagaacccagtagagtttaacatttagcattaattcgtatctaaacaacaaaacagcaccaaaatgcaaatgtgaggaaatcattgctgaaaagtgggttgttggagaaatgatacataaatgcttcatgctgttaatttatgctaccacttttcatagcaatactgcaagctctccctagatgtgcgaggtgttttcactttcatgcttatattttgttctccacatgatccagtgaagcaagcaagggggctttgatctctattttacagctaaggaaactgaaacctttcctggcacccaaagattgcaaaatcttctgcagcacaaaagagttttttgtgtcctaacatctctctgatgcttgtgagaaagtgtaaattccagtaggcactttacccaagccaccttgaggctctggttttttagttcatcccaccccaggcccaggcagatatggttgaattctaaggtttccattctttcccattgaccagagcaggctggcacccaaagtgctgatcaggaagaaggcccctcttccaccaccatcacagaatccccaaggagcttgtcttccatcctaggcatgtaaaatgatttactatctgcgcccttcagctgtagagctgaaatctgcatcctgtacctagtccctcatgatagggaagaggtagaaaacaaaacaccctccactcatttcttattcatagagcagccaatgtaaaatatgattacatacatgatggattggatccgacagatagtataaaaggcaagccggggaacattaactagggaatggatttttcaatgatttccaatgtctcttgtagtcaacagtgaagggaagggaagggatgagacaaatgcaaagagacacacacataactttcagtatcaaactttaaaatacatttcactctcagataaaggcttattgcgtgtttatcctatgctttgctgtgtgctttatatacgtgatttcttatttatttatttattgagataggttcttgctctgttgcccaggctagagtgcagtggcacggttttggctcactgcaacctctacctcccaggctcaagcaatcctcccatgtcagtctccctagtagctgggactaccggctaatttttgtgggttttttgttttgttttttggtttttggtttttgtttttttttgtagatacagggtctcaccatgttgcccaggctagtcttgagctcctggactcaagtgatcccccctgccttggcctcccaaagtgctgggattacaggagtaagccaccgcacccaacccgatctcttttaattacctttgttctacagaaaagattaaaaaaaaaaaagaggttccaagaaggaagtaaagtacctcaagtttacccacctggtaagtactgagcaggacttgaatccagaccttgtcttgcacacccaaactgctctcctcgtccatgagccgccctgcttgcttcccggaccctgacgctatgatggccaggacctacctgtatgtttataaaccactatcagctgctggccactctaaataggtggcacctgagaccagacgcaaactcctgagaagcgagtgaagctgaagcctgaggcccttcttcctcacaggcctctgtgagttctgtgaggagtcatcgagttttccagaagagaggaagctgggttgcaatcagaaagcatttctaatcagccatttttggtaaattgcctaaagagatcttcatgagaaaaaggatctaaacttacaagtctccaataattttttgtgatatcatttttcattctaaagaaatgttcactttcctgcctaattttgtatttgtaattgtatattctttttaaaagaaatcatatgagctttgggcttcacaaaatcaggatctcccctgcctgtgcctttttccagtgcttaaacattttgcctctcatcccctaaaaagctaaacaatttattgtgatcttgaagccatcattgctgggcatagtcctgaaatatagttttcctgcaaaaggagagggaggggaggaagaaggaagggaagaaggaagggaagaaggacagaaatgcacaagattatatgtagagttagtaattcatttaatgttaaggaaggaaagtcaccaccattacaagcgcctctttaaaaaaaaaaaaacacccttccacatagactgaatctcgtcttctcttatgaaggttctaaattcctaaagatggcttcagtggaccatccaataatcagataaaaggtccacattgccgtggacacgacatggctaaagacaggacctagactttgttcctgggattttgtggcatattgttaacacaaatcacctgattacgttagccagcaatgatcagtcatgtattctttcgccttcatcctgcttctccagttagagggttttgaaaatcccttaaacaattcaaccacttgttacggaaggtttccacagcctcttgtctcctttgtcacacagaaattcccccaaatcatcttggctgcttacatctacagagctataaacgggatgcgagtcctcagcggggaacaccagagccctctgagggtggggagcttggcgtcataccaacttcctggacccacactatctgggttcactagttatactgatcagactggcaagtcctcctatgggaaaccttgttttgcgcccctccatagacatcacctttgtttttaggtagtattgatcacccgaggattcgggttcaggcccacgtcattctagggtctcagggtcagagcaagtaaggtgataaagtaaaaggggttaaataatcttataaacacatattcacactggagatttccattttttctatttctttttatgaaacgtttatgcacgctttatggttctaaaacacaggctgctgtttaagccattcacagagatagaaaagaaaagagaaggagaaagctttttaaatgtgggggcaggggaaagcggttagtggaacttcatctgctgagtgttcatacagagcagaaataaagaagtgtgtgtctatcctatgaagcctataaatcttaaggaaacccaactgttgccgacccaaaagccttctgcaaatttgctcttcacagtatctgaccctccaggctcattgttctgtgttttcctggattgatatggcctaaaatcaaaactgcattcatagctcggaagtaatttaatagctctagtctagaattaaactttttggtcattcattttgattaattgctaaaagaaattctggcgcttatacccctaaatacaattttattttgtggaaacagaaaacttattctacaaagaagtcaacctctatcataaattcaccatccaggcttgagtggtttgacgtctgggtgctgtaccttggagacatataattgaagcccacgtgtagatgtagaggtacttttaaaaatttcctccttgaagatgacgtttaactccacagagtagctttctttgtcttaattctctgggcttccatttttaaaagaaaaagctatcctcaaaggctttatagggttattaattacacaatgtcacctatcgacagaagaaagccactgtgacagtctctagctgtctgaaatttaagtaggcttaccaaagctcttaagacgacaaacacatgcatttgtaggacggttcctgtcccactgaggttaactaaatggtctggggatgggcaaggagaaagaaggggagcacttgcaaagtagctggctccactttggaggaaaaaaatcctggggttgtttttgaggtccggctgagaaccaagagcaacaacaaatcatctatatttttttcagcgcatcatgtctatttttcacgtagcaactcccttccgggcattcggaaaacgctcctcgtcggatatttctacccacaggatgctctttctgtttaacatggaagtagctttgaattctctctgcaaagaagaggtccggtatcccggcgggagaagcaaagtgccactgggtgctggaacgtggaggagagggctcgcaggaggaagggtggggcttgggaaggaaaaaggcgcggctcggaggagaaaccggctgctcacaatccgcgaagccagaagttacccggctcgtggaaccacgtccacttcccccagccagttccctcctgggtttcattcttaaaaagcgatttgtattggtgcctctcttccgtgtgctacaaagagaagtgaccgctagagggcaatatgctgcaaaataagaatttgatcgcacatgagaagagctgaaataataagcatacagatagaatgaaatagaggtattgtgaagaagtgtggtgagtaggctttccaatccctgttctccatatccatacaccccctcaaatatacacacttaactgaatggcaaagtatctgcactgcagaagctaacccatcatttttttctctctctctcttagtttctgagagttgggaggagttttagggaatattgaactcctcgacatcagaacagggtagtttctggaagctttcaccgttcataagcccagagtataagatcaaagtagtggttctcaaccgggggccgggaggggaggaggggagtttgcctcccaaggaacatttggccttgtctggagagatttgtgtttgtcacagcttgggggatggggtgaacatagatactacatagatactagcacctagtgggtagaggccagggatgtcactcaacatcttacaatgcataggacaacctctaataacaaagaatcatcccctgcagatgttcatagtgccaaggtttgaccagggtcaaacatgagtgcacagcttgtagatgcatttccatccagtgagggtgtggttcagtcctcagcacttcagctcttctcagtgttgacaggcatctcctatgcattgtgcatctttcccctaagtagacctgctccatgtgattgaaatgtgttgccgcaggtaagctggtctttcagattcctgcagcacagagacccatttactgcaaggcatctgcccactaggacccggactggcagagccttctgatgtggattccccagcccacccttaagggagcctctgggcactttagtcagggacctggcttcctccacttactagttgtgtgatcttaaacaagtctttcagcctcctctgtaaaatggtgatgataatgacacctacctcctggggtcttgtaaggagcaaatgagctcacaggtagaaagcctggtaggcccataagggcgtaggcattgtcttctctttctcccatagtacatgattcattctttgtttcccttctaaaggacttagcccaaaggcatgtgccacatctgtccttgtcttatcacatttaattttttttaaaaaatcttattttaatgggtcattactgcatacttcatctttgtcttattattattcaattattctgtccagagacagtacagggtgatgatcacaaattcaagacccagcctgcctgaaactgaatcctgttttgcccctccctagacagctgatcttgagcgagttatttaacctccttgaacctcagttgtcccccctctaaaatgggtgtgataacagtacccatcattgtacagattaaattaattaatattggaaaagtacttggaacagtgcctggcacatagtagtactaaataagatataaataaatgaaaacgatggtgatgagattcatactatttcccccaacacctaaaaatccaacctaaatgcaccagaataacaactgatgggatggctgaagctaaacttacaatgccaggattccaaggtcattcatctacaggtagggggcttgaggaagagagcttcttttgcatctgagaacatccatagtgcaggagccacatctggcccagtcctgtaattttactaagaaggcaactcgagcacagagtcaatggtgcacagtagggaagcaggaccagaacctgccagtcaacaccacagctcactccttttggcctacattgagttgcttcaatcaataaccacggtactgatctgacactgttattaaccttctctgtgacttgcaatccgcttccccatatcctgcaatggtgtggtgtggcttatcatttgccctctgagaatatttgatgcctcaagggacactcaattcaaagtacctagaaaatactagctgggtttttaattcttctaccagtagactggacttcaccttgaatagaataccactaataccactgaaggaaaaatttagaggaaataacatcaaagagtgaacactacacaactatgttattacagaatttttctcaaaaaatctgctgcccttcaagggtcactcctcagatactcaccccattagcaccttatagttacgtagatgtgtttcttacactgtgttgtaactacaagtttatttttcttctcattctatgaaatttttttttttgagatggagtttcgttcttgttgcccaggctggagtgcaatgacactatctcagctcactgcaaacctctgcctcccaggttcaagcaattctcctgcctcagcctccctagtagctgggattacaggcatgtgccaccatgcctggctaattttttgtatttttagtagaaatagggtttctccatgttggtcaggccggtctcgaactcctgacctcaggtgatccacgcacctcagcctcccaaagtgctggggttacaggtgtgagccaccgcgcccgaccattctatgaaatcttaaaggcaggacatttgttgtcaactctgtcctcagtagcccaggcacagtgccaggtgcacagtcagtcttcataaatgtttgctactgctttggatggtgacaccacagtcaccaccacaggaagcagattgcaagtcacgggcgcaggcccagtagggcagcattttcccagagcgtggcatgtggaccatggctgagatgattttaggtggaaagagattgattttagataggacatggacaaggtataaaacaacattgaatcatgtaatgagaaagttattccttacccagtgatccttcaacatttctgatttctttctttttttttttttttttagacggagttttacttttgttgcccaggctggaatgcagtggcgcaatctcggctcactgcaacctctgcctcccgggttcaagtgattctcctgcctcagccccccgagtagctaggattacaggtgcccgccaccacgcctggctaatttttgtatctttagtagagatggggtttcaccatgttggccaggctggtcttgaactcctgacctcaggttatctgcccacctcggcctcccaaactgctgggattacaggcatgagccaccgtgtctggccaacattgctgatttcttcagggagaaagtctctggtggtaatatgtcttaatctctctctctctctctctctctcctatcaacatcttttggacaaactaaatacacctgaggctgaaagccaagaatgtttagcagataaaaatatctacctagaatttaacacattgttctcaatacatctctttatgaccatcttttctgcacagcaagtggtaacatcagtcttcatttcccatctctgggtaaggcaattgtgctcagcaaatacccctggtgtgcacctccacttccagcccctttgcacttagggggagggtcatgtgactggtcttcaccaatgaaatggggtggaaacctatataacctctggtctaaggcattgacgagcaggtgcacagccctccagtcattcttcctctgcatcagtggccctggaggtcacattttgagatggtggcattatacaatggagtgagcatggatttaggcattgccatctgtccccaagaaaagctgccctggaaagtcatctgacttgcattggatttcacatgaatgaaaactaaaccttttttattttagtttattttattttaccttaagttccaggataaacgtgcacaatgtgtaggtttgttacataggtatacatggaccatggtggtttgctgcacctatcagcgcaccatctaggttttaagcccggatgcattagctgtttgtcctaatgttctccctcccttcatccccctatcccccgacaggccccagtgtgtgatgttcccctccctgtgtccatgtgttctcattgttcaactcccacttatgagtgagaatatgtggtgtttggttttctgttcctgtgttagtttgctgaggatgatggcttccagcttcatccatgtccttgcaaaggacatgatctcattcctctttatggctgcatagtattccatggtgtatatgtaccacattttctttatccagtctatcattgatgggcatttgggttggttccaagtctttgttattgtaaatagtgctgcaataaacatacgtgtgcatgtgtctttctagtagaatgatctatattcctttgggtatataccaagaaatgggattgctgggtcaaatggtacttctggttctagatccttgaggaatggcaacaccttcttccacaatggttgtactaatttacactcccaccaacagtgtaaaagcattcctatttctccacagccttgccagcatctattgtttcttgacttttgaacaatcaccatggtatctcattgtagttttgatttgcatttccctaatgatcagtgacgttgagcttttgttcatatggaaaaccaaacctttgctgtgttaagcctttgcaatatcagcgtttatttgttactgcaacaaagcctagactatcccgactaatacatattttaaaacttttaagattataaatgagtgaatttaaagaaaatattaactacacaatggtccaggacataacaaaaatgtttgaaagtgatgctcaaatgccacctagtgcttatagtcttagagttaattttacaaaagagtggaaagtcactcccctcctcctctcaccaggtttcccaagagacctggaccaggctagggtaaagtgcagcccagggctataacagaacaaagtgaaattgtagtttcaaggatcaaatttgctgcctttttggcaaccagctgaattaactgactctaaaaagcagaagcagtataattagaatcattaggagtccagagaaaaagacttaaaattacccacttttccctgggtggtatgacaaactctcactgtctttgattttatgaagctcagctttcctacagccctgtcactctacaggttggaagcgtgatttcataccacgtacttcaaggccaacttttccttgtccggtcctcatagtctcacgtgaagtttatgttatttgttcattcccattatgctagacagacaatggatgcacacatagttttcatcttggggatgatttagtaatgatcaaaagttatactgtttcaaagtgggaagcaaggtgcacagactcgcttgcctccagttaatttctcttcctcaaagaaaagtccggatggaaggaaccttgagacttagatacatctggggtgctgtgacaaagaaggaaaaacacaaaacaagttattagggaacctgactccaacactagttcagctgtttggctttgagcaagcccccttgcctctctctgcctgtgttttccatctttaaaatagaaatatcaacagttaccttagccaggtgacttgcagtgatgtggaggcagatgatagacacggcactgctgtgaaaatcgcatgaccagcagctaacacaccgtgagttctgggttctcaccacgtaatgtactctgtgctgggcacttttcatacttctcatttaatcctcagaacaacatatgcagaaattgcactattatcccctttcttttttgtttttgtttttatttttgtttttttgagacagagtttcattcttgttaaccaggctggagtgtaatggcaccacctcagctcactacaacctctgcctcccgggttcaagcaattctcctgcctcagcctcccaaggagctgggattacaggcatgcaccaccacacccaactaattttttgtatttagtagagacgggtttcaccatgttggtcaggctggtctcgaactcctgacctcaggtgatccacctgcttctgcctcccaaagtgctgggattacaggcatgagccaccacacgtggcctaacccctttcacagatgagaaaaccaagacttagttggatagggtcagtcgcttcctagaagtcactcagttaccaaggggtagggccagaactcaaagtcaagtgccagtggccttggagatggggcccattcgaatccctgcccctcaaagcaaggtgtggcttgttatcaagtctgggtctggcttctctggactgtgacacagccccctgttttgaaactccatttttccacacggggttaatccaaagagcctgctgggagaagagaggcggccgcaagccctgccagcatgttacacgctgcttagcaaccggtgaaaacaagcaggaagggaaaatgagcctcaggctgccggggaggagtgaagaagggggagactttggtccctgcctaatctggttgggtttgtgccgcgatgggcatgcgctaatctgaatgctttccccttagtgttacctggtccctgtgctgaggagatgccaggaccaacaaggaagatagaaaatgaaaagacctcatgacctaagttcaacctccaccttagcatttaggctgcctgtagaaggtgtgtgcaggcaccagccctcgaagggcctggagataagccagaaaaagagctcagttctccaaagccactgttgactgagcccctgagagaagacaatttcaaatgaataagaaagccttgataaagctccgcccatccaggaaagaaagtaggggagaatttcagacttccagctaaaaggttggaggttacagtaacctccagcttgcccaggatatctttcttttgcttgagtaatttcaaaacatctcaaaatctcacagaaatcttcatgcctaaaatctatctatgcagtaggggccacttcatgaaaagtaattaatcacatgacattttgattaatgtaaggaatttgaggaatgtgagtttcaggaaggtgagaatgtcttctcaaaggagttctctaacggaaataacaagtaatgtaccattaatggaagaccagcatatctggaaaccagtgtgttccttgccactaactgcctgtatgtctttagggatgccatttatgtattctctcatcacacatctaaagaaccaggctgggggaaaagatacaatggccctgtctggccctggggttgcttaatgtctctggggaaggctgaggcctgaacaagccagtagcatttagcatggtccatgcactgtgtgtcaccatgggaaggcattatggagttgctgaagctccagtggaatccagaggatgaagacaagcttggcatgtgtagaaaggggagacaggtattgcgggaggaaggaactgcgtgcactgccttgtgggggagtgatgtggaacttcatggatcaatgggactggggcacagtgagtttgtagggatatagcagaagataaacctggacacgtaagccaagctcagattcattccatagtgcattcaacacattgagcccctaccatgtgccaggcagtgtgagagcaactgggatagagaaaaatccctgcctttgcagaaattccactggcacagagtggaacaaggtcctgaagttgaaggaaaaaacagagaagacaggtgaagcacagcatatattatatgacaaggactaaggcaaaatacacccatgagaaggggcacaaggaggttgcattttagtttaaacatttgaaacatgttctataggaggcaagagaacaagccttgttggtggctaaggggagaacattccagaaagagcatataggacctgagtactatcttagctcagttgtactactataaccaaataactgagactgggtaatttataaataatagaaacttgtttctcacacttctgggggctgggaagtccaaagtcaaagcaccagcaggttggtgtctgatgaaggctgctctctgaatccaagttggtgcctcaaatgctgtgtcctcacatgacagaagggcaaaaatgtcctgggagctcccttcaacctcttttataaggttgctaatcccattcatgagggctctgcacctcctaaagaccccacctcttaaaactatcatattggcagttaagtttcaacatatgaatttgggagacacatccagaccatagctagtacaagggggcaagctttgtcttcacagttatggagataatggagtttaatcccagaatccaaacaagcacatttcagtttttgaaaggaccacttttatacctctagatagcaggcaggtagaaggaagcattgggaaacaactggaaaatttcagaaaagacacaagagggctctaagcgagaaggagttggggccggggtgggatttgaaaacagagatagtggaactagtggttggagaagctgctgctgtgtaaggctggctgggggtggggcaggcagagggagagaggatagtggtgacagagactgttgggacagggaggggttatgaggtgatgtttgatctgaccacctacttactatgcccagtctttggtgatgtgtcctacctgatgtcacagctctgaccaggacaagaagggcggcctgcaccctgcttctggcagtcacctatgcacatgaaaggctgctcctcatgcctggggacagcatgtctctccatgtgtcccagcagcatagcctcactccatgaggaaggatgcatgtcacaccaacagctggcaaacctctttattgtaaaaatcacaccctaccctaaaagcacatggcaatgaacatttctgagtggaggaggatgccccggtgtctgttaattagccaggaagccatgcttgtttcctagtgcagggtgactgcacagtcagttgtatccaatttgctgcatgaagctaatttgttttcagatataaatgaaagctgctgtcccaaacccaccgtgctgcttttccatagaaacacttcagtctgtgtttaatgaattttaaagaagaataaaatatatacagaaaactgcacaaatattgaagtgcacagtttgatgaattttcacaaagtgaacgcacctatggcaccagcatccagctcaagaaatagaacattccggcactccaaaatctcttgcccgtctcagtcaccacccctctcaaaggtactctgacttcaaatagcatagtttggttttgcctgtcttaattttttgtaagtggaagcctagagtgtgtgctctttcttgcattgcatcatgtccacgacatcgtgtttgcaagattcatcctcattattataagtagcaatagtttattccttctcgtctctagacaatattccattgcatgaatatacattttatttatctattctgctatggatgggctgtgtctaggttttacctgcattggaggctgctgccgtaaacattttcatacatgccatttgctacaaatacatacaggagtgcgattgctgtgccgtagatatgctcacgattagctttagttcagaacatatatactaccaaaagtctctctgctaaacacactctggtaccctggattggatcctgggacagtaaatgggcattagggtaaatataggtggaagctgaataaagtctggagtgaagttaatagtaatttgttgatgttgtgacatctgtaccatggttttttaagaggttaacattaggggaaattaggtgagaggaagtatatggaaattgtattatttttgcaacttatgtgcaaatctaaagttattccaaaataaaaagttaatgaaaaagaaaaaagactttcttagtgcacacctcactaagaattactgtggtttttttttgtttttttatttaaaaaaaggctttacagcagcatttatctaacttgcctgatgagattcacctggagcaaattcttgtacccatttctaaaagattctgatgtcagatctgcaacacgacccaggatcagatttttaacaagtgctcacctcaccctgagtgccctatcagacaagctctaagaaataccgaattacactgcagtggaattagcatagttttaggcatcagctaaactcaggtccacattccatgtcaattacttaccaggcgggtgattatttcagcatgttacataacttgctggaaaactagtagtaataatgtcttcctgtcggaccactatgacatctaaataaggtgctgcaagatgcctagtacggggctgggcatacttgggtttgtgtaatagttgacctcaacaccttatatacgatttttcccctctaaggagaacagaagaggctaataaattgtgaccatggttcttaaacaagttacactaagtctcatgccctttttccagaagatagctaacatcaagggagtgggaactacaatctcctccgcaagtccccctttatttggaggttgtatttgctcgttcattttctgatagtggacatgggccaaatgaggacagagtcagactggacattcccacagccttctgccctgagggagtcactgattgcctgtgcagagggcccaagcacgactgtggcgtgaaagcaacacccttctgtgtcctcagttcccagccagccaccccagcacaggctccagaacagctgggatgctggatgaaatccccgctttggcgaagcacaggaagcagtgtgggcacaatatgagcaccgcgcagcattgtgtttcatgggaaataaagggacagtaagctcctctagctgctttttgtctcttgatgtcctgaagcttccatctcattgtaatggaaagaatcacccctaatcttggcaagtcctaaagtatgctgccatgaattgtcagttcccttgcccaaatgagataatttataatttttcatcatttgtgaacatcttagaaaaatgtttaaggtcctaggaagatgggcatggtagaggcattggctaaaaggcaaaatagtgaagaggtaatgaaggtttgaggcctgaggtgcagtgctggggacaagggcttacagagagagtgtacaccaggatgggagcagggacagagggtgaaatgggggatgttcctctaccaaaggacagtaaccctctccagcaaggccactctcactgccaggcctactctaaccacccatttaacacggagctggtgggacctactaccacgactacactactactgttcaaagtatcatgccagggcccttcctgcccctgtcctcaaatgccatccaagtccaagaaagtgttagatggtattataacatctcaagtctcttttgccagttaaaaaaaaaagaaaacaaacaaatagcaaaacttcctattgagaccaaccaaagcaaaaaaagagaatttactgggaaaacctaagggtaggcaatggagtgcagccggcctcccaaacattctagaagcagaatgtgacagtcatcagaaccaaggcagtgacttgcccatgtctggaccatctctgttctctgcttctcttgacacttctgcttcattacaaaaccaccctctccctttcctgtgcacatggcactgttcatatagctaaaaataatggccccaaactccagagccctgccatctccaaactctagcaaaccaattaactggataatgtttcagcttctgggagaaaaattctatggtgcccagcctgggtcaggatttggccatttccatctggccacgtaaactaagtatgttccaggcttacagtccttcatgtacttgtgggtagaagggtagcaattttccaagaaacaggtttggtcttagtggataccccaaaagatatttattactggtggaaaattactgctactgattcagaaaatatttttaggtcctctgtcatcttcttcatatctcccctggttatcagttctgttatctacttgaatgttgggatccaggtgagaaagaagataaagtgaaggaagacattcatgacaaaccattgtaacttcaaaattatctggggatagaccatagagtctgcagatataacaagactgcctgattgttctttatcccttcaagcacttaaaatttatgttggacaagaaatgtcagctaattctgcaaattctacttatggcatggaggagacgcatgcacaactcacgggctgaaggcacaaacaggagaagccatgaactgttaaacaaaggaagaaagacagggtggaaaggccaggaatgaaaaaggatctgatagcaggaaagctggctcaagttaatgagacaatgcacgacttgacattcctgatggatgtcagtggttcagtgctaggcagaccttctgagatgacaacttccattcaaacctcagccctggatggcaacctgaaacccaaggccatgagcagcgagtgtgtgtgagcccagcatggattagtgcggtggccttgggaggcccttccagacggctgcttcctccctgtgtaccattacccagaaggcacgagtgctctgggagctacaacaatactaagtaattaagataaaatgttcttggctgtgtttaaggcatattcttttatgacaagaacacagggttagttgatgaactaatttttggtggggaaaactgcagcatctattattgaactaatttttggtggggaaaactgcagcatctataaatgaatgctttggatttttgtttgtttgtttttcaatattcccattataatttcagttcggatactccagagctcatgttccctaatttattattgcttgctacggtcctcagggatacagtaattgaattttactggcatgattaccatatccatcaacaagcgagtcttcctgaaataaatcagtcaaagcctgttggttggccccctttgctccacaggagaggtgcccagagcagaatccagtctcagcaaagaaaggtgtagtgtttctctggccagtgcaataggctactgcctgtcagccaagtgcaaatgaggctgtgtgtggccagctctgaacatctgtggaagcaataggagcacaaggatatttgaagaagagaaatgaaatatatttttgaagaagagaaaataaaaatacccctccaaagggattgccccccaaatgaccagattctaattctattgcagtcaaaaatagatgagcttctgggagacggggatgtgcatacttggttgagatccaggaaattccatgatgcgatgttaaaaattccatcgtaaaagaaaaaaaaaagcagatggacagcctacatcctctccttcttacatccaaaacaggaaaataaaaatcataattgtagatgcattttcgggctgcacaggcacatagagatcatctaaatccacactcctcattttacatgacaggctcaacagggtaaaatgaattcttatctcaatgtgatatttaagattttttaaaaagcaatctgcgtccttcaaaaattgacacccaaatacaaagtgcataggattgggctgtcgctcacctcctctgagcccctggggcaagtcgctgaacgccgagccttgcggcttcatctggaaatggaaataggcatactgttggcttctgtgagaactgagattagacatacaagggtctaacaaagctcccggcacccagtcttggctgaatttcattctattttgatatttgttaaggaaataggaaatttatttttaaaacacggtactattaggaagtcaagtggctgagaagaccggacgcttacaaaggagctgctccttcccaagcagtacccctccacattcgagaacacaggagagaaggcaggcctcttaggtgagcaccttcagatttctaaaggcataaggccaaagatttcaagtaattttgcctgggcagctaaaattcacatgccactgggagtctgcaaaaagctttggagctttaggcgctctttgacccatacgtcatatttcaactcagataccctcagggtcctctgacagtaggtgactgttctgatgaacgagtatgaggcctacgctccattccccaggcctcgtgtttccacatccagatcctttgtcagaaaagattgactgttccaccatttcctctgcgttttcctgcctctttcttgttaaattcataatgaagagaaagctcccaagtgaatcaccatcaatggattggatgctgctgtgtgttaaattgtgtctcccctacaatttgtatgttgaagtcttagcccccagtagcttagaatgcggtcttatttggaaatagtgttgttgtggatacaattcgttaagatgaggtcatattggaatgaggtgggcccctaatctaatgtgactggtgtccttataaaaaggggaaatttaggcacagatagtcccaccaggaggacaccaaatgaagatgaaggcagagatcagggtgatgtacccacaagccaagggacacctaagaatgccagcaaaacacggaaagccaggccagaggcatgggacagtggaacagatttcaaactccaggccagaaagtaatcagcaccatcctggggtgaggggaggacacagcaccagcattatccagggtcacatccctcactctggcctcctctaatcagatggcaatccggcaatcttagccggagagatgataacacagatcatctattttttgcagccttactcggctcccttataaggaaaaactatgtcccttgaagtcttgcagactgaggagctattgtgaatctgatcttttagaggagagcctaatgccattttcccttttcagtaaaaacagaaaaaagttaaaagacgaaggaagatgtaagaaccaaatactctgtctttctctctctctcactctctgtctctcttacacacagacacacaaacaccacacatctatacacatacattcttttccactggactgtgcctctttttctggctatgtatgcacaagaatagagatattggtgtctgccccctggagtaatgatgataaatatgtcaaggtcagcagcttcatcagccattgagacagctcactcgggcaactgcagataatcattcacctggtgggaccagttgcctataccttaattcatgcctcacagtgttgctgaaatgttccttatctcacaaaaacacttgtcttatgtctttctggtgcagaaagaaattcataaattattgctatgccttgcattttttttggtctcagtcatgattttgtgggggaagaagttactcaagaacgaggacgaggtgaaaaataagtcatcagtgtgcatgcaacaatatcttgttccatgtcctataaagcaaaaactcagactcagtagttccaaagatctttgatgaaaaatttctcctactgtcactccctttgtaagaggactaatgctttaccaaggttttaaaaattctactggcatttattgagaacctactatgtgaaatgcaccatgctaggtgataggacataaataagacataatcccagatttattatatgcaatatgaaatctacaaatagtgcactaaggggagaaatctgtactaaattatccaaatgctcatttttgaaaactgtatttctacattaaagatagaaaaagtactgtgcttccagttgaatgtactgtcttacagtatctgtcaatttttaaccatgactatataaatgtatatttgggtgaaattacagctagtaaatgacttgcccccaacacatgaatgaatatcacttttatgaacagtgtctggcatgtgtgtctcagtgggaaaggactgaacagctgccttgcaacactcatcaataagcaggtatccaggaattctattcaaagccagccaggccctgtggagacacaaagagaaatacaagatagaatgattgtccttagggagctcacaaaccagtggaaagaactaaccctacatgtcaagacagagtgaagtatttatggctgcaagatgaactgcacgtccttcattaaatatttaagtataaataatgtaacactggatagcgccccatacatgtgttacataaattgagagaaataggtggggaaaaaaaaggccaaattggttagaactaaagcatgggttttagcattacacgggagggaaaaaatcttcaccatgcaccctaagaacaatcccttgatttttataagtcatcttgtgtacacatgaggtgacaaaagttatcaggattgacaacaaggactctggagccagccagtgtcacttcaaatccagctccaacagctccccactcagggacctccgtcaagacacataacttctctgtgcctctgtctcctcctcctctcctctgtcatctgagaaagtaacagtacctacctcagagggtagatattacgaggactgaatgaattagtgtaggaatagctcttaaaatcatgcctgacacaaaatacatgcttataaaggtctgctaaattaaataaacaaaataccctatgcctcaaagtagtttatgcttaatgagtcttacataaattaaataatacatgtgtacatatgcatgtatatatatgtatgtgtgtgtgtgtatatatatatatagagagagagagagagaaagagagagagagagagacagagatggtctggctctgttgcccaggctggagtgcagtggtgtgatcacagctctctgcactgcaacctctaacctcccaggcacaagcaatcctcccgcctcagcctcctgagtagctgggactacaggcatgtgccaccatgctcggctaatcatttctttttaattttttgtagagacgagatctccctatattgcccaggctagtctcgaactcctggcctcaagcgatactcccatgtcagcctcccaaagtgctaggattacaggtttcttaatacatgtataaaaccaagataaaaatctcaaatacagcttctcccttctataagatttgccatattgtaagtcagtaatatctttaatgtaggcaatattaaaattaagcatttttattttcttttaaacaatgagctatttatttgtctatctacaattttgagacctggtggtgattgtatagtagtaagtttgccacagtccttaccaggagaggagcatctatgaattattccacaaaataagagttctaccatatctctaatccattgtgctcctcttctccaaccaattttggtttcagattgagcacttgtttaaaatttaatgtgcacaatagacagttattgctttttttgcaagacaggattcctttctaatcttctctgtatcattccaattttagtatatatgctgccaaaaagagcacagggttcctttccaagcaaatgcaatactcagaaagatgtctaagtgggaaatcatgataccaggattgataatgttctgaagttgacaccaaaagcctcaaccacagggctgttaagcagacacaattatttactctccttcactggaactttcttagatgtgacctaaatgtaatctgatttatagagctgttcattataaaaggagtctcatattaattttatttggaaagggtttccccccatgttttacataatgttgaggaaagagaagagctaagtataaagaaaacatatttctgggtgctaatttgtatatattagcctaaagattacacaaatttaagaatacctgtccatgtgtacaaagtctcaaaaaacatagcctgtcaaataaaaaaaaaattcttttttactatacacaataaatgcggctaaaaaagaaacagtttttaaaggttatggacatgttatttgacaaacaaatctgtatgtgacataataaaattgataactctttaccaaggctcataagagagaagatacaaatttccagtatcaggaatggaagtggggaacattactatagattctactaatattaaaaataataagaagaaaatattccaataagctttatgccaataaatttgatagcttagatgagatgaacaaattctttgaaagccacatattactaaagttcatccaagaatattagataatctgaagaatcctaaatccattaaataaatttaattcatggggaaaaaaacctttctacaaagaaaacttcaagcaaataagccttcactggcaaacctatcaacatttagaaaagaaataataccagttctatagaagctcttccagaaaatagaattggaagaaacagttctcaacttactttatgaggccagcattattctgaaaccaaaaccaaaaacagacattacaaaaaaacggaaaactggagacaaatccattatgaacataaatacaaaaatccttaataaaatgtgaagaatttgaaaccagtaatatataaaaatgataatatatcataactaggtgggatttgtcccacttagttgcaaggttggttcaaaactcaaaaatcaatcaatgtaattttcaccatatcaacagattaaagaggaaaagtcatactatcatttcaatagtgcagaaaaagcaactggcaacatttaacatcccttctcagcaaattataacttcctcgatctgatgaaaggcatcatgaaaacactgagctgatatcatacttaatgtgaaagattgaatgctttactcctaagattagcagtgaggcaaggaagccttctcttactactgctattaaacagtgtgttgctgtttttttggttttttgtttgtttttttgagatggagtcttgctctgttgtccaggctgaagtgcagtggggtgatcttggctcactgcagcctctgcctcccgggttcaagtgattctcctgccccagcctcccgagttgttgctgtttttaaccagtgcaataaggcaagaaaaatttataaagggcataccaacgggaatgaaaaaataaaattatctttatcacagacaatgtgattatatgcatgaaatattcaaaagaatgtgccaaaaaactacaagaactaagtttaatggtcaatgtataaaatccaacttatttctatagactagaaaatgttcaattggaaactgaaattttctaaaagtgccatgtatactttcgatgttattatataacatcaaaatcatgaaatacttatagagctaacaatatttgatttaagatttgttggctgaacactttaagacatttatcagataaattacaaagaactaaataaattaaaaaacacactgcattcacagatcaagagtcagttaagatgtcaattctttcccaattcatttatagatttcatgcaatctacctcagtctaaatgtttgtgtctcctccctccccaaatttataccttgaaatcctaacccctaaggtgatggtattttaggaggtggggcctttgggaggtgattaggtgatgaagagagagccctcatgaatggggttagtacccttataaaaagaggccccagagagctcctttggtttgtccaccatgtgaggttagaacaagacgacagctgtctgctaggaagcaggcccttaccagacattgaatctgcccaagccttggtcttggactctccagcccctagaactgtgagaaataaaattctgttgtttgcaagccactcagttgatggtagtttgttacagcagcctgaatggactaagatactatcaagatcacaatcccaccagacatttttcttcaggcaataacaagccaattataaaatttatatggagaatcaaaaagctaattggccaaaatcaactttgataaagaagaataaatttggagaacttatgctacctgatttcaagactgcctatgtaatcaagacaatttggtactggaccaagaatagacatacgaatcagtggaccagaatagagtttcaagaaatagacacacatatagggccaactgattgttttcaacaaagttgcagaggtcattcaatgctgaaaaattggttgttatcttttatatataacaaaatgtactggatgactatatattcatatggaaaaaataaaaccaaaacaaaaaaacattaatcttgcttgcttgcttgatccatatctcacaccataaggtatggatctatttttaaaaccaatttgaaccagtgaatgaataaacaatgtggggtatgttcaggcaatggaatactactcaaaaagccagacacaaaatgttacatactgtatgattccatgtatatgccactctagaaaaggaaaaaccatagggagagaaattaaatctgagatcaccagggattgaatttatgggaaagggcattgactaaaaggagcacaaatgaactgtttgtggtaaaggaaatggtctatatcttgattatggtgctggctaaatgattgtatgcatttgtgaaaactgatggaactatacattcaaaaggggtaaattttactgtatgtaaactacacctcaatatagcttactttaggaaagaagaaaatcaaagcaaagaaaatggaaagagaggctacatgatagctaatgcatgatcctagattgcaccaggaggcaacagctaaaaagaatgttattaggacagttgatagatttgaatatggattgtggattagataatggcattttatcagggttaaattttctgatcttgataattgtactgtggttatgtaagacaatgtcctattcttcagaaatacaactgaaatatttagtggtaaaaaaaaaaaacctataatgtctgtagtttattcttaagtagttgacagagagaatgagaaagcaaacaggacaaatattaacaattaggaaagctggcccaagggtatacagaagtttcctgaaattttcttgcagctcttttggtaagtttaaaattatgtgttttttagaagaaccaaacgagacacagaaagtagaaataattgtgatactaacaaagaggaggaaggagaacagccttagtcaaattatgtgtaaagcaaaaacaacaaacaacaaaaagccgtgtgtgtgtgtgtgtgtgtgttttcagaagttaaaaaagaaatagaaaaaaaacaacaacaaccatgtcaccaaataatgagtgtgaaggcagtaaatgtacataaataagagcttccaagaagcaaactacgttcttctcagagccggtcacccttttccttggcaagtaaaagaatgccttagagtaaaagaatgtcaaagagcctttccaaataaaagggatacagggactgacaccttctgaagggtgagcccgggccagatggcggtcaggggatatacttagccgttctcatctgtggagcccttcctgacaaatggggaatggtaagtgggtagaggggagaaaggacacaagagtagctgcatttttaatgtctggtaagcacccccaaagaagaaataataactgtgcacacgcctgtaatcccagctacttgggaggctgaggcagaagaatcgcttgaagccgagaggcagaagttgcagtgagccgagatcacaccactgcactccagcctgggtggcagagcgagactctgtctccaaaataaataaataaataaataaaaataaataaatctattaattttttaaaaattgtgcacacgtagcaagggaacaaaactcataggcgcatcactagaaaatatcaaacaatcccaaagtaggtgtggttaccaatttaaaagacaagattactcacggggttttaaaaacaaaaaaaaaggtaatttatggcatctagaaaaggcggccgggtgcagtggctcgcgcctgtaatcccaacactttgggaggccatggcaggcggatcacctgaggtcaggatttcgagaccagcctgaccaacagggtgaaaccccgtctctactaaaaatacaaaaattggccgggcgtggtggcgcacgcctgtaatcccagctactcgggaggctgaggcaggaaaattgcttgaacctgggaggcggaggttgcaatgagcgagatggcaccactgcactccagcctgggtgacagagcaagattccatctcaaaaagaaaaataaaaaagaaaaggaataggggtaaggggcacagcagaagcagctgggaggataaaaggtacagctgaccggcggggcgcagtggctcacgcctgtaatcccagcactttgggaggccgaggcgggcagatcacgaggtcaggagaccaagatcatggtgaaccccgtctctactaaaaaatacaaaacattagccgggcgcagtggcgggcgcctgtggtcccagctgctcgggaggctgaggcgggagaatggcgtgaacccgggagactgagcttgcagtgagccgagatcgcgccactgcactccagcctgggcgagagtgagacaccgtctcaaaaaaaaaaaaaaaagtacagctgaccttcctgagtctcggattatgtatctgtgaattcattttctcaccaaaatttgtttgtgaccctagaatcaacactccatagcactgtcatggtcattcgctgacatgcttagggcagcgaaaaatctgagctgccattcaggttcccagctgaggctgaacaaggtgatgttctgcctttttgtttcagctctcatgctgttaacaagagtccttttcctagtctatttaatgccacgttttccccatttttgtgctttttgctggtgactttgctgtttaaaggttccccaagcatagtgccgaagtgctgttagcttcccaagcgcaggaagctgtgtcttatggagaaaatatgcatgttagataagctccattcaggcatgagtcatagtgctgttggctgagttcagtgtcagtgaaccaactacgcacgcgtgcacacacacacacacacgtgtgtgtgtgagagagagagggtctcactctgtcacccaggctggagtgcagtggcaccatcatacttcactgcagtctcaacctcccaggctcgaacgattctcccacctcagcctcctgggtagctaggattacaagcacatgccaccatgcacggctaattttttattttttatagagatgggatctcactatattgccaggctggtctcagactcctgggctcaagcaatcctcttgcctcagcctcccaaagtgctgggattataggtgtgagttaccacatctagccaacaatatataccacataaggtgtctttaaatagaaacatacataaattaaggttacatattgattgatgaaaatgtgaccagaggcttgcaggaacccagtgctgtatttcccctaggagcaatggttcagcattcatgaatccagtgtttgtggtgactttactgtgaataaaagaatcaactgcatttcaacatggactagaaggaaacacatccaagtcacaatggtagttggctttgaggacaaggtgtggagaaggaaaccaaaggtatttgtcaatagagacatttaagactgaaaacaaacattacaaaatgttaactattactgagtggtgctaatatgggtatttgttttaatttgtaattattttaatttcctaaagtaacaatccttagaaggacacaagagttaggagagaacggaataagaggatggaggccaccattcaaagtgtgtttccacacacttcagtacccatatactaagagccgagtgtgaaatcagctgtggggtaagaattacttaaccaaaaaaactgtaatttggtaaactgaagcctgctacatggccacagctggtcttaatatgcaacagggctgtcctgtcggcattaactatggcacagagctagcattataaagctttcattagtttgaaagaaattttgtggatttacatagttgaaagatgctgttgcttgaaatactggggcatgacaatttatttccctctagcatctgataccatttcacagccaagttataaagccactcacagttctgtgtcaattagaaatctcaccacctgtaacttaaaaatctttccaacagttgtaatggaatatttagatactctgccctaagataaagcaagcaggtatcaggaaactatacgttctttcctaattatttcagtaattaaaatagttaagcataatctccaaatacctcagtctccccatgcaaaatgaaaagaatactatttgccacatgactgaaaaggatgaagtgacttgaaatccctaggaaaaaaagtatttgtgcatgcaaagtattgttttaagtaaactaaataaagggacacttgaagatactatctataagttaatgggaaggcaaattgccaaggcaatcctaagcaaaaagaaccaaggtggaggcatcacgttacccgactttgcactatgcgaggctacagtaaccaaaacagcatggcactggtacaacaaagggcacatagactaatggaacagaatagagagctaagaaataaggctgcacatctacaactatctgatctttgacaaagctgacaaaaacaagcaaggggggaaagactccctattcaataaatggtgctgggataaccaggcagccatatgcagaagattgaaactggaccccttccttatgccatacataaaaatctactcaagatggattgaagactgagatgtaaaacccaaaactataaaatgctggaagataacctaagcaataccatcccatacataggcgtgggcacagatttcatgacaaagacaccaaaaacaacggcaacaaaagcaaaaattgacaaatgggatctaattaaacttaagagctgctgtacagcaaaagaaactatcaacagagtcaacagacaagctaccattgaatgggagaaaatatttgcaaactgtgcatctgacaaagcatctgtaaggaacttaaatttataagagaaaaacaaacaaccccattaaaaagtgggcaaaggacatgcacagacacttttcaaaagaattacacaaatgtttcaattaactagaaaaagaggaggagaagggttaccataattccattacctgaatcctctgattggttatggcttaagcagaaatgccttgtgtctgaaacttcttaatcaaacaatttgttgccctgtgtaaatactactaccactgctacatctcatatttactgaacatctgtggtgtatctggcgttgttgaatgctacttacccatttatgcctcacaatagcactatgcaatcaggattcttaggctgctcattttaactgatgaggaagctgaggtagaaattaggtaaaaagaatgaatgcaaccctctaatgactaagtgccttcatcacttccttaccatcattcccaactttcatgatgctatactttctgaggatggtgacaatattgatactaggccatggtctggaattgggaataaacttctagcactaatatgcttcatcaccatttaccttccagtcttataagaacaggagggagtgcttaaacacaaataacaggcaattcagttctctcttttaatggtttcatatatgttgctgtagttttggtgacaatcaggtgtgtgacaatttagtgaaggtgttctgatcacatgctaattatttattacctggtagccctgcaaaatcccctgcattatggaagcagtaatcccattggttgacctgaaggtcccacaacattacagactggccagtggctctttcactgaatactcctaactcataccaagtttattcttttttccttaggaatgttatcttttcataagctgtgtagtgacaaaaatcaaaaattacttccagctcaagataattccttcatatttttgaccatgagagccaaagggcttgacttttcatcagtttcctttaaacaggcaatgcctgctgagacccgatcacctgcaccttgatgtcactggtgtccaacagcactttcatgctgtggctgaccatctgcttttagagccatttcattgtttctttgcacataacatcacacatccttttcttaaagtccatactcacctatgaaaacggaaataaaaaacattaaaaaggacagaaagacatcaagcttatgtttcatttccataaatgggaactgcattgtgtcattatgaaagtgtataaaatatttggaaactccaacaaattatctctattagtgggtttattgacataactggacataacaatgtataacatttattcatctcccactgaaagacttcccagtgaaactaaagtagaacacagatccaggcattaggcattttcagtgatgttctatggctgaaaaggtgggtggtgaggagaaccagaggccttgtccatacttgcaatgggactcaatattaccctgctgggcaaaagaaatagctaggagatgcaatagtgctatgattgaaaaaagccaggagcacaaaaggtgccagatagctccctggttgaaaataagagcaaacaacactactgctctcatgtaccagtatgctctcaatctaaaataagccctggcagcaaactaagaatgacagtctatttcctgtggtttattaagttttggccccgcagacgagactgccagaaaagcagctgtagttttaagtggtctggacatttactcatttgaacataaacaacgatcagctcattcagatggctggttccctactcagctgttgagaagagggcaggcatgggtcaatctaggccaaacataaaaggagtgaactggggtgaaagacccggggctgtgatggattccctgagtcaccaggaccctcaggggcttaaggccctaaacagaagattccactgtcagccttagcaccattgcagtgacctccatggtactccactgccaataaatccataaccactgtgaccataaccacagtgtacattctcttagtgactgcatttttagaccacacataaaattattaatgtaaaccaaaccactacacttagtgataaacatgtacttcataaatagcagggaatgaaagtatcccaaatagttggaaacaactgaacaaataaaggatcctacccctaagtttaaaacaaaaacatttaaaagaaatactgcaactattaactaaaagataagatttaataacacagtaagacactcagttggggagggattaattgcaaaatatatcattatttcacagtgaggtttaagtactcataacaatcttctggttttagtagaacagatacccactggtgtatttttttcacatttgttttctataatttcttcccctctactatttcatataaagacactaatgtggtcaaacattaaactatcaattgacaatcaccttttgcttccctattaggaaataaccttcattgcttaactgcaactcaagagaattagggcacagtcaaccatgtcactgataaaaacataagaagtaatgcatcacatttattccaatctaaacacactgtcacagatgtggtaagtgaactggaacactggtgttccccagtgggtcatcagctacatatacatcacattcttttatcaaatctggcattgaaatttccttttccatatataggtttaaaaaaataaaattaaaaaagccacaggagcaaccctgacagagaagtcttgcatgcagccttctcctgagaaagtatgtaatcttagttatcctcgaagtcagcaagcgctcttgtactgttaatattaaaaggaacataataaaatggcccagtccaactaaaacagtccttgagtctattggtcagttcgttaaatgtcagagcttttcacatttttgaaaaaaaaaaatgcgtctcttattaaactttaaggtatcctgaatgctctatcagccaacataaacgagttccttggcgggtatgttaaactttaccacctgtttacatcccccttcttggcagagatcaccaaaccagtggagtccctggccaagcctcctttgtaatggtaataagttccttccttaaatagaaacaaaacttctctgtttgacactgagcaaacaaaaagcatgcacccaaatatttctggccatgttgggggcacaagcaccccctttctacccccaaagcctggcttctgcattgcagtgctacaaaagccattcgcatagctgtgtcaaagcctccaagcgaagcctccgacctcagcatcccaccatccatttgtcccctactctggctctgaccaccaagtaccatccatttacttctcgagtattgggaattgggggatggtgcccgaattggccctctgtccccaccggcctctctggcaagtgcacaaaacggcacttcccctgaggtgggctggtgggcctcacggagaggcggctccttagggccaatgagatggtctctatatgccctggacctagtcggcaaatcgctgcaggagacggtcctcccgtctcaggctgccgcccgcgccgccgcccgcactgtccatgaagcggtcgcaggggaattcgatgaggtccgcctcactgagcgcgcacacggtggtgcgtggccggtgcgactggaatcccgagaagtcggcggacacgccggtgcccatggagcgcaggggccgtcgggtggagtacatgtgccgaacgtggaccggggccccgcccttccgcctagcccgcagtttcctacgcagccagcgagacgcccaggccgccaaggccaggagcaccagcagcgcgttgaccgtcagcagggccaaggtcagcagctggtagtcgacgccgccccggctcccggcctccggtagggtgaccagccccgcgcagtggtcccggggagccacagggcagacacggcccccaagcacgccctccacgcacaccaggtagggggtgtccccgcgcagctcgcgcagcgtggccgagtcgctgctctcaggcaggtagacgaagcggtggaacttgggctgctggccaaagcggtcaaagagcaggcggaagcgcgcgccgcccagcggccggggactgcggtgctcgcgcacggcccagcgcaccgaggcgctgtctgcgcccaccgcctccaccgtcaggttgcacagaatgaacttgttgaagtcgcatgggtcggacaccagcggcggcagcccggccccaccgtcggactgggcggcacgctcctggtgctccgtgcccagacgatgcttcgtcgcgcgctgccaggggtcgccggcgggcgatggcgcagagccaggagaggccgttggggtgggctccgcgagggcgggatctgcccgagtcggacggccccgctggggcttcttgtgcaggtctagggactgtggagccgggcccgcggcggcagcgacggaggggctgggctgctggaggcccgggccccgccgactcagccttagggcgctgcggttgcctaccagctccctggcggccccatcccaggccaccccagctagaaatcgcccctgctgctggagctgcggctgcggcggcagctcctccgcgagacctgcaggtggcgtcatctcctcccctgcggccgtgggtaggggctgccgcctgcggtcagcggtcagggaagctgagggcgagggatccgcgcaggatccattttgcagctgctggtcatccaggtaatccaggtatttgcctcgcagggccggggggtggcgacactgcacgaagacagtgaggagccggccctgcgagtgccagtcgcccatccagcgcttcaggcctcgcagccggcagtcgcaggtccagccgttgccgtctagatccagccgataaagggctgggctggcggcgaagatgtccccggatagggcgctgagcgcgttgttgcgcaggctgagctcgcgcagccggcccaggtggccgaaggtggccgggtgcagggcggacagctcattgccgctcaggtccagcgcctccaggctgtgcagaggctccagcagcgcagttggcagctggctcagccgattaccctccaggcgcagctcgcgcagggcctccaagccccaaaaggcctcaggcgcgaggtgcgtgagctggttgcccctgagcgagagcaggccgagacgtggcaggtgctggaagatgcgcggcccgaggtgctgcaggttgttggccgagaggatgagggaggagagggagcgcagcggtgcgaaggtggccgcgtggcgcagggagggctgtagctcgttggcagagaggttgaggaagcgcagcttgcctagctgggcgaaggcgttcttgcccagaaagcggatccggttggactccagatgtaggtagagcaggttgcccaagggagcgaagaccgcgtccggcagcgcccccagggcgttcccgtccagccgcagcttgactagactctccaggccctcgaaggagccgcggcttaggcggctgatctcgttcccgttggcgtagaggatgcgcagcttgcgcagcggggccagcgtgcccggggcgagcgcctgcaagaggttgttccccaggtacagctcttccagccgcgagagcttctcgaaggtcttggggtgcagagagcggatctggttgtactgcaggtccagccgtctgagctgccccagacggtggaagtcgaaggccgtgatgttggttatgaagttgccgccgaggctgtaggtgagcacgtcgtgggggctcggccagcgagctggtcttgggcactacgcggagccccctgttggtgcacaggagatgctggggatgctggcagtcgcagcgctccgggcacacgggctcggcagcggcgggagcgcgaggcagccgcacaccacgagcaggaggcgcaaggcgcgggcagcctccatcgcctcccgccctgcgtgcagcggccggatcgtcctcttggcccgccggctctgtgtctcctctgcattccccttagcctggccagagtcgctaaatggcctctttcggacttcgcagcgccgtccagcccctcctccgtcctttgtccggaggccggcccgggtctctgcaggcgggcttcgcccggccaagtcaggcggcgcggggcgctctgcagaccccgggtactacttgttgcatttctgtataaaactgtttctccgggtgcgcgtcggcgggcgggaggagggagcaagacccggcgctttttgtttgcagctgagtccggagagctggattccctggcgcggattctcccagccgagtggattccccagctgcaggcgggagccgttccaagagcttcgcggggcgcggcttggcagcagagccccggctgctcggcccccgcagacggcaccttctcgctcgcggtcccggacggggagggcggctccagtgcaatagctcggggagcacgcgggctgcgtccggaagggacccaagtctgcgagcggagagcaaacggggcggaaattcgttcttcccacactctgcccgcggggacgcaggcggagaaagaggagacggcagagggaggacagaccccggcagggggaggaggaaacactaagtggctccgcgtctggtcagcccgggcccgggatgccaagtgagaaaagtagggattaaaaacagctgtacgggccggacacgctaggccgggggcgggggaggattaccgggctagcaaacgggatttgcagacagagacctttttattttagacgagtacaccagccgcttctgagcagtgggagcgcgcctggccttcctcgttgttaagtcacttgctcttccaggtgccaccctgcgggaagtttgggcagcacggagtccgccagcattctacaggaagtttgggggagcacaaggttgcctgcagaaggccatcagaagggggtaggtgaacccagtctgacagttgctgcttgggttttgacgtcgttggactagtagctgaggagaggcaccacccccttttaggtgtctgaagggagtatttactccatcctgctgtgggctagaacatgaagaaatcacagaactggttctgccaacatgaaagtgtctctgccacattttggtgattcagtcgcattaactctcctacagtaatagagcccctggggtaggctctgctcgtgtgcacatacataataaccttcacagatcctaaggtaaacgttccttgcagggccctcctgctttacgcctggacttgcagtgatcttcaaagtctttaggcccaaaaatgttcaggcctggctcagttggggaagcattattatttattatctctagggaatggagcatttaatcaacggctcctttgggatcagcccctgctgagaatgagaatacacaaggaggagttgttaattattaattattgtttctttatataaaccatcttgctaaaaaataagggcccttcccctatccaaggtgttgagaaaacgtaagttttgaggacgtactctgcaacaatgtggaaaattaaaggaaagatacagatcctcacctgaagacaatgacaatctagtgggaagggcaatgaatgcattgaaaggttagataataatataaggcagtaatagagaacaccacaaaaacaaaaattattttttttgaggtgggatctcactctgttgcccaggctggagtgcagtggcataatctccgttcaatgcagccatgacctccagggctcaagtgatctgcccacctcagcttccctaatagctgggactaacaggcccttgtcacaatgaccagctaatttttgtattttttataaagggggagttttgccatgttgccaggctggcatcgaactcctggtctcaagcgatcctcccaccttggcctcccaaagtgctaggattacaggtatgagccacaccacacagggtgacaaatgatttttaataattctatgtttcacagtaattgccccatttagcaattaatatagtcaagtgatagagggaagttctgaatttagagaaagatgagatcgttggcagggtagtcagtggtgacttcgtgggtgagcagggaccttggctttgcagggaggtgagtcaatgataattccaggagatgagcgctgaggggtggagctgtgatagtcctgaggagcagcacctggcctgagagtgtgaggaaggcgtctagaagaggggaaacctgtgctgagtttgaggggtgagtggtattacctagaggaaggtgagcagacgctcaaggaggagaagcctggggacacatgcaaggagggatttagaaacctccacatcttctgtctgcatatttagggtgagctttattaacttattctttaacagtatcatacaccctagcttatacagtgacttgaaataaatattcctttattcccctttaaggatttcagcaggtagctgatgtaatcatatttgcactacaacctcaagaggaatctctgcctaaataaacaaagtaggtgctatacaaaaaaaatgttgtcttcctagttcttgccttctaggtccttgaaatctgtgacagcaataggtgtgagatgtgtggatagagcatccagactgaggcattcagctataccacgcacataggcatcttgtagatactgtgaatgcatctcctcaaccaggccaatgtgggcgctgtctgtggaccttgtgctttacagggctgtgttccagtcctcctctggttgtgcaccttccaataagagcaggatttcaggcctcaaaggagatgtgcacacccataccccgcttcctactcagagttctctagaccctggaattccctgtgtaactgcctaagtatatataggctgccttcacatctgttttcctagtggccagtcatgccacaagtgtgtatactcctagggccaagggaagaccaagggggcagctatgcaaaaaagaatctggagatgcaggctggagtttccactggcaggcccccagaagacccctcataatgcaggagccagagctgggaaggacagccgtgggccagtgagtgacctttcacactctaatcctgggcttctcaaattttgaagacaggcctgtctatatgcagctgtttttggaggggagaaagtaaatgtactttgattttagaaagtacaagaagaaaaaaatcaggagtttgaaggaaagtgggttttttgttttgttttgtttttttcctcactgcaatctctgcctcccaggttcaagcaattctcctgcctcaagcctcctgagtagctggaattacaggcgtgcaccaccacacctagctaatttttgtatttttagtagagagagagtttcaccatgttagtcaggctggtctcaaactcctgacctcaggtgatccacccccctcggcctcccaaggtgccaggattataggcgtgagctaccacgcctggctggaaagcggtttttagaaatgtaagttctactttattataacataggctgtgcttaattttctataaaaagcaatactttttagtaaaagcaaggacactattgtctctaggtaaatgaatgtctcttaactatgtaatgtctttgttaatggatggatccccacttgatcaggttctaggagattcaagtattggttacacttaagtgtataatttgcataatcacaactggaaatccaggaaggaatgccattcatgagagaagacaagagctttgtcatttcacttttggaaagcttgcactttaaatctcaagtgcactgcagggtagtttcagaggtcagaagcacaaatgcgtttgggctgggtccatggcacatacatgtggcgtaagggctctcaggggtcttgcccaggcatggaatcttctcaggcttgccacggttgtgcacctgtgtcttcccaagcaacctgtggttcccttgaacttcagctacagaggtatgaaggattccaggccatgtcttcagcagctcctggagctggcaggagttggtcaggcagtgccctagtgcgggatgggtaagggggaggagaggtctggctgcagggggtgcgaggaggtggagccagcccacttctgctggagcagcatcctggagcttactcaggcagcctgcaggaatggtagcagtctcctcctctcatgggagccaaacccagacaggcagtgtggcccctgacacagacgaagtaggaaacaggagactccccagtgattagctggcatattatcaaatgccccccaaagttgtctttctctctatgagctgcatcttagccccagcctgagagacaagtttattgtcctcgggatcaggaatgcgaatgagatacccactggtttacagaatatccaccaattctccatttcctgggaaatacaggaatgcaggtccctggctaggtacgagccttattaaatcagaatctctgggcagcaaagctgtggcatctgcatttgtaagctaccagatgatttttatgcacactcaagtttgagaaaaccaatagacagtgcttcaaaacacctatttatgactggctgatcatgtaacaacaataataatataataataaccggcacttatgtagtgcttagtgagggccaggcagtgatctaagcactctacataaaataactcatttacttccataactacctggtggggtagaaatgattattgtcttcattttacagagagctctttaaaaatataggatcctagccccacccccagaaaatcagatttggaaccttcagaatagagcctagagattttatttagcacgttaccaggtattgcctggtgaagacccaagcttaggaactgctaaactagaatttgtaagggcttactgagacatttcagtatctcctttgctgggaggctgacgatagaaagaggaataagacaaagccggtgccttcagagagctcagcatggctgggaagatgaatgtacaaaagccaataatccggaaggatagtaccatcctagggtaatacaatgagaataatatgctataatagcaattatttttcgagaggaaaataaggaagaacgaaaacctctgtggaaagcgaacatgtgtatgtgtctcaggccatttacaaagtgactgttccaacactctggatttttacgtccaaggaaaatccttatccatcagttcaaagaaacctgattgtttgaaaccaacatataaacagactgtggatctgcaagaactacagtgaactgtaggcacttctggcaagccaaaagggcaaggcagatgtggaatgagtataatgacttagggagtaaggcagatccaaatgttgtttatggttacagtatggagtttgtttacatgtaactgaaattttatagcagtaatataatgttgtcttcccttaaaatgaaattgagtcagtagccttaggagatgctgtaggtacaaatgtatctcttaagtactgaaatatttgtcctgtctgggaaccagaacggtaattgtattttatgataccacttgccactattcttttattgggccttctccacatgacactaataacatttatttagccatttatatccccacgaaactggaagggcaatagccttgttttatttcatttttgtggtgctcagcaactgttgttgaattgtcaaagttttagtaaagataaggaaaagaaacaaaataaaaatgttaacagttaccgtctttaggtggcgagaaaatacatgttttcattctactttttgttattttctaaatggtatacaaatactatgtatttcttcaaaattattttttaaattttaataagttttcctgtctaatatctggttttaacatccatctaaatctcaggagagaattaggtgaggattattcatatccccagtttggaggagaggatgctaagagctagagaggttagctaacttctggaatgatccaccagtgtaatgggagagtgcagaccacgacagaaacagatgagcctcagcaggctccccattgatatctgcctgtatgtacaaccagtggggccagttctgtgtgatattcaaaatatttaacaactggtacagcaagggcactggctagtcaggtttgggcactgactggtcaggaaagacaacagccaggaacaaccagccctgctgtgccagtgtccagcagcttcaggtggactcacctgtacttgattcaaatttctgaatggtgctttagatgtaacacttttttcttcgtaatgatgttatttaaaacaatttgcatgaagcttgggcacaataatcagtaaccatgagaaacaacacacagaggcttcttgggtccaaatgcttccaaattgtaaacttgcctggggcctacgtctctgggcccaagttcatcacagtcattcatactcaacaatagcacgttgagagggtgaagatgattaactttgacaaaagcgtgagttttattttcaatttataaatcagaaatggtatcccactgtcttcagggagctgacatatactcaaagggaatttaattctttaaaagttctattgtttcacaacttgatctgaattgttataattaatggcttaaaactgtttgtaggaggtcacctctatctcttttgaagagtatcagcttaacagataagcaattcggccgggcgtggtggctcatgcctgtaatctcagcactttgggaggccgagggggacggatcacctgaggtcaggagtttgagaccagcctgaccaacatggcaaaaccctgtctctactaaaaatacaaaaaaattagctgggcgtggtggcgagcacctgtaatcccactactcgggaggctgaggcaggagaatcgcttgaacccaggaagtggaggttgcagtgagacgagatcacaccattgcactccagcctgggagacagagcgagactccatctcaaaaaaacaaaacaacaacaaaaacgattagcaactcatcctgtaaattttcaaatatttattatccaaacctggatggtgcatgggtccttccttccctcccctagagctgcagatgtctccttattctaatgtcactgtatagggcccaaataagggaggcagctttagacccatgctgccgaaaactggggctttatcctggcaagaaacgttctgtcagtctcagtaatgaaaacaatcttggacagttaaataattgactctatacagtgtaaataccctaaaagtgtttgcagatttcatcaaaaggccaaatcttcttttacttaaaaccaggaacatggcaggaaaggaaatcagaggaaggaagcatccatccccttttcagtctctgtaattttctatgaagatttgcactttgattatgcttagtaacaccatatgctggagtgggacgcaagatcaaagcctccacacatagcactggagtccttgctgtaggcaggagcaaatatttctgttggtagaatgctaatagatccataatgacactcccagccccccattcatccctacttcatatccaaaatataattgagaaacctcaaacatgaatgcttccatcatctttttctttgtctgctgtaatatgttgtagattgaaaaaggaaaatgtgttgttaccacttagatatttggaactgaagaatgttcaaaagcttaacgtaagtgatcaggttttatagcgttcatggctttagaaatttggaggataagagtttgctgaacactgcttttctttggttggtgagactgcagatattttttcttcattttatttttctctacaatcaaaattttttacagtgaatgtttgtttttgtagctaaaaatctttggtaaaaaatgtatatgatgccattcatatcaactcttgctttctccattgccctgccatgccctgccatgccctgcttcattacaaatgtctttcttagaaacattttttaaacatctatcttggtactagaaataaccttggttagtcagacaatttattgtatacagtgtaaaaccccagaggcatttgcaaatgtcattttttaaaaaaatccaatgcttgtcataaactacccatgtggtgtatgtggggtccacttgctgtgtttcttgcccttgagccacatcacagtctccctgatcagttgctcattttcccatctataaaaagggagaaatcatacttgcccactgtaagagttttgtaaaatgtatgtgaaactgcttagaacacaacaaatggtatgaacatagaattgttgccaacatttcaacctcatgcgtgttttttcaatgagaatctgaggtccttgagggcagaaccaagtcttttgcacagtttcgtagtgttctctgtaacatccaacatagggtcttttctgaaactgtaggtctttaataaatgttaggttcagcaaaaaacaaggaggaggaagccacattcccaggtaactggctttactgtctttccttgtacatctgtttccatcttattatggtttcatagcccttctccaggccacctgggcccagagcacacatcttcggcccacaggttctctctggatagctgcatagacaggcctggattctgggccagctctgcagtcattgagctcacagggcaaatcacttgacggtgctggacattagtttcttgctgtctgatgtaatgtccatgatgatacatcaatgtttgcccagaaggttcttgtcatcatcagtggcccttgagttatgaaaagatgacatgtaaaggaaaggagccagtagtcagactggccctcaataccatgtctaagtcttggagattcacagtgcgcaatagcacatacaaagctttgagaaatcttacagaaaacaaagaaagaaatgggggatgggagatagaactgttgacctagtttgaggaacactgggttacatgttttcaaagagcccttctagctttaaacagtaaggaattgactgcatttcttcaatggaacattttgaattcattgaaatttgttgatgttacagttctttgaatacaatacagtgttttacataaaattgtcacattctacaatggaaggtgcttttccacgttgtgcttgaccaattcaacaactcatggtatccaaccagtttaacattaatccacagtgagcaggataatatttactgaagttgtctccagtctctcacagttctggaaagcttctttgctttgtccccaagctgtcactcaaactagcaaattattagacgtttctttccatcaggatataggtgttagaaccccatagttgaaagcaccgtttggcacattaacaatctaggctaaataactgttgactcttcagaagtattatttagtcaccaggctaacatggaaggggtgtttcctggaaacttagccatttgggaagaatttctatagtttcactattgaaattcttaattagctactgatactagctaattgagctagtatccttgggtttaagaacctcatggataatcagcaggtgactctcattattccctgagtgatggcatgtaagcaccagcttaactaaagttccagagtggttttccatctgaaacaggtggctacaaacacctgccagagtaataaccgttaatgactagcgtttacagagggttgatcatgtgccaggcacagttctaagccctctaccagtattaaatcatttaatccctcaaggacccctgaggaaagtacagttagtcccatctatagataatgctatcaaagcaaagagagattaagtaactggcataaggtcacacagctggtaagtgatgacaatgctgggacttgaattaatattttctgaaaatttttatgcatacttttcacaggaatcttttatcacagtgtccttgtcatagctagagtcactgtttgatacttaacattttccagaataaatcatctgcccattcatacatactgtttgaactgtagcatttttaaatatgattctttcagtggcagttttccacctcaccaatacctattctcacatataattaagtttgttttcttcattcctactgtaggtgtgtattcaggatctccacaatattaccacttattgtatttctttctcctccaccattatatttatttttaaatgaagattagctttttattacagaagcagtgtatgtacattgtagaaagtcacaaaataaagataaccagcaagaacataaaacatttttttcccaccctggtaggctggacactggtccctcaaagatacttacatcctaacccccagaacctatacatatgtttaggttacatggcaaagaggaattagggttgccaatggaattaaggttggtaaacagttgactttaaaatagggagattatcttagagtatgggatgggctcagtgtaatcaccagggtccttaaaagtagaagaggaaagcagagaagttcagggtgatgtaatgtgggaaagactggccagccattgctagttttgaaaatggaggagggggagccaaggaatgccagcagcccctaaaagctggaaaaggaaaggaaattgattttctcccaagcctccggaaagaaatgcaatcctgccaataccttgattttagttccattagacccagtttggacttctaacctatagaactgtaagatcatagatttgttttgctagaagccaccaaaattttggaagtttgttatggcagactatagaaactaatgtacacaccagactagaaaactaatgtacacaccaactagtgattataactgttaaccttttattatatgtatttctagatctttttatttttatttttttgagatagagtctcactctgtcacccaaactggagtgcagtggtatgacttctgcctcccgggttcaagcagttctcctgtctcagcccgagtagctgggactacaggcacacaccaccatgcccagctaatttttgtatttttagtagtgaaggggtttcaccatgttggtcaggctggtcttgaactcctgacttcaggtgatccacccatctcggtctccaaagggctgagattacaggcatgagccactgcacctggcctagatctttttatacacatacatatgcttttttaaaaaaatgaaaaactgaaatgagatcataatgttgtaaattgcctatttccttgtagtatttctctttccctgttaataaaattttattgcatccaatacctagttatattcaaattaccctaattctctcccaaatgtctccccaaagctggcttgcccaaatcaggatttagatcaggatcatccattatatctggtttgtgtaatgcttagatattttaaaatctaaaattgttcttttcatctactaatttttcttcacagtacttgtctgattgcttccccatgctgtccaacatagcttgttcctctgttctctgtacttcctataaattgtgatttagatctgagagtttggttggttcatgttaatacatttagtctagaatacatcttgggcactgtcatatgttttcgtttgaagttacataagaagacacatgccatctagtgcccaccattactgaagctcagattgtgtgagcacttcctgtgtgattccatttaagtgaggttctgaaacaatgctcatctgtggtgatagaaatcaagacagtgattgcctctggtaatggtgggaattggctggacaggatactactgaactttctgggttgatggcaatggtccgtatcttttttagggtgctaattacatacctgtatagagtggtcaaaactgaataatatctgtgcagccttttaattgtataatttaaattatgcctttaattttctaaaatggagcccttaacaaactcgtgaagcagtgacacagtccactttgcttattagtctaaccctggctgctgtctcattctgaatcttttaatactctagcagtcttacactcaactacctgtgactttttaaggccaaggtcttagcttccctagtaagtaaatgtcctaaaacagagttatgattatgccatctcaatgcccttcacaacaatggttgtcgaccgaggctgtgtattattagaatcacctggtatgttagttggctctggctgccatacaaaatactatagactgggtagcttaaacaaaagagatttattttctcacagttctggaggctggaaagtctgaattcatcatgctagagtggtcaggttctggtgagggctgtcttcctggtttgcacagtttaagtttccccataatatgcagccaggattacagtattgaaggtggggtctgtggaccagcagcatcgggatttccatgttagaaatgcagaatgtcctggtccaccccagatctgtgaattcaactctgtattttaacaagacccccagatggtttgtatgtgcgataaagtttgaaaaatacttgtctacagcatcttccatagtctcccaaacaggtgtgcaaatgcttcatcaatcattttttgtttgagttgaaatggatgaaccttttgtcagcaaaccaagttttagcctttttagtcttggaagcctgtcattgtgtggatcttgattacaaataattgtaccttagtgtgaagattttatgcattgcctatatattattgtctattagcaaacaaaaaaaagcagcaaatacacccagtactaaaaacaagtcctaatgtttttaaaaatatactcccaccccagcgattccatccctatgaataattacttccttagcttcaggtaggttttaaaattgataatgaaatagaatatgtacttgcgctccagttgcagaagggaagagaagtggctcttagcacagagcatgaatactctgtagctaataaataattcagtaaaccggggaaaggaaaaacatgtgtgcttaaatagcagagacaccctaatgcttaaaatattattacgtgagactctgtctcaaaaaataaaattaaatttaaaaaaattcttatggtgagaaatcagtattgttatatatgataatattatgtagcatataatgctagtttaaaaaattattacagtaagtatgcttaatactagaaatattgaaaaacatgtagtcttgatgctttagaaagaagttcaaggtcttgtcatccatcaagatcatcaatatggttgtcagtgttgctcatgaagtactaaataaaagattcctagctgacagacactaaaaattattaatttccaccttccgttttcccatctatacccaattagagttacctaatggttatagttctttatttttaagaactattaatttctaaagcctttatatttaaaataccctcttaattccgtatagctacacatttaaactccagcctcagggataatttctgcttctggaaattggtcttctccttctcattttcctttccaccgttaattcatagcttctcacttgttaatatgattaaatagtttgctaaattatatcaaaatggctttctcgtttagctcatagcattgttatattctgtccaataggctgaaaataaaaagaagctaatctttattaagcacacatatatgtatacacagaaacaaattcaccttttaaaaaaagggagccttgataatgtttcgtatttaaattctatttcccaaatggatagggttgacattcatctaattagtgatcagatttaaccaaacaagtttttgttgaatgcatgtagtgtgcccaacagaaatacacagaaatacactttgaaacccaaaaccttttacattcggtatgcagagagaacttatattccaaaattgcaaattattgaataaagaccttgctggttactggttcagtaaaaatttatttaaaaagatttattgggtgtcttttttcattaccttctaaaacaacactagaagatagtggtatttcttccttaaacactatgtaagaacatttacattaataaaatagtgtacagccaaaattattaaatttactttttttatttttagtaaatactttttatactttcattaatttttaatgaaatataaatgaatttcttaaaataaatggaaacattggaaaaagatattcaatggaaagtatgagttctctcagaaatgttttatgcatatataaaaatctatgttttctatataactttatgtattactttattccggtttttcccccacaggtggaagtataccatgtagtcttctctacctcgatattttttacttgagtaattttggagatgcttccatatcagcacatgtagatcaccttattttcaatgctatgtaatattccaagtatggattcaaccattgctatcaatatacatttaaatgtttttcccggtttttacaatcttgtaataagtgatgttgtgataaataacatgtagatatgtctttgtatttcaatgcagaatagaatatcgaaaattgctatgccaaagaatatgtgcatctatcatttttacatattatgcccaatttcccttcaaaaagcttgagccagtatacagtttttgagccagtacccagcagtgtttgagagtgttgtttgcctggtgggcacccatacattgcttgaatgattctctcctttctcctttctctcatcaatgtctccctttctctactggatcattctaatcagagcacaaacatgttgtcatttctcacatctggaaagaataattccttaatggacttcacttgccctttcaactactgccccatttgtgtgctcccttttgcatcaaaacttctagaaaaatgatgtataaactccatgtcttcatttttcttttcatcctctcaagtattctccagttaggactttcagccttgctactttaccaaaactgctcttagcaagtcactgatgactgttgctatatctagtggtgagtacttggcctttgtcttactctgcttgagcagcctttgatagagctgatccattcttggaccactgtcttcacttggctttgatgataccaccccctcttctgaccttagctgctccttccaactctctgttgctgatttgttcctgtatccatgatgtcttgatgttggtgtgcctgggacccagtctttggaccttgtcccttctgtgctccctccatcagtgatctactgtaatcacatggcattaaatactgtttctaccctaaagacacccaaattgtccgtggccttggtgtctctcttaaaggcaaggcttgtgtcttgtgctacctacttgatgtctctactcaaataccatagagaaatctcaaattaaacatgtctaaaatttggtcttgtccctaaaacctgctcctcccatactcttccccacattaggcaacagtcattccatccttctatttactcagacaaaaacccttacactcattcttgacctcacccttttgttcacactccaggccattaggaagtctcattggttctaccctcagaagatatccagattctgaccacttcgcataactttcgtctccaacaccctagtacaggcagctgtcctctctgctctggattatttccacactctcctgcttctactcttgcccccaccatctgttctccctagaacaacacagcagctgtgcgattctgttaatactcatcaagtcatgtcacccctctgatcaaccccctacagtggctcccatctcattgagcatttaaaggttgtatgtgatatccccccaacccacacacacagaacatccctctctgatctcacctcctgttacccttcttgctcacattgctgtggtcccagtagcctttttgctgtcctggtgcccatgtagagcagaatccagaaacagacttgtgtatatatttaaatagctcattttattcactaaagagaggaattgataggctctccaacaaatggggacattcaggattgaactcagacagcctaaagtctggacctcctgggggttgctccatgaaattgcctttcactttgcttggtcttttatttaacactcagaaatgccttgaggtagttttgcacccagagagtgggtaggcacatttgcagactcttcagagtaatcaggtgtgagagagggccaggtgggtattaaaacccatgagttgcttcttgggccatggcagaatcctcacggctcatggtaggaccatccacagctgcctttctccatggtcccttggggatctgggaaactggctgtgtctgagaacatgctgttttgtagtctgccttctctatggagatataaccatctccatatgttttcacaccatttgccattattactggtacattgaacaaacaggtcttagagggttcaattataaagcaaccttatttgtgcttcccaatatcttttttttttttttttttgagacagagtctcactctgtcacccaggctggagtgcagtggcaccatcttggctcactgcagcctccgcctcctgggttcaagtgattctcctgcctcagcctcccgagtagctgggactacaggcacatgccaccatgcctggctaatttttgtattttagtaaagatagggttttgccatgttggccaggctggtctcgaactcctgaactcatgtgatcgtcccacctcggcctcccaaagtgctgggattacaggcgtgagccaccgcacctggcccccaatatcttttaaaatccaatccttgagatatttctttttcattgcctggatgaaactcaggcacgccacagtttctggcccttccaggatgtagggaatgtagggagatagagtggtaagagcagaaaagctctttcttgattggcattaatgtggtcaggtttctccagagttggcacatgtttcaagccaactgtcttgttggggcttcttaagagaccccactgagagaagacctcttcattaaaagacttcttgattttaatggatgatgggttcctggaggggcagaaccaggtggcagctcttatccaggagcaaggtgggcacagttgccgtaatggtcataatggagcagcaagcggaacgtcgtagcatacagagacctttgctattggctcactattcatagtggccctaggacaaactagacgggcagtctactaagaattatctgatttatataatcagaaaatctctaggtctagtgaatagaaacctgagctgttcaatggagagtcattgcctctcatctacattccagacctgagtcagttctaaaacacagaaatccttagattgccgattttcaaaccgtggccaagaagttgcagcaacagcatcacctgggactttgttagaaatgcacattatcagaccctgccccaaacccactgacacaagaactcaggaggtgggtcctagcaatcttcacttcagctgattctgatgcatgctaaggcttgagaactctaaagtttagatgaaggagaggattgggaagtttgaggaaggcccctataacattgctataagtatctagcataaatcttcctttcagtcttccccaaaagacatgcagccattcactagggtaactgtgtactgaggaagggggcatatccaggcttttggtagatttctggacattggttctgagtctatgctaatctctagagacccaaaatgcctctgacccattggaggggggtatcacttattggtaatcaggtagtaaatgaaatttggacctgtggctgcttcattggattccagtgggtctcttcacctgcgatgtggttatcttcccattcctgaatggagctgtcatctcagaaacaaaaagagcccatctccatatggattttctgtcttgtgtggtgagtattagtatggtaggcagggccaagtgaaagcttcttgggatttccccttcctatgtaagagtaaactgaaagcaataccttatccctggggaaatgacagcgattagtacttctatctaacatttgaacagtacaagagttgttctactgtgtcctcatttagctcctctgtctggcatgtacagaaggaagatggttattggagaatgactgtgaattcttacaacattaacaagttactagaccagatgtagtctcttttattggataacacagcagagctcttggcacttggtatgcagctacgaatctggtggatgctttttccccccgataccaaattagcaaatatcaccagaagaagcttgctctcaagcagctggaggaatggcaaaacacctccctatcttacctcaggcctgcgttacctctcctgctctctgacgagaactagtctgcaggagcctggaccatcttggtatcctgcagaacatcctgctgatgtgtaattgacatgatgagcagcaaggagcaaatatcgtacatgccttaataagacaa

SEQ ID NO: 3427 - DNA, 513 bp, Homo sapiens
gcacgagtttgagatggagtcttactctgtcacccaggctggagtgcagtagcacgatcttggcttactgcaacctctacctcctaggttcaagcaattgtcctgtctcagcctcccgagtactgggactactgtcttgcgccaccatgcctggctaatttttgtatatttagtaaagatgggttttcgccatgttggccaggctggtctcaaactcctggcctcaagtgatgcacctgcctcagccttccaaagtgctgggattacaggcatgagccaccgtgcccggccaaagtcagctttcaaaatccaagccataattggtgaggggggagtttcagaattacatagaaaaattaatatttgaaaaaataattctgaaatttcgaatttaaaaacagatgtgctgcttctgggtgtaggtagtaaaagtataggaaaagaactgtttccttagaagcggactgtggaagggctatgtagaatgtcaaagggcaacaagagcctgtgttt

SEQ ID NO: 3428 - DNA, 647 bp, Homo sapiens
  misc_feature (584)..(584): n is a, c, g, or t
tttcaaaggacacaaagagagatgtggactcaaagtcaccggggatgcctttatttgaagcagaggaaggagttctatcacgaacccagatatttcctaccactattaaagtcattgatccagaatttctggaggagccacctgcacttgcatttttatataaggatctgtatgaagaagcagttggagagaaaaagaaggaagaggagacagcttctgaaggtgacagtgtgaattctgaggcatcatttcccagcagaaattctgacactgatgatggaacaggaatatattttgagaagtacatactcaaagatgacattctccatgacacatctctaactcaaaaggaccagggccaaggtctggaagaaaaacgagttggtaaggatgattcataccaaccgatagctgcagaaggggaaatttggggaaagtttggaactatttgcagggagaagagtctggaagaaccgaaaggtgtttatggggaagggagaatcagtagaccatgtggagaccgttggtaacgtagcgatgcagaagaaagctcccatcacagaggacgtcagagtggctacccngaaaataagttatgcggtttccttttgaagacaccccatcatgttctggagcgtgcagttaaa

SEQ ID NO: 3429 - DNA, 690 bp, Homo sapiens
cccgggacgcggcccggggctggtgggaacagggcgtcctcctgcgcgcccccctccccagcgtcccacctcccggcggcggcggggaaagtctctccgaaagcgtgaagggggattggaggaggtttttatttccctttgtgcgggtggctggggccggatcgaggcggcgggggccgcgggactgggggctccccgctgagccgagaggagcgcgacaaaggatgcgtcccgccggggtcacagtctccgcggcccaactttgcgcgcggcgcccgcgcccctggggagcccgcccgctgcgctgagaacccaggcgtccgggctgggagaggggccgggagcgtccgcaggtggcgctggcccggatctcccgaccccaggaagggatcccggagcttcctggaggcggcgggcggccgtgtcgctccagggaaccgcgctgcccgcggaaactccgcgcgcctccgcggatgcccctcgccctagcccccagcgcgcggggttcggggccctgcgaggtccccccttcccccgcggtgcttcccaagctgggctaaggcgggcttctcttcctccctcctctgtcgcctccttttcctccccctcgttcaccttttccttccctctatccatccagagccccgcaagggcgccctgatcttctcatcttcctgtctccttctctca

SEQ ID NO: 3430 - DNA, 295 bp, Homo sapiens
ccatgatgtagaacacccttcgacggtgtactaggcaggatgggcaggttgtgcccctgactggcaacgtgaccacgtcgcagatggccaacgagcagggctatgtttgatgtgcacatgcgtcctgcagggtggtgctagggtgcgaagtggcaccctacacgctgcctgtgtgcgcaacccctgtgctagcagacaggattagctgcacaggctcttgtcaccactcacagtggcagcctatagacatatccccaccaagaggccctagtgggtagacctgtaggggctacta

SEQ ID NO: 3431 - DNA, 450 bp, Homo sapiens
tttttttttttttttgggtttcaataattatggatttttatgaaaacttgaaataataaaaagagaaaaaaactatttcctatagctagtcggaatgcaaacttttgacgtcctgattgctccagggccctcttccaactcagtttcttgtttttctcttcctcctcctcctcttcttcctcctttctcttctcttccccagtggggagggatcactcaggaaaacaggaaaggaggttccagccccacccacctgcccaccccgccccaggcaccatcaggagcaggctagggggcaggcctgggcccagctccgggctggctttttgcagggcgcaggtggaggggacaggtctgccgatgggggtgggagcctgtctgctgggctgccaggcggcaccactgcaaggggtgggagcctggctcgggtgtggctgagactctggacag

SEQ ID NO: 3432 - DNA, 442 bp, Homo sapiens
  misc_feature (413)..(413): n is a, c, g, or t
aatttttcaaatattgacctgccttacacaatatggaagactgatgcaaggatttctgaggaggagttatgtagatgggcctctttagatccagagtgaagatattagtgtcttgtatgaaagttcaccaaagggcattcatggtagacaaggcttccatgtgtcatctcgtgtaagaagaattgtaggtgttttaaccacgtccccagctagggtctcattgccagacgtgagtgagccttctgatgattatagctcccagtctttgagccctcccagctgatgcagaatgggacagagatgagctgtcccctccagctcctacccttaatgggcagacttgtgagtcagataaataatgttccaagctactaagttttgggagtggtttgctatgttagtagtggggtganccgaacattggctacttgccattgcgatt

SEQ ID NO: 3433 - DNA, 363 bp, Homo sapiens
  misc_feature (128)..(128): n is a, c, g, or t
  misc_feature (186)..(186): n is a, c, g, or t
  misc_feature (226)..(226): n is a, c, g, or t
  misc_feature (312)..(312): n is a, c, g, or t
ccacctgttgccatagcatccgggtcgggtgaaccaatccgggcgccctcgcgaacagaggcgggcagttcgcatcgccgaccaacctgaggcgtttttgttgtggcgcgtgaccggagaggcgggantcaggaccggcgccttctccttgcttctgggggtcgtggccttgctcccgctgtgaanacagaatccaggcccttccacgcgcgtgtgggtgcggggnccccgaagtgctcgtggttccccgctaggtctccgctggggcaggaaccggaatcatgggtgggaccaccaagcacccgccggtcnaccttcgaggcggacgagaatgagaacatcaccgtggtgaagggcaatccg

SEQ ID NO: 3434 - DNA, 773 bp, Homo sapiens
tccctgctctccgtggtcccggctcgcgtgtagcggcggcggcggcgtctccgtgaggaggcgcgcggggccatgacgtcagcgtccacaaaggtcggagagatcttctcggcggccggcgccgccttcacgaagctcggggagctgacgatgcagctgcatcccgtggccgactcttctcctgcgggtgcgaagtggacggagacggaaatagagatgctgagggctgctgtgaagcgattggggacgatcttaatcacatcagctgtgtcatcaaggaacggacagtggcccagataaaggccactgtgaaacgcaaggtatatgaagattctggcatcccccttccagctgagtcacccaagaaagggcccaagaaggtggcatctggtgtcttgtcacctcctccagctgcccctcctcccagcagctccagtgtccctgaggccgggggtccccccataaagaaacagaaggctgatgtgacactcagtgctctgaacgactctgatgccaacacgtgacgtggtggatactgaagggctaggagaaactcctccagctaagaaactcaattcgaccaggacagctgaccctggattctggcttctcatgacctctgtgatcctcctctcctctcctgtgagcttccactctgacctctcactgttcatgcggacctgtgggatctcctgggactccgaggcaagccttgcacgagaagaggttgaaggcttgttggggctgcaccttgtattccgcatagcatctgc

SEQ ID NO: 3435 - DNA, 348 bp, Homo sapiens
ggtcgacctggcattataggcataagccaccatcgctggccaaaaaataattctgaaacagcaaggaggaaggcggtttcttcttgggaagtcttgattttagttgagcatgtagagggatcacttgacttattaaccacttaggattgcacagtaagataatttaaagggtagccagcactggagtgggcctgggaaggggatgggcagtttgtgttagtgtgcgtgggtccaagataaaaatgttgggtagcagagttttgcctaatgcattgtcgctaaaagggatgaagggcatcgggatctacaggagatggaaaaagtagtgacaggatagtagtgggaaaa

SEQ ID NO: 3436 - DNA, 575 bp, Homo sapiens
  misc_feature (434)..(434): n is a, c, g, or t
tgactctagagtatcccgttgctacgacagttggcatgtaacactttctggggtggggagagagatgacagggaatgagcaggaatacaaagaaaaaaattgcaaaatttagaactagaagcaaatggcggaaccacctagtagggactctcagaaggccagaatactgcagttgttactgactacagtgggttgaggctgcagtgagctatgatcattcgtgctgtactccagcctgggaacagagtgagaccttgttctcaaaaaaaaaaaaaaaggtccaataaatgggggtcactgggctaaaaatcaccccctaactggttaggaaggttaatgctccagattaagggactattcacatcagctcgggtagctggttccagccatcttctgtaatatgtcttcgggaaacttaagaacaatcccttggngatcctaaataggggaatcgccagtttcatatgctactgacttttttctaaatagccattcatttacttagatatttaataaggacttaatccaggcttagtgacacttggcccagtacaaagtctctagtcaaaaaaaaa

SEQ ID NO: 3437 - DNA, 6722 bp, Homo sapiens
ggcacggggacatcaggatatcctgagtgtgtctgcagatggtggcatcgtgatgggctattctagtggcgtcaccaatgggctgaatgatgccagcgactccatctacacgaaaggcaccccggagattgctttctggggaagcaatgctggggtgaaaacaacacggctagaagctcattctgaaatggggagcactgaaattttggaaaaggagaccccagaaaatctcagtaatggtaccagcagcaatgtggaagcagccaaaaggttggccaaacgcctttatcagctggacagattcaaaagatcagatgttgcaaaacaccttggcaagaacaacgaatttagcaaactagttgcagaagaatatctgaagttttttgattttacaggaatgacgctggatcagtcactcaggtatttctttaaagcattctctcttgtgggagaaactcaagaacgagagagagttttaatacacttctccaatagatatttttattgtaacccagataccattgcttcacaagatggagtccattgccttacctgtgcaataatgcttcttaataccgatctacatggccacgtgaatattggaaagaagatgacctgtcaggagttcattgcaaatctgcaaggggtaaatgagggtgttgatttctccaaggatctgctgaaagctctgtacaactcaatcaagaatgagaagcttgaatgggcagtagatgatgaagagaaaaaaaagtctccctcagaaagtactgaggagaaagctaacggaacacatccaaagaccatcagtcgtattggaagtactactaacccatttttggacattcctcatgatccaaatgctgctgtgtacaaaagtggattcttggctcggaaaattcatgcagatatggatggaaagaagactccaagaggaaaacgaggatggaaaaccttttatgctgtactgaagggaacagttctttacttgcaaaaggatgaatacaagccagaaaaggccttgtctgaagaggacttgaaaaacgctgtgagtgtgcaccacgcattggcatccaaggccacggactatgagaagaaaccaaacgtgtttaaacttaaaactgccgactggagggtcttgctttttcaaactcagagcccagaggaaatgcaagggtggataaacaaaatcaattgtgtggcagctgtattttctgcaccaccatttccagcagcaatcggctctcagaagaagtttagccgcccacttctgcctgccactacaacaaaactgtctcaggaggagcaactgaagtcacatgaaagtaagctgaagcagatcaccaccgagctggccgagcaccgctcatatccccccgacaagaaggtcaaagccaaggacgtcgatgagtacaaactgaaagaccactatctggagtttgagaaaacccgctatgaaatgtatgtcagcattctcaaggaaggaggcaaagagctactgagtaacgatgaaagcgaggctgcaggactgaagaagtcgcactcgagtccttcgctgaacccggatacttctccaatcactgccaaagtcaagcgtaacgtgtcagagaggaaggatcaccgacctgaaacaccaagcattaagcaaaaagttacttagagtccatctgcggccaggaagtgctggtcatggagcaaaatagggtttttcaagatctttctggtaatccgtgaatatatttaaaaaaaaaaaagtctgtgacaaaacggtgcattagtaattttttctattgtatatttttgttagtttctgtacagattgtctttgctcttgatttcttttgctttgatgatttttgcaacttgatagctaatgcaccttttctgtgaggaggaggggatcgtgatttcagaatgaattatgtatcccttctcttttggttttctcttgtttgcagtctgctcagttgttttatgtattctcatatcaactgttaaacttttttttaaggttaaagaatttaatccattgtgaaacacttaactggacaaactgtagttttagtaaattctagctggagttaatatacgcctttatatgtgaaatcttgcccagtcacagaggtagaattgagcactcacagatgctccagtaagaatcacagtgctgggaatctagttgctccaatatgaggcagcttcatgtgcagcttagcacttgttgttgagatcggaccctgctggaagcagggaaaagaagcgtgaagatcgtaggattgagaacttagggaagcacattagcttgcttgaagtgctgattccatttcagccaagcaagggaaagaggaagtggagtcattttgcctttgaaggctgaggaaagattgatacccagttaattttgtttgctaaaggatgggggcaataatcggcccttgaggagctgcagcagtaggcatgtgctcagtctgcaggaattgttacctcactcccacagggtctagactagaaatccatcatctctatcgttgatatccttccatccaggaatagatttttcttactctacatatgtgtgtgtgcgtgcgtgtgtgtgcgtgtgtgggcatggggttgtgtcctggttgtgatattgaggtcttccttcctaacaaattaatactaaaatgaaacagcttttcttgtgtccttaagacaaaataaggaaggaaaacgtagctgcagttgtccacgatggatattggttctttaaaatatatctgaaagtagtagtcagaatgaattatggttggaaaactgaggaatcttctggttgcaggtgcaaagtgactttgtttattcttgtctcagtctccttgatagccacttcactctgctactactcaactttctcctaaaaatacttcatctattttcagtcctttctttctgtctactcaaaatggttctattaactttgcagtcatgagcttgttccagttacagtccctttgaagttcagggtgataaacagaatattcttctgtagaggaagagaaaggagtgaaagtttagcccactgagacctagagctttgtgatttcctaaccttgaaactctgtaatccctaaagttaaaatctccgcaagtggcacaacttcagaactaatagtatcactttgatttttctttttcctcccttagaaagtttctctagttctatagtttatttgttgaaggtactatgaccaaagaatcagctgctctacaggaatagcatggttccagtgaattagagaaaacctgctgtaaagccatggtagtgtctaagtggtatgttattatgatgtactagcatttatttacagaattatttattaacgtttacttccttcccctctgtaaatgtccatgactattgcccagagaaggcttacccctctctagggttgcagttgctttctttgtaataagtattttgccacacctgtaaaaaaaaaaaacctcacttttaactctctgccttgtttgggtaaaggcagtaactaagtttatgtttcagaactgcaaaacaaacaggatagttaccaatatggcccatgtgtcagattgatttttgtagcctctcactgaatccaacatatccacaagcaagttatctgtctttctacctgataatctaaattatcaggatatttgttttctgcctaaatgtttatactaagccgaggggagagaggtacctagaccatgtcatctacgagcttcagtaactaaagaaaaaggaacttccctgagtggcttgaatgtgtttgcccacagtctatatctatgtatatagaatgtctgtatgtattttacttatttaatatacattgaatggtaccttgctacagtatttctgacatttagagtagtgttgaaatactcggctagcatcagcaccactatagcactgtccgtgtcatatgagtcactaatattaactccagggacttctggataggctaatagatcattggatacgaagggctcttttgaagcttcagtataccatgtttgcatagtttatctttaaaaacaactttaaaggttcttttgtgagccaggatctcagactgccgtagcatgatgctgtccatctttagcgcatgggctgagaacacctcttccctgaggcttctgaaggttgctgtctgtcatgagtgcatgaaggaggccaagagtttatgctatgggaggaaccagtcactgatttgcctagattctgagagtctggcccatagccaaccacattttcctttgggataatttatttcctgtggcatctagccagaagaaattgaggatgtttcctttcacagctgctccaagcctgttgcccaattcacggtacaagggagcaccccttccctttcctctgaaggtacgccacccacctccgtcgcccacctcagcgcccaggagccttgggacttccttccatatgataaatcattcttcttcacgtcaatacacttcatattaatttctagtacagaaaatcttgacagctatcagaatgccttggtcatagtgttgttgcaaaattgaccatacaggtggcccatgtataaaatctgaattttaggggtttgtccccacctcgcatgctggcttttacagggaggtgtctgggattcctcattagcaatcaaaacttaattactgggatgcagagtccttactttatcgccagcccgtaggcatttctgaagtgcacttttttgaaacatcattttgctaactctcagcagtgtctaattaaactgagcaatacttttgtgaattttaattaatctcagcaaaaccatgatgggagagagtcctctgatggaaatgtagtccctggattatgtgtaacctttttattgctcttagatgcagaggatagaaagcattttttggtgcagtggtcttgtggcaaacacaagaccctctatgcgtctccaactgttatcctaatctagaaaatgaggactggcccctgggcaaaagtgacatgaggaatttactctggaagaggaaaatctgggtggctttccaaggctaagataggtttgtatttcaccctgtggccaagctacagaacttctgagattgtggaagaatttttgcaaccagcagggaaagaggcctcttactgcctaaacacaaagttacactgagcttttctactgtcctttgcctattgctccctctatcatgtaaagatctgggaaggatgagaggcagggcctgcttgtcatgagctgcactcttttctttttaactaatcattgacaattggaagaaaattgacgttaaagaagtttctccattgtcttactaacaaaaccttttgggtttcattaattgtccttgaaattgagttcctttggcatttttccttgcagtcatcagttaagcatgttgcatcctgaattcacagaagtttagctttgcaggtttgaatctctgtaatttaactcccgtggacttggtcgagttttcagcaggttgggagccacctctcttcatttcagcagtgagtcatcccttgacttttcaaatgacagaattttttccaattgtaaaattagcactgtaaaacaaagaaccaaagtggcatcctaagagttgttaaacctgaagtctagtttatgaggaattgtccaagttggagtttaaatagtatctgcttttgtctcaaagcatctaagttattctgacagaaaatggtaagtcagctttgcaggcagatgcgcctctgggcctcctaccttgctccacagctttctggccatcttgtctcccaggccatgccactgctctgccacatgtcagcaaatttctttccaccagtcttatagcatcttacatgatcaaatcatcacagaataaccccgtgatagattattgatagcaatagagaggggcggctttgtcactgatttttctctcagattccttttccatctctcatccataaaggaaggactgaaatccaaaggcattctccttttgtacctacagtatccagaacccacgtgggcagccttctgcttatgacaataattggcccattgcatgcagagagaatgtcttcatagagagaatgtcattaaatacttgaatctgcatgacagtttgacttgaatgcaacagcaggaaaattttgcaagttacataattgtatatacagtaggttttcttaagtctcttcggttcatcctttgtaatttgtgtgtgtatctgtagtattgcaggcttttggagactattcttacaggcagtatgtcagtcatcaaagaaaatgctgtcacctgccattgttgtatttgtgggtatttatagttgtatgtatgtaaatgcatcagtgtgtagattgcatatcagtgtatggtacatgtacatcaaaattatttttgtccttaatcagtgtgatatgaaaagcaagtacaacctcataggactgattatataatgaagttgttgagagtatatatagtggtattgttttattaaacttaaactcaaataatattttgattaaaatttttaataagactttatgctagaaaattctttgagctttgaatcaccagggcaaaaatgactttcaactaaccttgtgaatcttttgcagtgtactgtgtgcaataccaagggcatagctccctgtaatttgggaaatacagaaagaaaagaaaaaaaaaaaaaaaaaa

SEQ ID NO: 3438 - protein, 534 aa, Homo sapiens
MGYSSGVTNGLNDASDSIYTKGTPEIAFWGSNAGVKTTRLEAHSEMGSTEILEKETPENLSNGTSSNVEAAKRLAKRLYQLDRFKRSDVAKHLGKNNEFSKLVAEEYLKFFDFTGMTLDQSLRYFFKAFSLVGETQERERVLIHFSNRYFYCNPDTIASQDGVHCLTCAIMLLNTDLHGHVNIGKKMTCQEFIANLQGVNEGVDFSKDLLKALYNSIKNEKLEWAVDDEEKKKSPSESTEEKANGTHPKTISRIGSTTNPFLDIPHDPNAAVYKSGFLARKIHADMDGKKTPRGKRGWKTFYAVLKGTVLYLQKDEYKPEKALSEEDLKNAVSVHHALASKATDYEKKPNVFKLKTADWRVLLFQTQSPEEMQGWINKINCVAAVFSAPPFPAAIGSQKKFSRPLLPATTTKLSQEEQLKSHESKLKQITTELAEHRSYPPDKKVKAKDVDEYKLKDHYLEFEKTRYEMYVSILKEGGKELLSNDESEAAGLKKSHSSPSLNPDTSPITAKVKRNVSERKDHRPETPSIKQKVT

SEQ ID NO: 3439 - DNA, 312 bp, Homo sapiens
  misc_feature (119)..(119): n is a, c, g, or t
  misc_feature (135)..(135): n is a, c, g, or t
  misc_feature (173)..(173): n is a, c, g, or t
  misc_feature (188)..(188): n is a, c, g, or t
  misc_feature (200)..(200): n is a, c, g, or t
  misc_feature (218)..(218): n is a, c, g, or t
  misc_feature (223)..(223): n is a, c, g, or t
  misc_feature (236)..(236): n is a, c, g, or t
  misc_feature (244)..(244): n is a, c, g, or t
  misc_feature (263)..(263): n is a, c, g, or t
  misc_feature (270)..(270): n is a, c, g, or t
  misc_feature (279)..(279): n is a, c, g, or t
tttttttttttgaagagggacatggaacactttttaatgtcaagtcagagacaaccccaccctcccggatcccccaatccccctttccctcatcacatccaggacccctccccgaggantctcaggttcccagantttcaggggaggggaaaaaaaaaaagattacctaaaanttgcattttcttctntttcatacacantcacacaaaggtgggaantaaantaaaccaagaggnttaaactntccagtggtcacaaaggcntcagagnttcccatantgggttaaaggcaagtggggtactgacggtact

SEQ ID NO: 3440 - DNA, 330 bp, Homo sapiens
tttttttttttttttttgctttcggtgaattaaaatgtatttggtgccagtggtgctgaacatagaataaaaaacagaaaaagggcccagacagggacatccaggctggaggttggagtggagcacagtcagatgtattcacttttctagcatgggtttcaaagtgcgtaaggggagaaaacgcatcatggattgtgctgtgcatcctggacaccgtgcgaggtgctcatagctgtgatcttgtctcccacaactctcttgggtgacagacatccactgtccacattttatagacaaggagaaagggaagtcaaatgtctcctcgtgccg

SEQ ID NO: 3441 - DNA, 551 bp, Homo sapiens
ggcacgaggcgagcgggaagcgccgggcgagcccactgtgcggccgtcgtgggggaagcgaaggttcctgattccacctacctcctaagtgaaggcttccgtccctggagaggaggcggcgccctgtatcggccttcgtcctccgcgggtgtgctagcgttgggacggtcctttgttgccgcgaggggtaggagtgggcgtggcggagccagctccgttcggaacactcccgggccgacccgactcgctcatcctgcaggagctgcggcgccaagatgagtggagaggagaacccagccagcaagcccacgccggtgcaggacgtacagggcgacgggcgctggatgtccctgcaccatcggttcgtggctgacagcaaagataaggaacccgaagtcgtcttcatcggggactccttggtccagctcatgcaccagtgcgagatctggcgcgagctcttctctcctctgcatgcacttaactttggcattggtggtgacggcacacagcatgtactgtggcgggtggagaatggggagctggaacacatc

SEQ ID NO: 3442 - DNA, 189 bp, Homo sapiens
  misc_feature (27)..(27): n is a, c, g, or t
gcgggattgaattcgtgacgtgtcganttcgggacgtggagcagcttccaaaatgtagatacactccttgtttggtggatatgagtcaggataatttggcgaagcaaaatgacatccattgctggttcgaacccaaatgccacactgggttgcaggaatatgcttgattccaatattttgtccattacg

SEQ ID NO: 3443 - DNA, 412 bp, Homo sapiens
ttttttagatgtgttaattacctttatttcattatttcacaatgtgtgtgtatatatatatatatatatatatttaaaaatcacattatatacattaaacatattttatttttatttatcaatgataccttaataaagctaaggggaaggaggtatttctctaactatctttacaaaatacaattcatccattaacaaatcacagtaaattaggaagaataaaacttacatttcgacaaaaacctatgccatatttctgaaagcatcttccaaatcctattaaaaacatctttaaatatatttctctcagcttcttcccttatattttttattttttcatcatattttaattttagtaatttaatttctttctccttttcttcctctgatttatgcttatcctcttctacta

SEQ ID NO: 3444 - DNA, 414 bp, Homo sapiens
  misc_feature (79)..(79): n is a, c, g, or t
  misc_feature (191)..(191): n is a, c, g, or t
  misc_feature (194)..(194): n is a, c, g, or t
  misc_feature (345)..(345): n is a, c, g, or t
ggaggcgcggtgaggagtcaggcttaaaacttgttggaggggagtaaccagcctgctcctctcgctctcctcctcgtcntgcgccgcgtttcagagagaaaattccctgttccaagagaaaataaggcaacatcaatgaaggagagaagagccagccagaaattatccagcaaatctatcatggatcctantcngaacgtgaaatgcaagatagttgtggtgggagacagtcagtgtggaaaaactgcgcctgctccatgtcttcgccaaggactgcttccccgagaattaccgttcctacagtgtttgagaattacacggccagttttgaaatccgacacacanaggatagagttgaagcctgtgggacacttcgggttctcctttactatgacaatgtccgccccctctctt

SEQ ID NO: 3445 - DNA, 514 bp, Homo sapiens
ttttttttttttttcactttggcaacaggacttttattcagtcaaaatgagcagagtgtgacaaaacccaagtaaggccaggtggccccccagccccctcctgccccagccgcacccttcccaagggagagggaggctcccgagagaagctgctttgggaacagagggggcactgccttggagctttgtggagccctgggcatccacacatcatttgggagaagggaagggactacccttccccaagtccacgcggacacagctctagttttctaggaaaacaccacaaattctatcttcttcagctaattaactaaagttcagggtggaggtgtccctagagggttgggggtcagggatatttatggtctcattcttaaggaatacacttatcttttttctttaaaaaaagtttttcttctgctatttaaaaaaatgtttctgagtataaccaaaaataggtatttgtttccttggttttcttttcttcttctttaactaagtagttcaaaga

SEQ ID NO: 3446 - DNA, 671 bp, Homo sapiens
  misc_feature (531)..(531): n is a, c, g, or t
gttgtcgcgggtgttttacagcactgagctccaatacaactctttcacttttatggctaacacaactaggtatctccagggccacatcacacaaattcggccaaggtcaaagtctgagtgaggtccggcctcagtcctaggtgcaacatctgtcttagctcctggagtccctgaccctctctctcaagcggagaagaggaggaggtctcagctgtccaggctcatgagtagagcagtgcccctcttgatccaatgatcaggtgtcatggccccagaccgcaggtcaatgccgatgacaaaggaggctcggtctgagctgcctgcccggttgggatagtaatagcaggggcaggagtacatgcccttggcgctcttcttgcggctctctgcaggccggaagtggatcgtgggcatgaggcagacaagctgcatgggctctgcctccaccaagcaggagttcttccggtcccagccagcaccttccaggtacaggcccctgacccagacaccatccttggggggatacactangttgctgtcatccacagtggaaacgataaactccccagagaggctgtccactgaaacgttgtttggcgagctgaagactgcagcacagcagtgaggaagccagtgggaaacgtgaaaccagacaaccagaagatcacagg

SEQ ID NO: 3447 - DNA, 478 bp, Homo sapiens
tttacaggttttgagaggtttatttgtcaatgtcacttgaaaagttccaccaggggacaggaacaattttcttcatctttttaaaattcagatgagtttattcatcagtgtttatactgcttccactgcccagaccttgggaagaacaacttttggcttgtgtgacacacaccacaccatggccctccaggtttggagatggagcactcagtctaattttagcagtaagattagactagtgaatgatagtcccacttcttccttcttcaaaagcatagatggggaagaccttccttaagctgagtgattccatcttgcccaccccttgctgcccctggaatggggctctgcaagttgctgtctccacagggcttaggtcctgataagaggccaactgtgagacagtggcatttaggactacacatgtgggacacatgacagacacagaggatgacttgacagagatatcttcagcttc

SEQ ID NO: 3448 - DNA, 472 bp, Homo sapiens
tttggaaataaagcatttttaattcagcccccggagggcctgcccaacgccccgggcaggtctctaagcaccaaacacgtgagaattgttcccctcagccccagagcctcccccgcatgggaaccccttcctccttttcactgggcccagcctggaccccacacccccactcacacccacaaccagctccccacactttgtttcaataaataaccccaaaaacaaagctcggggcaggggacctggtctagcactgagctccaaacaggcagaggggactttgtgccaaacgccagaactcccaagggtagaagattgaaatcagggtcaaaatacgcacgagaagtcagagacggcttctgagctgggagcgggtcccttcaggctagggttgaacgtcgtcccctgggtgctggccccagagtcaccaagtgctgtcgccggggactccagcagcctctggaagaggctg

SEQ ID NO: 3449 - DNA, 455 bp, Homo sapiens
ttctatttctatttctttttttttcctctttttttttttttcaagccgcaggacgattttctggttcccggggatcaaaaccagcggccaggcggttctatgccgcttggcaccgctttcattttatttcaaatgaagacgttgagcttagtcagaaggggcataaatcaggacaattagcattggcgccaagaagatcctctaataccaatttcgcccgggtttccttcgcgcattcctccactcaagtcagaaatgtcactgcacatagcactgatggcagtgagacgcgacgcacccaaagtccgtttgatgaaatatacatggcccacgacgcttctggattgcggctcccggactccccgcccccaccagcggctcccggccgggaccctgctccgagcgggcagcgagctcctggcaaacttaggggccagtgccaattaaagagtgag

SEQ ID NO: 3450 - DNA, 2818 bp, Homo sapiens
aagtgatctgtggcggctgctgcagagccgccaggaggagggtggatctccccagagcaaagcgtcggagtcctcctcctccttctcctcctcctcctcctcctcctccagccgcccaggctcccccgccacccgtcagactcctccttcgaccgctcccggcgcggggccttccaggcgacaaggaccgagtaccctccggccggagccacgcagccgcggcttccggagccctcggggcggcggactggctcgcggtgcagattcttcttaatcctttggtgaaaactgagacacaaaatggctgcaaataagcccaagggtcagaattctttggctttacacaaagtcatcatggtgggcagtggtggcgtgggcaagtcagctctgactctacagttcatgtacgatgagtttgtggaggactatgagcctaccaaagcagacagctatcggaagaaggtagtgctagatggggaggaagtccagatcgatatcttagatacagctgggcaggaggactacgctgcaattagagacaactacttccgaagtggggaggggttcctctgtgttttctctattacagaaatggaatcctttgcagctacagctgacttcagggagcagattttaagagtaaaagaagatgagaatgttccatttctactggttggtaacaaatcagatttagaagataaaagacaggtttctgtagaagaggcaaaaaacagagctgagcagtggaatgttaactacgtggaaacatctgctaaaacacgagctaatgttgacaaggtattttttgatttaatgagagaaattcgagcgagaaagatggaagacagcaaagaaaagaatggaaaaaagaagaggaaaagtttagccaagagaatcagagaaagatgctgcattttataatcaaagcccaaactcctttcttatcttgaccatactaataaatataatttataagcattgccattgaaggcttaattgactgaaattactttaacattttggaaattgttgtatatcactaaaagcatgaattggaactgcaatgaaagtcaaatttactttaaaaagaaattaatatggcttcaccaagaagcaaagttcaacttatttcataattgcctacatttatcatggtcctgaatgtagcgtgtaagcttgtgtttcttgggcagtctttcttgaaattgaagaggtgaaatgggggtggggagtgggaggaaaggtgacttcctctggtgtttattataaagcttaaattttatatcattttaaaatgtcttggtcttctactgccttgaaaaatgacaattgtgaacatgatagttaaactaccactttttttaaccattattatgcaaaatttagaagaaaagttattggcatggttgttgcatatagttaaactgagagtaattcatctgtgaatctgctttaattacctggtgagtaacttagaaaagtggtgtaaacttgtacatggaattttttgaatatgccttaatttagaaactgaaaaatatctggttatatcattctgggtgtgttcttactgacaccaggggtccgctgccccatgtgtcctggtgagaaaatatatgcctggcacagcttttgtatagaaaattcttgagaagtaactgtccgctagaagtctgtccaaatttaaaatgtgtgccatattctggttcttgaaaataagattccagagctctttgatcgcttttaataaactgcaagttcattttaaatgaagggccagcatatatacttgcaagataattttcagctgcaaggattcagcaccagttatgtttgaatgaaccctccttttctctgagattctggtccctggaaatccctttctgctagtggtgagcatgtaagtgttaagtttttaatctgggagcagggcataggaagaaaatgtcagtagtgctaatgcattttgcactagaacgcttcgggaaaatattcatgcttgccatctgttcatttctaaatttatattcataaagttacagtttgatacaggaattattaggagtaattcttttctgtttctgtttataatgaagaacactgtagctacattttcagaagttaacatcaagccatcaaacctgggtatagtgcagaaaacgtggcacacactgaccacacattaggctgtgtcaccattgtgtggtgtacctgctggaagaattctagcatgctacttggggacataatttcagtgggaaatatgccactgaccgattttttttttttcctctttgcagtggggctaggacagttgattcaacaaagtatttttttcttttttctcagtcctaatttgaacaggtcaaagatgtgttcaggcattccaggtaacaggtgtgtatgtaaagttaaaaataggctttttaggaactcactctttagatatttacatccagcttctcatgttaaatatttgtccttaaagggtttgagatgtacatctttcatttcgtatttctcataggctatgccatgtgcggaattcaagttaccaatgtaacactggccagcgggcccagcaatctccatgtgtacttattacagtcttatttaaccaggggtcctaaccactaacattgtgactttgctttgagacctttcctctcctgggtactgaggtgctatgaagccaactgacaaagatgcatcacgtgtcttaggctgatgccactacccgatttgtttatttgcaatttgagccatttaaagaccaataaacttccttttttaaaaaaaaaaaaaaaaaaaaaaaaaa

SEQ ID NO: 3451 - protein, 206 aa, Homo sapiens
MAANKPKGQNSLALHKVIMVGSGGVGKSALTLQFMYDEFVEDYEPTKADSYRKKVVLDGEEVQIDILDTAGQEDYAAIRDNYFRSGEGFLCVFSITEMESFAATADFREQILRVKEDENVPFLLVGNKSDLEDKRQVSVEEAKNRAEQWNVNYVETSAKTRANVDKVFFDLMREIRARKMEDSKEKNGKKKRKSLAKRIRERCCIL

SEQ ID NO: 3452 - DNA, 700 bp, Homo sapiens
  misc_feature (58)..(58): n is a, c, g, or t
  misc_feature (124)..(124): n is a, c, g, or t
  misc_feature (135)..(135): n is a, c, g, or t
  misc_feature (162)..(162): n is a, c, g, or t
  misc_feature (177)..(177): n is a, c, g, or t
  misc_feature (182)..(182): n is a, c, g, or t
  misc_feature (195)..(195): n is a, c, g, or t
  misc_feature (199)..(199): n is a, c, g, or t
  misc_feature (232)..(232): n is a, c, g, or t
  misc_feature (235)..(235): n is a, c, g, or t
  misc_feature (240)..(240): n is a, c, g, or t
  misc_feature (255)..(255): n is a, c, g, or t
  misc_feature (284)..(284): n is a, c, g, or t
  misc_feature (306)..(306): n is a, c, g, or t
  misc_feature (322)..(323): n is a, c, g, or t
  misc_feature (336)..(336): n is a, c, g, or t
  misc_feature (353)..(353): n is a, c, g, or t
  misc_feature (359)..(359): n is a, c, g, or t
  misc_feature (361)..(361): n is a, c, g, or t
  misc_feature (386)..(386): n is a, c, g, or t
  misc_feature (397)..(397): n is a, c, g, or t
  misc_feature (401)..(401): n is a, c, g, or t
  misc_feature (404)..(404): n is a, c, g, or t
  misc_feature (409)..(411): n is a, c, g, or t
  misc_feature (416)..(416): n is a, c, g, or t
  misc_feature (418)..(418): n is a, c, g, or t
  misc_feature (427)..(428): n is a, c, g, or t
  misc_feature (437)..(437): n is a, c, g, or t
  misc_feature (448)..(448): n is a, c, g, or t
  misc_feature (454)..(454): n is a, c, g, or t
  misc_feature (479)..(479): n is a, c, g, or t
  misc_feature (481)..(481): n is a, c, g, or t
  misc_feature (485)..(485): n is a, c, g, or t
  misc_feature (492)..(492): n is a, c, g, or t
  misc_feature (494)..(494): n is a, c, g, or t
  misc_feature (496)..(496): n is a, c, g, or t
  misc_feature (500)..(500): n is a, c, g, or t
  misc_feature (512)..(512): n is a, c, g, or t
  misc_feature (516)..(516): n is a, c, g, or t
  misc_feature (518)..(518): n is a, c, g, or t
  misc_feature (524)..(525): n is a, c, g, or t
  misc_feature (545)..(548): n is a, c, g, or t
  misc_feature (554)..(554): n is a, c, g, or t
  misc_feature (571)..(571): n is a, c, g, or t
  misc_feature (573)..(573): n is a, c, g, or t
  misc_feature (576)..(576): n is a, c, g, or t
  misc_feature (580)..(581): n is a, c, g, or t
  misc_feature (585)..(585): n is a, c, g, or t
  misc_feature (588)..(588): n is a, c, g, or t
  misc_feature (590)..(590): n is a, c, g, or t
  misc_feature (593)..(593): n is a, c, g, or t
  misc_feature (596)..(597): n is a, c, g, or t
  misc_feature (603)..(603): n is a, c, g, or t
  misc_feature (607)..(607): n is a, c, g, or t
  misc_feature (609)..(609): n is a, c, g, or t
  misc_feature (614)..(615): n is a, c, g, or t
  misc_feature (618)..(621): n is a, c, g, or t
  misc_feature (625)..(627): n is a, c, g, or t
  misc_feature (647)..(648): n is a, c, g, or t
  misc_feature (650)..(651): n is a, c, g, or t
  misc_feature (653)..(653): n is a, c, g, or t
  misc_feature (655)..(656): n is a, c, g, or t
  misc_feature (659)..(659): n is a, c, g, or t
  misc_feature (664)..(664): n is a, c, g, or t
  misc_feature (673)..(673): n is a, c, g, or t
  misc_feature (675)..(675): n is a, c, g, or t
  misc_feature (683)..(683): n is a, c, g, or t
  misc_feature (690)..(691): n is a, c, g, or t
  misc_feature (693)..(693): n is a, c, g, or t
  misc_feature (699)..(700): n is a, c, g, or t
ctgttgccctgctcctgttcaaagagtagcatggccagctgggttcgggagccgaggncctcaagcacgctctggaggcagcggtggtacaggtcctcactgagcctcgcgctgcacgtctggnaccggtagcgntgcagcagcgccggctccaccgcccgnagaacatgcagactngagangtggaggaacagntcgnacacatccaggtgtagaagcaggcctcgctggntgnctggngatcaaagcggccantgtcacgggccagttctggggggccaggnccttgtggtggtgtcacagctnggtggaaggtttgggnnatcaatggtaaanaaggtccttcagccctnagaatngnatgcatgcccgcagcgggctcaagnttaggtcaagngttnagnaaccnnntcttngnccttacagnnggaacactntttttcagccnggtgcnttcttgggtaaagttgttccatgangngttnttggtgnangnttgnttccttttcttncaananttgtanncattgtaacccttttttccnnnntaaagncttttccaaccttcttncncantggnncctnggnanttnttnntgaaancttnanttcgnncannnntttnnnctttttctttttcattccanntnntngnngtntctgngttttcctnantttcaccnaggttcnntntttcann

SEQ ID NO: 3453 - DNA, 2122 bp, Homo sapiens
gggggagagggcttttcttatccacctcatgttggattatcccttggcactccattagatccgcattatgtgctcctagaagtccattatgataatcccacttatgaggaaggcttaatagataattctggactgaggttattttacacaatggatataaggaaatatgatgctggggtgattgaggctggcctctgggtgagcctcttccataccatccctccagggatgcctgagttccagtctgagggtcactgcactttggagtgcctggaagaggctctggaagccgaaaagccaagtggaattcatgtgtttgctgttcttctccatgctcacctggctggcagaggcatcaggctgcgtcattttcgaaaagggaaggaaatgaaattacttgcctatgatgacgattttgacttcaatttccaggagtttcagtatctaaaggaagaacaaacaatcttaccaggagattacctaattactgagtgtcgctacaacacgaaagatagagctgagatgacttggggaggactaagcaccaggagtgaaatgtgtctctcataccttctttattacccaagaattaatcttactcgatgtgcaagtattccagacattatggaacaacttcagttcattggggttaaggagatctacagaccagtcacgacctggcctttcattatcaaaagtcccaagcaatataaaaacctttctttcatggatgctatgaataagtttaaatggactaaaaaggaaggtctctccttcaacaagctggtcctcagcctgccagtgaatgtgagatgttccaagacagacaatgctgagtggtcgattcaaggaatgacagcattacctccagatatagaaagaccctataaagcggaacctttggtgtgtggcacgtcttcttcctcttccctgcatagagatttctccatcaacttgcttgtttgccttctgctactcagctgcacgctgagcaccaagagcttgtgatcaaaattctgttggacttgacaatgttttctatgatctgaacctgtcatttgaagtacaggttaaagactgtgtccactttgggcatgaagagtgtggagacttttcttccccattttccctccctcctttttcctttccatgttacatgagagacatcaatcaggttctcttctctttcttagaaatatctgatgttatatatacatggtcaataaaataaaactggcctgacttaagataaccattttaaaaaattgggctgtcatgtgggaataaaagaattctttctttcctactacattctgttttatttaaatactcattgttgctatttcactttttgacttgacttttatatttctttaaaaaattccttccttttaaaaaatataaaagggactactgttcattccagttttcttcttctttgttgttcttctagtgtgacttttcaagtgtaacagccattcttcctgactttaatattgtccagttctggtcttttctgtgaattaccactgggccccttacctcaatgctttttgttgatgcccactctggttcccttgtttatctgagtctgttggtacccctaatgaccccacacccatcttaaagtactttttttcaccttccctgtttagtactggccagatgagttttttctagagctctgtcactatctgaaaagaaagaggctatgggaaacatagaaatggtatgtattaataactgatcataggctgaggagaaaaaatgtagctggccgcaaacccagtgctgtgaggtgacttatatgaggttccagatcaaaggcaggccgtgtgagccagtccaggagggtgtaagttctgaatggttccttgctgactttgggtgacacatgtaccacatactggctcagtttaagtcatggttctattgtagatttatttttatattagttaataaatgactttaaattgtcaccaattgaaaatcttgtcactcttttggttttctttatatagctcagccaaatcttgttttatgtcctgtcctcatctcttaagctaaatctgtttggatcatattaataaactaaatgaaatcaaaaaaaaaaaaaaaaaaa

SEQ ID NO: 3454 - protein, 335 aa, Homo sapiens
GGEGFSYPPHVGLSLGTPLDPHYVLLEVHYDNPTYEEGLIDNSGLRLFYTMDIRKYDAGVIEAGLWVSLFHTIPPGMPEFQSEGHCTLECLEEALEAEKPSGIHVFAVLLHAHLAGRGIRLRHFRKGKEMKLLAYDDDFDFNFQEFQYLKEEQTILPGDYLITECRYNTKDRAEMTWGGLSTRSEMCLSYLLYYPRINLTRCASIPDIMEQLQFIGVKEIYRPVTTWPFIIKSPKQYKNLSFMDAMNKFKWTKKEGLSFNKLVLSLPVNVRCSKTDNAEWSIQGMTALPPDIERPYKAEPLVCGTSSSSSLHRDFSINLLVCLLLLSCTLSTKSL

SEQ ID NO: 3455 - DNA, 378 bp, Homo sapiens
tttacgtgctataaatacgacaatgaattttattcttttataggaccaaggattaaattctctactattgactggatattgtcacactgaggtggctacttgatgttattttagaaggaagaggtcaatgaattacacaaacaaattttcttattgtgtcagcatgatctgacttaaaatttcttaacctggagaaaatatgtattttgcacattaattagaagttccatagaaacccatttgtagctaggtttttgtccaacatgaaaattcgtattagagctaagaaattatggatttgggctgggaattctaggtcaaatctgagagagggggtggggaacaggaaggttagaagaacattcacaggggtttagc

SEQ ID NO: 3456 - DNA, 510 bp, Homo sapiens
aatgattccagtaagatgccttgttaatgactcaacaacatgtcgttcattttttatatcccgaacaaatgggtgttgaagcatgtttgcagaagtaggacgaaacaggaaattttttatcgtacacttttccatgaaattgtggaacttacgggaccatccgctggatttgactgtgggagcagattcccgcaaaataacgaagagagcttccaagggttgaaggttacacagaggaggggctccttcagccatttcaatggcagtaattcccacagaccacacatcacttctgtaatcataggagcgtcttgggtcctcatcacagtcaatcacctcaggtgccatccagtatggtgtcccaatgaaactattccttcttccattagttctgctcacctgggcactcactccaaaatcaaccagttttaacttcgcattatgagtcagaagcacattctgacctttgatgtccccgtgaattactcggtgtgcgtgaaggtgagctag

SEQ ID NO: 3457 - DNA, 481 bp, Homo sapiens
tttaagcagggggaagctctttctggtacttgctgtgtctgattcaagatggaaaggatttggtgactgcggaagctttgccttgcacttgtcccacagcaattacgctggaaggggtcctagacttgtggggtgtgggatgtgggataaatttggagaaagaccacagtatgtaaacaaaacctgccagttttccaaaatacctaaccacaagacttcacattttggcagctagaaagagtcaaatatgctttattctgacaacaaattttattctcagcggggagaaatatgaatcccagttcaagcaagaaactaccaataaccaaaattaaaggaatttcgaaatatagcctctgtagaaaaacctagcaagcccacatagtgagacaatattaatcaagaaactgatgacatcagtagaatccttgaagtgtgtgtagatgttcaaaatccttcaggctaaaatctatggaagaag

SEQ ID NO: 3458 - DNA, 504 bp, Homo sapiens
ttttttaacatatattaatctttattctataacagacataaataattttatgaattcatatgacctatacaaaagacaagatattgcactaaatttagatatgggatatttgaatttaatattagctaaacagataaatatatacaatttaaagagttaaggcaaaaccagatgatacttcaaatacaacagaagccttgaaaaataggtataattagaaacaacagcatcccaccaccagttaataaagtggtcatgtctacggaaaaaaaaaaaaccttaggtttttaataaagtggttattatcaatcattttaattaaagttgagcaataaagtataagatttccctcggaggggagctgttttgctgaggctcagggattgagcacttagattttgggtaagcaactttttccttgtcagatttatgatctattcttcttcttagaaaatataacttggaaaatatgactctttcacatatacaattaaaatacaacta

SEQ ID NO: 3459 - DNA, 8063 bp, Homo sapiens
gacctgcgaaggcagctactgtctggtcacctgactcaggatcaggtgcgggaggttaagcggcacatcaccgtgcgcctggactggggtaatgaacatttgggcctggacctggtgcctcggaaggactttgaagtagtggactcggaccagattagtgtctcagatctctataagatgcatttatctagccggcagagtgtacagcaaagcacatcccaggtagatacaatgcgcccacgtcatggggaaacatgtcggatgccagtgccacatcacttcttcctcagcctgaagagtttcacttacaatactattggggaagataccgatgtcttcttttccttatatgacatgagggaaggcaagcagatcagtgagcggtttctggtaagactgaacaagaatggtgggccgaggaacccagagaagatagaacgaatgtgtgccctttttacagatctgagcagcaaagatatgaagagagatttgtatatcgttgcccatgtgatccgaataggccggatgctcctgaacgactcaaagaaaggtcctcctcacctgcactacaggcgaccatatggctgtgcggtcctaagcatcttggatgtcctacagtcactcacagaagtaaaggaagaaaaggattttgttcttaaggtttacacgtgcaacaacgagagtgagtggtcccagatccacgagaacatcatccgaaagtccagtgccaagtactctgcccccagcgccagccatggtcttatcatttctctgcagcttcttcgtggagacatggaacagattcggagagaaaatcccatgatatttaataggggattggcaattacaagaaaattgggatttcctgatgtcattatgccaggtgatatccgcaatgacctgtacctaaccctggagaagggggatttcgagagaggaggaaagagtgtacaaaagaatattgaagtgaccatgtatgtgctttatgcagatggagaaatcttgaaggattgcatcagcttgggttcaggagagccaaataggagttcctaccactcctttgtcctctaccacagtaatagtcctcgctggggagaaattatcaaattgcctatccccattgaccggttccggggctcccacctgcgctttgagttcagacattgttccacaaaggacaaaggggaaaagaaactctttggctttgcattctcaaccctgatgcgtgatgatggcaccaccctctcagatgatattcacgagctttatgtgtacaagtgtgatgagaatagcacgtttaataaccatgctctgtacctgggcctgccctgctgcaaagaggactacaatggctgccctaatattccttctagcctcatcttccagcgcagcaccaaagagtctttcttcatctccactcagctctcctctaccaaactcacccagaatgtggacctcctagctctgctgaagtggaaagccttccccgaccggatcatggatgtactagggcggctgcggcatgtcagtggggaggaaattgttaagtttctgcaggacatcttagatacactctttgtgattttggatgataatacagagaagtacggcctgttggtttttcagtctctggtgttcatcatcaacctgctccgagacatcaagtattttcactttcgacctgtgatggacacgtatatccagaagcactttgctggagctctggcatacaaggagctcatccgctgtttgaagtggtatatggactgctcagcagaactgattcgacaggaccacattcaagaagctatgcgggccttggagtaccttttcaagttcattgtacagtcacggatcctgtactcacgagccacttgtggaatggaagaggaacaattcagatccagtatccaagaacttttccagtccatccggtttgtgctcagtctggacagccgaaactcagaaacactcctttttactcaggctgcactcctcaattctttcccaaccatctttgatgagcttctgcaaatgttcaccgtgcaagaggtggcagagtttgtgagagggacactggggagcatgcccagcactgtgcacattgggcagtcaatggacgtggtcaagctgcagtccattgccaggacagtggatagccgcctgttttctttctcagaatcccgccgcatcctgcttcctgtggttctccatcacattcaccttcacctgaggcagcagaaagagctgctaatttgctcagggattcttggcagcatcttctccatcgtcaagaccagctctctggaggcagatgtcatggaggaagtagagatgatggtggagagcctcctggacgtgctcttgcagactctgctcaccatcatgagcaaatcgcacgctcaggaggcggtaagagggcagcggtgcccgcagtgcacagccgagatcactggcgagtatgtgtcctgccttctctcactgctccgccagatgtgtgacacccatttccagcacctcctggacaacttccagagcaaagatgaactcaaggaatttctgctgaagattttttgcgtgttccggaacctgatgaagatgagtgtcttccctcgggactggatggtaatgagactgctcacaagcaatattatagtcactactgtccagtacctgtcctctgcactgcacaagaatttcacagagactgactttgactttaaggtgtggaattcttactttagcctggcagttctattcataaatcagccaagccttcagctagaaattatcacctcagccaaaaggaagaagattctagataagtatggggacatgcgtgtaatgatggcctatgaactgttcagcatgtggcagaatttgggtgaacataagatccactttattccgggaatgattggtccttttctgggtgtgacactggtcccacagccagaagtacggaatatcatgattcccatctttcatgacatgatggactgggagcagagaaaaaatggcaacttcaaacaggtggaggccgagttgattgacaagctggacagcatggtgtcagaagggaaaggtgacgagagctacagggagctcttcagcctactaacccagctgtttgggccctaccccagcctgctggagaaggttgaacaagaaacatggcgcgagaccggcatttcctttgtgacctcagtcacccgcctcatggaacgtcttcttgactacagggactgcatgaaaggagaggaaacagagaataagaagataggctgcactgttaacctgatgaatttttacaaatctgagattaacaaggaagaaatgtatatccgctacatccataagctttgtgacatgcacttgcaggccgaaaactacacagaggccgcatttaccctgctcctttactgtgagctgctgcagtgggaggaccggccactacgggaattcctccactacccatcgcagacagagtggcagcggaaggagggactgtgccggaagatcattcactacttcaacaaaggcaagagctgggagtttgggatcccactgtgcagggagctggcgtgtcagtacgagagcctctatgattaccagagcctcagctggattcggaaaatggaggccagctactatgacaacattatggagcagcaacgcctggagcctgagttctttcgggtcggcttctatggcaggaagtttcctttctttcttcggaacaaagaatacgtgtgccgtggccatgactacgagaggctggaggccttccagcagaggatgctcagtgagtttccgcaggctgtcgccatgcagcaccccaaccatcctgatgacgccatcctacagtgcgatgcccagtacttgcagatctatgcagtgacgcccattccagattatgtggatgttctgcagatggatagggtaccagatcgagtcaagagcttctatcgcgtcaacaatgtgaggaagttccggtatgacaggccttttcacaaaggccccaaggacaaggagaatgaattcaagagcctgtggattgaacgtaccacactgaccctgacccacagcttgcctggcatctctcggtggtttgaagtggagaggagggaactggtggaggtgagccctctggagaatgccatccaagtggttgagaataagaaccaggagctacgctccctgatcagccagtatcaacacaagcaggtgcatggcaacattaacctgctaagcatgtgcctgaatggtgtcattgatgcagctgtcaatggaggcattgcacgctatcaggaggccttctttgataaagattacatcaacaagcacccaggagatgctgagaagatcacccagctcaaggagcttatgcaggagcaggttcatgtccttggagttgggctagcagttcatgagaagtttgtgcacccagaaatgcggcctctgcataagaagctaattgatcagttccagatgatgcgggccagtctctaccatgagtttccaggtttggataagctaagtcctgcatgttcaggcaccagcaccccacggggaaatgttctggcatcccatagccccatgagtccggagagcatcaagatgacccaccggcacagccccatgaacttgatgggcacaggccgccattcatcatcctctctctcctcacatgcgtctagtgaagcaggaaacatggtgatgctgggtgacggctccatgggtgatgctcctgaggacctgtaccaccacatgcagctcgcgtatcccaaccccaggtaccaaggctcagtcaccaacgtctctgttctgtcctcgtcccaggcaagcccttcttcctccagcctgagttccactcactcagcaccatcccagatgattacctctgccccttccagtgcccgaggctctccctctctgccagataagtaccgccatgcccgtgaaatgatgttgttgctgcccacataccgggaccgcccaagcagtgccatgtatccagcagccatcctggagaacggacagccgccgaatttccagcgagccctgttccagcaagtggtcggagcctgcaaaccctgcagtgatcccaatctgtctgtggctgaaaaaggtcattactccctacactttgacgccttccaccaccctctgggtgatacccccccagccctccctgcccggaccctgcgcaagtctcctctccaccctatcccagcctcccccacaagcccccagtcaggtctggacggcagcaactctacgctgtccggcagtgccagcagcggcgtgtcctccttgagtgagagtaactttgggcactcctcggaggccccacctcgcactgacaccatggactccatgccaagtcaggcctggaatgctgacgaagatcttgagccaccctacctccctgtccactacagcctctctgagtctgccgtcctggactccatcaaggcccagccatgccgaagccactcagccccagggtgcgtcatccctcaggaccccatggacccgcctgcgctgccgcccaagccctaccacccccgcctgccggccctggagcacgatgagggggtgctgctgcgtgaagagactgagaggcctcgaggcctgcaccgcaaggctccattgcctcctgggagcgctaaggaggagcaggcccgcatggcctgggagcacggccgaggggagcagtgaggggcaacgaggcggctgggatgccgccctcagtaagcagcttgccaatcactccaggtctgaaaagcaagtcccccagccccaccccagggagccagagaggcttgcactcaggagagaaccacccccaagtctccgttctactgccgtgaactcatgtgttgccatgtacagaggccacagcagcatgaagggttgtggcttccctttttatttttttacatttccatttctatgggttttcctttctttcctttatgcagtagatgctttcttcctcctgcagttctggaccatgtggagctacatggagaaattgcacagacagaatcactttgccacactgcagggcccaggagtgggagcccaggccctccctccagggtagagatgcaccgaatggaaattgcactaaggacctcttcctttgctgtatggacagaagagttcatggttgcattcagggattgcaaggaccatatagacatgtcacaggtggaaaaagggccacaagccgttttgcacaaatgcctgcccacctgcccctcttccatccaggagtgtgctactgaggggctggctggaccaacctgctggctcaggcatgtgactggcctaactgcatgcccagggcactgccagggttcaatgggccagccgtctcctactccaccttggatttttctctccatcacatcatttctgaccatttgctcccttccattcttgaaacacctcatgccccacaggagccccagtggtgactggatctgcaagggttatctcccgccctctggggtttgagtggaggtatggagccagagaggctatcctagctaccttcctcctagggggagctggtccccttcctatgtggtagagagactggtgtaagagtgtggggtgtggcaggcgccggaaatcctcaaagctttcagaagcatccagaatgcctaccatcagctcctgaatcagggattttcagcactacctctgagccatggggttggctgcccagccaggcttccaggccctgaggacatgtggtcaggttcagcaggctcctgggtaaagagggtgggagggggcttctccttttggaagcagatagccatgcaggtagaattgtcatctcccaagtggccacatacagcaacccactccaggccatggggaccaccactcagggttcggggctggcaggagggtagtttctccagtctccccagtctgttggtgtctttataggaaactataaagcagagcagtggtgtctttagaggaaactcattcaagtcagggcactgattttcctctcagtttattatttggggggatagggtcaggtgggtatagtagtactttaccagggtgcttttaagttactttaaaaaaagcctacaaaatattttttttcttttatttgctcgagttcacattaatgatggtcacaaggctgccttgttgggcaggcgtattgcccccagttcctcttctgctggcctgtatgacctccacagccaggccctgggcccaagccccttgtcccttctccactgcccctctttccagacagtaaaggccatggtcagtgtgtttttctcttgtaaacaaaccccagcttgtttaacagaaatgctaataacctactgggaaagatggaggtctaaattacctccagggtttttctgggggtttatcaccagtgtgggtcccttctgataccaccaggttcactccaggcagagtggggcggaaggctgctgaggatatgggtcagttacagcagccctcacctcaaagggctggcctgcttctcagcctacattcatttgcaagcttcaatctctggaccatctggtgttcacaggtgttagagggttaggggttaggggctagttttggatttgattcataggtaggagggcttagattttaaggcacttctgaaagtcaatccctggacaaggcagtcatcacataagaacagctaccttctccacttggtggcacaagaggtagggaggggagtatgggttcatttggcttcgcattatgcaaggtgaaaccgtttgttttccctctccattttccctaactaaatgaaaaggacacattctgaaatcccttttgttggagaataagtcagtctgaggggaaatgggaggccagagatgagaaccctttgaaaagattgtaaaatactgattttcattctttcaagcttatttgtaaatacctatttgaatgctgtgtatttgtacaggaatttgagcaaaaaatgtatagagtgtgatgtccaattggtattcagcactataaatgtgtttttaacctcc

SEQ ID NO: 3460 - protein, 1907 aa, Homo sapiens
DLRRQLLSGHLTQDQVREVKRHITVRLDWGNEHLGLDLVPRKDFEVVDSDQISVSDLYKMHLSSRQSVQQSTSQVDTMRPRHGETCRMPVPHHFFLSLKSFTYNTIGEDTDVFFSLYDMREGKQISERFLVRLNKNGGPRNPEKIERMCALFTDLSSKDMKRDLYIVAHVIRIGRMLLNDSKKGPPHLHYRRPYGCAVLSILDVLQSLTEVKEEKDFVLKVYTCNNESEWSQIHENIIRKSSAKYSAPSASHGLIISLQLLRGDMEQIRRENPMIFNRGLAITRKLGFPDVIMPGDIRNDLYLTLEKGDFERGGKSVQKNIEVTMYVLYADGEILKDCISLGSGEPNRSSYHSFVLYHSNSPRWGEIIKLPIPIDRFRGSHLRFEFRHCSTKDKGEKKLFGFAFSTLMRDDGTTLSDDIHELYVYKCDENSTFNNHALYLGLPCCKEDYNGCPNIPSSLIFQRSTKESFFISTQLSSTKLTQNVDLLALLKWKAFPDRIMDVLGRLRHVSGEEIVKFLQDILDTLFVILDDNTEKYGLLVFQSLVFIINLLRDIKYFHFRPVMDTYIQKHFAGALAYKELIRCLKWYMDCSAELIRQDHIQEAMRALEYLFKFIVQSRILYSRATCGMEEEQFRSSIQELFQSIRFVLSLDSRNSETLLFTQAALLNSFPTIFDELLQMFTVQEVAEFVRGTLGSMPSTVHIGQSMDVVKLQSIARTVDSRLFSFSESRRILLPVVLHHIHLHLRQQKELLICSGILGSIFSIVKTSSLEADVMEEVEMMVESLLDVLLQTLLTIMSKSHAQEAVRGQRCPQCTAEITGEYVSCLLSLLRQMCDTHFQHLLDNFQSKDELKEFLLKIFCVFRNLMKMSVFPRDWMVMRLLTSNIIVTTVQYLSSALHKNFTETDFDFKVWNSYFSLAVLFINQPSLQLEIITSAKRKKILDKYGDMRVMMAYELFSMWQNLGEHKIHFIPGMIGPFLGVTLVPQPEVRNIMIPIFHDMMDWEQRKNGNFKQVEAELIDKLDSMVSEGKGDESYRELFSLLTQLFGPYPSLLEKVEQETWRETGISFVTSVTRLMERLLDYRDCMKGEETENKKIGCTVNLMNFYKSEINKEEMYIRYIHKLCDMHLQAENYTEAAFTLLLYCELLQWEDRPLREFLHYPSQTEWQRKEGLCRKIIHYFNKGKSWEFGIPLCRELACQYESLYDYQSLSWIRKMEASYYDNIMEQQRLEPEFFRVGFYGRKFPFFLRNKEYVCRGHDYERLEAFQQRMLSEFPQAVAMQHPNHPDDAILQCDAQYLQIYAVTPIPDYVDVLQMDRVPDRVKSFYRVNNVRKFRYDRPFHKGPKDKENEFKSLWIERTTLTLTHSLPGISRWFEVERRELVEVSPLENAIQVVENKNQELRSLISQYQHKQVHGNINLLSMCLNGVIDAAVNGGIARYQEAFFDKDYINKHPGDAEKITQLKELMQEQVHVLGVGLAVHEKFVHPEMRPLHKKLIDQFQMMRASLYHEFPGLDKLSPACSGTSTPRGNVLASHSPMSPESIKMTHRHSPMNLMGTGRHSSSSLSSHASSEAGNMVMLGDGSMGDAPEDLYHHMQLAYPNPRYQGSVTNVSVLSSSQASPSSSSLSSTHSAPSQMITSAPSSARGSPSLPDKYRHAREMMLLLPTYRDRPSSAMYPAAILENGQPPNFQRALFQQVVGACKPCSDPNLSVAEKGHYSLHFDAFHHPLGDTPPALPARTLRKSPLHPIPASPTSPQSGLDGSNSTLSGSASSGVSSLSESNFGHSSEAPPRTDTMDSMPSQAWNADEDLEPPYLPVHYSLSESAVLDSIKAQPCRSHSAPGCVIPQDPMDPPALPPKPYHPRLPALEHDEGVLLREETERPRGLHRKAPLPPGSAKEEQARMAWEHGRGEQ

SEQ ID NO: 3461 - DNA, 425 bp, Homo sapiens
  misc_feature (149)..(149): n is a, c, g, or t
  misc_feature (173)..(173): n is a, c, g, or t
  misc_feature (223)..(223): n is a, c, g, or t
  misc_feature (228)..(228): n is a, c, g, or t
  misc_feature (248)..(248): n is a, c, g, or t
  misc_feature (258)..(258): n is a, c, g, or t
  misc_feature (302)..(302): n is a, c, g, or t
  misc_feature (305)..(305): n is a, c, g, or t
  misc_feature (311)..(311): n is a, c, g, or t
  misc_feature (328)..(328): n is a, c, g, or t
  misc_feature (331)..(331): n is a, c, g, or t
  misc_feature (335)..(335): n is a, c, g, or t
tttttttttttttttgggaagaacattttattgctaagcatatccttgaacgaaaatgcaaatatgaactaagaaaagaaaaaagaaaaagcagtaatgtcacaacatcattaaataaattcctttaggttctgctaataaaacaggantatgatagaagctcacatagagantgcacatgttcccataaaattgtccaaatagaaacttacactgaaaggantatancaaatgtattattacttaanttgaaaaaantgaaagaaagcaggaaatcatttcacaagacctcaagactccangancagcantcttttacagacatcgnggntatnatcaacttcgtataggctgggcctttttaggttatctaaaatcgtgctttggatatctctttataatcccgtcttttttaatggataacc

SEQ ID NO: 3462 - DNA, 410 bp, Homo sapiens
ttttttttagttttgagggttattttatttctaaagccatatgtagtcaagtgccatcatatgacaaatggtaagtgcagcagtcgtaaggcatggcctaggcacttgggagcccacgacaaacagctgtcctgagagctccctgggaggagtaccaacatccgatccccattatgcagctctggaccccattagcctcccagctccagtatcctgcccattcccaaatgacccgatagacacagtaactggtcccgtgttgcgacacgattaggatttttgcataagagttcaagttaaacagatgtgagtcatcttattctttggttccatagcatttggctatgcaaatttcatattctgttggcttcggttttctccagtgcccaacaccaaatagtggaagcaga

SEQ ID NO: 3463 - DNA, 586 bp, Homo sapiens
tttttttttttggagagataggatctcactatactgcccaggctatctcaaactcctaggctcaagcagtcccccggcctcagcgccccaaaaagctgggattacaggcgtgaggcaccgctcctagcaaggctgggttttctgaactaaggcacatcataattttggggaaaatcagaacagtgctcttattatactattccctgaccttaataattctctagttctaaattattttttagtaaggacctgtctgctattgaatagctctagattattatggtttatctagcagacattgtgaacaattttggcgcaactataatcaatcagtgcaaaggttttggtcagagtcaaggagagaagaaaaatgaagttataagtatcacatatatatattaccaatcaaccccttcaaggaagaattttcaccagtctgtggctcttgggaatattttcaaatataccaaacacaccaaaacaaattatttcagaagaaggtgatattgggagcagtatgaagataagcaacagtctacttccaaacacacccagaaaataaacaaggaaagcatccattttagac

SEQ ID NO: 3464 - DNA, 428 bp, Homo sapiens
  misc_feature (111)..(111): n is a, c, g, or t
  misc_feature (394)..(394): n is a, c, g, or t
ttttcttaagggaaaaatcacgctgtgttcttttaaaatccctcaggttttatgttttattgctaccagagtctgcctccctgaggttcttgtatagactagttatttccntctgtaaagaagctgttctattcgttctcgcctggtttggaacaaactgaacacttccaaaggaggcagtccttgcagccttgtctccttccactcccctcctccccacagtcctgggctggagcagcgagtctgtcgatcccagggccagagacaaggcagacaaaggttcatttgtaaagaagctccttccaggcacctcctctcttctccttttgcccaaactcacccagtgagtgtggaggcattttaaggaggcatcctctgccaaggaccaaagggnaaaggagggaaagggggccaaaaggccaaattgg

SEQ ID NO: 3465 - DNA, 432 bp, Homo sapiens
tttttttttttatcctaaaacgtcaataaaagactctttattcataaataactgatatgcagtaatttacgtctgtacatttatcttgaaaagtctgcaaccatccagtttttttttttttttttttttttgcaaactcgacataaaacatccaaaccgtccattttgttcaatacaatataacagagctgtttggcattaccaaatatatatgtatatatatttatagatatgtacatgtgctgaaaaagaagccagtgcagccttttctaagaagtccatccaagtttactgtacaacattcagaatttacattgataatacaaggcacaaaaagtgtggtatgaagccaaggctatgcttcattcaacctctctcctctggcttgctcagtccttcagcttcatgtcaaattaagtgttcagccctgct

SEQ ID NO: 3466 - DNA, 455 bp, Homo sapiens
  misc_feature (376)..(376): n is a, c, g, or t
acgcgtggggtccagtcaatgtggttttaatacatgtagcaacagaatgaaggaacatccatcctgggtttgatcaaattacaacagccttaaattaccttagaaacatagttactttattctatttgtgtctacattaaatgtctcattaattcctcatattttctggagtcttgttggctggcaaatcacaagtaatctttcttcatttgcccttggagttgttgtcagggagatggattggagaataaaataggttagaatctattctgatgctgcgaactgggttcttttacgttttcaggacagaaaatagcagctccccaattccacagacttactttgcgtctcgtaagtgatggtggtggtgacgcangggcagggcttctggcccgtgtcacgttcttctgctcacatggctggagtatggccccaaagtcaccttttctgcttcc

SEQ ID NO: 3467 - DNA, 437 bp, Homo sapiens
aattttttttttttttttttttttcattttggtttttgttggatgcatttagaatatgccagtacattggagatggacaacagatatttgttgaatgaatcaagctcccttatactcaaggggcatgtgtctatggtgaagtagaaagagcactggattcagagtccaaagtaaggagcactttgcttggctcacagtagacaattgatgaccatttggggagtggacaaatgggtggatggacggatggacagatgcgtgaatggatgagtgggcaatggagcaatgttataatggtaattctctatctataaaataagtataacaactcattaataaaactgaaaacagttgtgacttcttagttgctcagtaactccttttttttttcttgtagctgatgtagagaaagaaaaaacagggtgatgaaaatccta

SEQ ID NO: 3468 - DNA, 397 bp, Homo sapiens
ctgaactcaagaaatcctcctgccttagcctcttgaatagccgggactacaggtgtgcatgtccatgcccagccaactttatttctattttttgtagagacaggctcttgccatgttgcccgggctggtcctgaactgctgaattcaagtgatcctcccaccttggcctccagaagtgctgggattatgggtgtgagccaccatgcctagccaaaatgtttcttaaggtatacattttgggtcttagaagacttatacatttgtaatatttattactaaatatctcaaagtattacaataaatgttaccatgtgagctactttggaatcagggcttcttggcacaccaattttaaaaaatgttaactcttggatatattacactagtttattaccac

SEQ ID NO: 3469 - DNA, 437 bp, Homo sapiens
  misc_feature (86)..(86): n is a, c, g, or t
  misc_feature (140)..(140): n is a, c, g, or t
  misc_feature (219)..(219): n is a, c, g, or t
  misc_feature (231)..(231): n is a, c, g, or t
  misc_feature (243)..(243): n is a, c, g, or t
  misc_feature (256)..(256): n is a, c, g, or t
  misc_feature (266)..(266): n is a, c, g, or t
  misc_feature (294)..(294): n is a, c, g, or t
  misc_feature (318)..(318): n is a, c, g, or t
  misc_feature (350)..(350): n is a, c, g, or t
  misc_feature (383)..(383): n is a, c, g, or t
  misc_feature (398)..(398): n is a, c, g, or t
  misc_feature (418)..(418): n is a, c, g, or t
  misc_feature (429)..(429): n is a, c, g, or t
  misc_feature (435)..(435): n is a, c, g, or t
ttttttttttttttttttaagattctgaacttttattttctggcatgaaaagtacaaataattaaacaattccatgtaaaagtctnttaccgcggccaggcctgtgatcccggtaataaatagtctaaacgcaacggaangtgttcttgttgggtttttttttttttttttgtcttttgttttgtctttttttttttttttttttttacagttttttancacccccaacanggactctgtcgngatttgaaacctnccgaataaanaacaggatgaagggaggggtggaggggntgagccttcccccctgggcctggnccctgccccccagggacgtggaagccccaagnccccctcgcctggggagccccggcctgggcccntgcgggaaagggggntggcctccaggggaaggggncctggggtggngttgantt

SEQ ID NO: 3470 - DNA, 479 bp, Homo sapiens
  misc_feature (116)..(116): n is a, c, g, or t
gatgatgtccagaatttattactcctggaagaacagactcaaaacgcaggtgagagccacacaggtgtccaccaagacggatggagggggactcaggccaggggtggaggctgcanagtggcaccggtgggcatgccaggcacctcaggctttctcatccaggcgtgtcctggctgtgaaagggaccaggtagcccctcccatgccacacgtggcctccaaaggcccagatatgtacagatctacagacgtgcactccctggtcccccggcgaggtccaggctacaggtctgacaagaccaaacctcacggcaggcctctcactgctgtcagcatcctgggccagggcacaggacggagaggcgctcccatcgcccccagcagcaaaccacagcagaggtgtccacgcacccctgagcacactccatgacgcgcaccctgagcggctcctctctccaggggatggccacgcaggccacg

SEQ ID NO: 3471 - DNA, 520 bp, Homo sapiens
  misc_feature (27)..(27): n is a, c, g, or t
  misc_feature (30)..(30): n is a, c, g, or t
  misc_feature (42)..(42): n is a, c, g, or t
  misc_feature (119)..(119): n is a, c, g, or t
  misc_feature (233)..(233): n is a, c, g, or t
  misc_feature (237)..(237): n is a, c, g, or t
  misc_feature (474)..(474): n is a, c, g, or t
  misc_feature (485)..(485): n is a, c, g, or t
  misc_feature (514)..(514): n is a, c, g, or t
acaagtaaatgggggccgttgggacgnggngtgcctggaggnagctctgggctcagcgggcagtgcttagagcacaggcccctctgttgggggatggggaggagagcagtctgcccttnggagcgtaggccccagggagacttctaaagccccccctgtcgtctgctcttcacccagcaccacagaggcacctgctgcacacacaagcatctcactcggcccacggagggcangtgncttcctttgcctgaagctgttttgggaagggtctccacacaggcactgatctcccaagctttggtcatgatgtcttttaccatttgataattttaaacattgtttttaaacccaaaacatttagtggtccgtttgcctctgaaagatgttaaacaaacaaatacactattttctggggaacattttatattggaggattctttgtgggctattgggtgtggtctcaacagggcaaanttttgattttnggctaaaaataggggttcagatgtatttngtggtt

SEQ ID NO: 3472 - DNA, 4132 bp, Homo sapiens
gagctccgccacgcgaggtttcgggctcgtggttttgcttcctccggccaaggtccccgccgctgcatccctcgcggcttcccgtgcgctccgggccggagccgagccgcctgcgctgccacagccagcgcctccacacactcgcagacgctcacacgctctccctccctgttcccccgccccctccccagctccttgatctctgggtctgttttattactcctggtgcgagtcccgcggactccggcccgctatttgtcatcagctcgctctccattggcggggagcggagagcagcgaagaagggggtggggaggggaggggaagggaagggggtggaaactgcctggagccgtttctcgcgccgctgttggtcgtgccgctgcctcctcctcctccgccgccgccgccgccgccgccgccgccctctccggctcttcgctcggcccctctccgcctccatgtgccggatagcgggagcgctgcggaccctgccgctgctggcggccctgcttcaggcgtctgtagaggcttctggtgaaatcgcattatgcaagactggatttcctgaagatgtttacagtgcagtcttatcgaaggatgtgcatgaaggacagcctcttctcaatgtgaagtttagcaactgcaatggaaaaagaaaagtacaatatgagagcagtgagcctgcagattttaaggtggatgaagatggcatggtgtatgccgtgagaagctttccactctcttctgagcatgccaagttcctgatatatgcccaagacaaagagacccaggaaaagtggcaagtggcagtaaaattgagcctgaagccaaccttaactgaggagtcagtgaaggagtcagcagaagttgaagaaatagtgttcccaagacaattcagtaagcacagtggccacctacaaaggcagaagagagactgggtcatccctccaatcaacttgccagaaaactccaggggaccttttcctcaagagcttgtcaggatcaggtctgatagagataaaaacctttcactgcggtacagtgtaactgggccaggagctgaccagcctccaactggtatcttcattatcaaccccatctcgggtcagctgtcggtgacaaagcccctggatcgcgagcagatagcccggtttcatttgagggcacatgcagtagatattaatggaaatcaagtggagaaccccattgacattgtcatcaatgttattgacatgaatgacaacagacctgagttcttacaccaggtttggaatgggacagttcctgagggatcaaagcctggaacatatgtgatgaccgtaacagcaattgatgctgacgatcccaatgccctcaatgggatgttgaggtacagaatcgtgtctcaggctccaagcaccccttcacccaacatgtttacaatcaacaatgagactggtgacatcatcacagtggcagctggacttgatcgagaaaaagtgcaacagtatacgttaataattcaagctacagacatggaaggcaatcccacatatggcctttcaaacacagccacggccgtcatcacagtgacagatgtcaatgacaatcctccagagtttactgccatgacgttttatggtgaagttcctgagaacagggtagacatcatagtagctaatctaactgtgaccgataaggatcaaccccatacaccagcctggaacgcagtgtacagaatcagtggcggagatcctactggacggttcgccatccagaccgacccaaacagcaacgacgggttagtcaccgtggtcaaaccaatcgactttgaaacaaataggatgtttgtccttactgttgctgcagaaaatcaagtgccattagccaagggaattcagcacccgcctcagtcaactgcaaccgtgtctgttacagttattgacgtaaatgaaaacccttattttgcccccaatcctaagatcattcgccaagaagaagggcttcatgccggtaccatgttgacaacattcactgctcaggacccagatcgatatatgcagcaaaatattagatacactaaattatctgatcctgccaattggctaaaaatagatcctgtgaatggacaaataactacaattgctgttttggaccgagaatcaccaaatgtgaaaaacaatatatataatgctactttccttgcttctgacaatggaattcctcctatgagtggaacaggaacgctgcagatctatttacttgatattaatgacaatgcccctcaagtgttacctcaagaggcagagacttgcgaaactccagaccccaattcaattaatattacagcacttgattatgacattgatccaaatgctggaccatttgcttttgatcttcctttatctccagtgactattaagagaaattggaccatcactcggcttaatggtgattttgctcagcttaatttaaagataaaatttcttgaagctggtatctatgaagttcccatcataatcacagattcgggtaatcctcccaaatcaaatatttccatcctgcgcgtgaaggtttgccagtgtgactccaacggggactgcacagatgtggacaggattgtgggtgcggggcttggcaccggtgccatcattgccatcctgctctgcatcatcatcctgcttatccttgtgctgatgtttgtggtatggatgaaacggcgggataaagaacgccaggccaaacaacttttaattgatccagaagatgatgtaagagataatattttaaaatatgatgaagaaggtggaggagaagaagaccaggactatgacttgagccagctgcagcagcctgacactgtggagcctgatgccatcaagcctgtgggaatccgacgaatggatgaaagacccatccacgctgagccccagtatccggtccgatctgcagccccacaccctggagacattggggacttcattaatgagggccttaaagcggctgacaatgaccccacagctccaccatatgactccctgttagtgtttgactatgaaggcagtggctccaccttggggtccttgagctcccttaattcctcaagtagtggtggtgagcaggactatgattacctgaacgactgggggccacggttcaagaaacttgctgacatgtatggtggaggtgatgactgaacttcagggtgaacttggtttttggacaagtacaaacaatttcaactgatattcccaaaaagcattcagaagctaggctttaactttgtagtctactagcacagtgcttgctggaggctttggcataggctgcaaaccaatttgggctcagagggaatatcagtgatccatactgtttggaaaaacactgagctcagttacacttgaattttacagtacagaagcactgggattttatgtgcgctttttgtacctttttcagattggaattagttttctgtttaaggctttaatggtactgatttctgaaacgataagtaaaagacaaaatattttgtggtgggagcagtaagttaaaccatgatatgcttcaacacgcttttgttacattgcatttgcttttattaaaatacaaaattaaacaaacaaaaaaactcatggagcgattttattatcttgggggatgagaccatgagattggaaaatgtacattacttctagttttagactttagtttgttttttttttttttcactaaaatcttaaaacttactcagctggttgcaaataaagggagttttcatatcaccaatttgtagcaaaattgaattttttcataaactagaatgttagacacattttggtcttaatccatgtacacttttttatttctgtatttttccacttcactgtaaaaatagtatgtgtacataatgttttattggcatagtctatggagaagtgcagaaacttcagaacatgtgtatgtattatttggactatggattcaggttttttgcatgtttatatctttcgttatggataaagtatttacaaaacagtgacatttgattcaattgttgagctgtagttagaatactcaatttttaatttttttaatttttttattttttattttctttttggtttggggagggagaaaagttcttagc

SEQ ID NO: 3473 - protein, 905 aa, Homo sapiens [sequence omitted]

SEQ ID NO: 3474 - DNA, 458 bp, Homo sapiens
  misc_feature (9)..(9): n is a, c, g, or t
  misc_feature (11)..(11): n is a, c, g, or t
  misc_feature (16)..(16): n is a, c, g, or t
  misc_feature (23)..(23): n is a, c, g, or t
  misc_feature (25)..(25): n is a, c, g, or t
  misc_feature (401)..(401): n is a, c, g, or t
  misc_feature (411)..(411): n is a, c, g, or t
cctcgacantntcggncagagtngngaggaaagaaaaattttaagacttacaagttatgtttaggtattttacatggttcagaaaacaagacatgaagcggtataaactgagaagtcttgttcccacaaccccacgtgccaggtacacataaccatttttattcacctctagcttgtgcttccaatgtttgttaggcatatgtaaataagtgaatagataagcatttctccctccttttgctgacatgagtggtggcatgttttgcccctggcttttatcccttgaccccattccagtacctagagacctgcttcatttttttagatgtgtaatacttcatgtgtgcgtgtgccttagtgattaacttcgtgcactgtgcagggacatcgggctggggatncagtttgttncactgatatatacagcgctgcgggagatacctcacatgtgtattcat

SEQ ID NO: 3475 - DNA, 395 bp, Homo sapiens
tttttttttttttttttgcttttcaaaattttttttaatagttaactaagttaggaaaaagttaccatcttcatcaaatacttaaaattgtaaagcaaaatatatggaatagaaaatggcattcgttcacgtcagacacttgtgatgataaagtatggtactctgtgagtggactgatgaccaaggcagatgtgtacagatgctaaactgttgggaaaatgctgcttatgagacatctctgcttcttgagacctgaatctgcaaatgttgagcactgtaccttacaaaagccaacagtttcttggcacagagtgtaaaagtttcatgggttagaatgttggtgaaattgtacactcagtacctgaatttaaactttaggagctcacctcgtgccg

SEQ ID NO: 3476 - DNA, 479 bp, Homo sapiens
ttgcggccgcgttccccacagaggacagcaggacttccaaggagagcatgtcggaggctgatcgcgcccagaagatggacggggagtcgaggaggagcaggagtccgtggacaccggggaggaggaggaaggcggtgacgagtctgacctgagttcggaatccagcattaagaagaaatttctcaagaggaaaggaaagaccgacagtccctggatcaagccagccaggaaaaggaggcggagaagtagaaagaagcccagcgttgccctcggttctgagtcgtataagtcatctgcaggaagcgctgagcagacggcaccaggagacagcacagggtacatggaagtttctctggactccctggatctccgagtcaaaggaattctgtcttcacaagcagaagggttggccaacggtccagatgtgctggagacagacggcctccaggaagtgcctctctgcagctgccggatggaaa

SEQ ID NO: 3477 - DNA, 192 bp, Homo sapiens
  misc_feature (142)..(142): n is a, c, g, or t
  misc_feature (186)..(186): n is a, c, g, or t
ttttttttttttttttttttgcaataaatgctttttattgtatgctcatttcaatgagtaacatttagaaataataatcccacataacagtagcgatcttattttacagcgtgtacatcatttacagccacataacacacanttttagtagatattccaaatttaatattctgaagttaagaaagntaaaaa

SEQ ID NO: 3478 - DNA, 407 bp, Homo sapiens
  misc_feature (343)..(343): n is a, c, g, or t
aaggcaagtttattaaaaaagtaaaggaataaagaatggctactctataagcagaacagctcaactagcatggtttctatcccctaactagactccaacgaatgcaagagggataatagcatctacctcctaatacaacactaatacttattatcattagtatattaggctacagaagccaaaagcagaaattaagaaatgttatggtcagtagaatcaaatatacaaggatattggattaggttattgttgttggtctttcagagcaaagttttaaaatctgatttgagaaaaacctcccagcatgcacacacagccggactctcagaaaatgtttcctttntagtcaattcctacatggatgccatgcaaaaccactccatctatcaagctgtcagaatgaactg

SEQ ID NO: 3479 - DNA, 1236 bp, Homo sapiens
tagttcaagacaacagagacaaagctaagatgaggaagttctgtacagtttaggaaatagaggctttcaaagataattcgcagtgatgtgaaactggcctcccaagccctgataacaacatggccaacgccctggccagcgccacttgcgagcgctgcaagggcggctttgcgcccgctgagaagatcgtgaacagtaatggggagctgtaccatgagcagtgtttcgtgtgcgctcagtgcttccagcagttcccagaaggactcttctatgagtttgaaggaagaaagtactgtgaacatgactttcagatgctctttgccccttgctgtcatcagtgtggtgaattcatcattggccgagttatcaaagccatgaataacagctggcatccggagtgcttccgctgtgacctctgccaggaagttctggcagatatcgggtttgtcaagaatgctgggagacacctgtgtcgcccctgtcataatcgtgagaaagccagaggccttgggaaatacatctgccagaaatgccatgctatcatcgatgagcagcctctgatattcaagaacgacccctaccatccagaccatttcaactgcgccaactgcgggaaggagctgactgccgatgcacgggagctgaaaggggagctatactgcctcccatgccatgataaaatgggggtccccatctgtggtgcttgccgacggcccatcgaagggcgcgtggtgaacgctatgggcaagcagtggcatgtggagcattttgtttgtgccaagtgtgagaaaccctttcttggacatcgccattatgagaggaaaggcctggcatattgtgaaactcactataaccagctatttggtgatgtttgcttccactgcaatcgtgttatagaaggtgatgtggtctctgctcttaataaggcctggtgcgtgaactgctttgcctgttctacctgcaacactaaattaacactcaagaataagtttgtggagtttgacatgaagccagtctgtaagaagtgctatgagaaatttccattggagctgaagaaaagacttaagaaactagctgagaccttaggaaggaaataagttcctttattttttcttttctatgcaagataagagattaccaacattacttgtcttgatctacccatatttaaagctatatctcaaagcagttgagagaagaggacctatatgaatggttttatgtcatttttttaaa

SEQ ID NO: 3480 - protein, 325 aa, Homo sapiens
MANALASATCERCKGGFAPAEKIVNSNGELYHEQCFVCAQCFQQFPEGLFYEFEGRKYCEHDFQMLFAPCCHQCGEFIIGRVIKAMNNSWHPECFRCDLCQEVLADIGFVKNAGRHLCRPCHNREKARGLGKYICQKCHAIIDEQPLIFKNDPYHPDHFNCANCGKELTADARELKGELYCLPCHDKMGVPICGACRRPIEGRVVNAMGKQWHVEHFVCAKCEKPFLGHRHYERKGLAYCETHYNQLFGDVCFHCNRVIEGDVVSALNKAWCVNCFACSTCNTKLTLKNKFVEFDMKPVCKKCYEKFPLELKKRLKKLAETLGRK

SEQ ID NO: 3481 - DNA, 463 bp, Homo sapiens
tggcccgaggagtgtgctcaggccgggctttccagaaggccacaggccactgcaaaccctgctgcctgccggccgcccagacaccacatacgccacctggcggccctaagccactcccgccacacgctcactccaggttcgtatagaaaaagcacagctctcactggccagtagctgccaaaaagaacacccatcgtataaggaaatccagccccatagaaaacaatctgcccaccgaccccctttctaaggatagcctttgaaggggttttttggttccttttttttttttcagtttttgtttttacttttgtcccgccgagtactatgtattaccagccccccaccccacagatcagttttcctagtctttgggaaacgggttgtgttttttttcctttgccgagttggatttccggtcccggctgacacctcccttcgagtgtgcgcccctccccacccc

SEQ ID NO: 3482 - DNA, 700 bp, Homo sapiens
gtgagcatggtgccagcctgggccagagcagctcctcctaaggggtggctgctcagtgacgccgggttgagggacagaaggaaagttgctggctgcgggctcctccatgctcttctcctctctccccagtgcaagatgtctctgaacgggcagcgtggggagtgctggtgtgtgaaccccaacaccgggaagctgatccagggagcccccaccatccggggggaccccgagtgtcatctcttctacaatgagcagcaggaggctcgcggggtggacacccagcggatgcagtagaccgcagccagccggtgcctggcgcccctgccccccgcccctctccaaacaccggcagaaaacggagagtgcttgggtggtgggtgctggaggattttccagttctgacacacgtatttatatttggaaagagaccagcaccgagctcggcacctccccggcctctctcttcccagctgcagatgccacacctgctccttcttgctttccccgggggaggaagggggttgtggtcggggagctggggtacaggtttggggagggggaagagaaatttttatttttgaacccctgtgtcccttttgcataagattaaaggaaggaaaagtaaagtgtgtgtcttttgcctgagtctttggggtcttccagggagagatgcagagcctggcctaggttggcctacccg

SEQ ID NO: 3483 - protein, 328 aa, Homo sapiens [sequence omitted]

SEQ ID NO: 3484 - DNA, 559 bp, Homo sapiens
gactctacaggatcttggtcgctcggacaagcaagagaacggacagctcacgcttaagacccaaactccccagtggcttacaagctggggtttttaggggtatgggtacatttcaggaaagcagaagttgcaggcaaaatcattaaccaatacatggggtgtcatgagcagtgcaaagttagagataatcacatccaagcatgcctgtgtctttcacaatgtcagaattttattgaggctatttcaatccctaaagccacgagccacacggcgttcccaaggaggcatgctgcttagtgctcctttccctcagtagtgagagctgcggtcacacgggctcaagccactgcacatgtcagccaatattgcacacgacaacgtaatagtgtacttaatcagtatatacatgttacaggttaacgttccacaacaaagaaagtagcatttaacatccagaggaaacagagataggagaaagggttcacgaaccagtccaggagagtgaagaagacacaagaagaagacagaaacctcctggtctgggccagtctgtggatct

SEQ ID NO: 3485 - DNA, 415 bp, Homo sapiens
tttttttttaagtggcattttacattttatgttttcagttatttaatagttttaacaattactttacacagaacccccaaattgtccacaaacaccataggtacctcattttgaaaaggatatttttgataaagatgactagctaagaaataaagcaagaaaagcaacacccaaaatgtgtgcccctagctcattctggaggtatttagtggacagtctctcttgaatcctaagcaggctggtcatgcttggcccagaattcccaaataatgatttgcgtctgaaatttcccataaggttttgcaatgttccactcatacctatgacagtccagaacaatactaatccagaagcatttttaggtaattgagagtacattttttaaacacaatctatgcacaatacagtgattagg

SEQ ID NO: 3486 - DNA, 517 bp, Homo sapiens
tttacttttaaaaaaatgtcattaaagcctatccactattgttgatattgccttctttgataacccatagaatattttgatagccactcatagggagttttctaaaataaattcatattaattttaatctcagtaaaggtgagtcattggcaaatattaataattaattgctatactttttcaaaacttctcagataagaaaaaaatgcgtttgacataaaaggcatttggcagattgggattctttctgtttgctttttcttttcttttctttttttttttttttccaattctttctacaaacagcatcaaggaaaaggcagaactgtactcctgaggcttctggaacagtcgacccataaattctctagagtagagtttcttaccgggtgtgcaggcatctgaagagttcccgaaaaatactcatgtctggaagctactcccatagattttagatgtattatgcagctaggtattggaataaagcaaaaataaccacagaaagtctgagacattg

SEQ ID NO: 3487 - DNA, 388 bp, Homo sapiens
ttttaaggatttaatccaacaaacatttattgagcaactgctgtgtgctatgccaccgcctagtgctgtgatggatacagatgaataaaacacagtccctgcccttggaaggcttacagtctaagaacagtcaaaggacaagtgcacaaataactataatacaaggcagaatatggtaagtgccatgagaaaggtacaaataaagtgctacggtggttcagcagagggagagatcccagtggttggtacatcagggagggcttcatgaaggacgtggtttccgcatgggctttgaagggaagaaaagggagcattccaggggatggggatagcaagaccaaaggcacagagacagtaaaacgcaggcaccctttccaggaaaaacaac

SEQ ID NO: 3488 - DNA, 650 bp, Homo sapiens
gaggatcacgtgccgcgagttttgtgacgctgcggggcgggcggacagactgcgggacggacggtggacgctgggacgcgtttgtagctccggccccgccgttccgacccccgccgccgtcgccgccatgacggggctagcactgctctactccggggtcttcgtggccttctgggcctgcgcgctggccgtgggagtctgctacaccatttttgatttgggcttccgctttgatgtggcatggttcctgacggagacttcgcccttcatgtggtccaacctgggcattggcctagctatctccctgtctgtggttggggcagcctggggcatctatattaccggctcctccatcattggtggaggagtgaaggcccccaggatcaagaccaagaacctggtcagcaatcatcttctgtgaggctgtggccatctacggcatcatcatggcaattgtcattagcaacatggctgagcctttcagtgccacagaccccaaggtccatcggccatcggaactaccatgcaggctactccatgtttggggctggcctcaccgtaggcctgtctaacctcttctgtggagtctgcgtgggcatcgtgggcagtggggctgccctggccgatgctcagaaccccagcctctatgt

SEQ ID NO: 3489 - DNA, 382 bp, Homo sapiens
cctgtaattgagttggaggttgagatggtctgtgttcaagaaactaagttctaaatgtagagctgcttgtagtgttgtcggtggtggtgtatgcattcaatttgaaggaaaatttaccaggtcaataatacacacgtttccacacatttttaaagcaatcagtgagctggccttttaaaatttcatctgcgttaaaacatccctctgccgaggcaaggaagtggacattgaggtattaagcctgtccttcagccaagcactgagggcccaagtgttagaattaaaggaaaaaaaatttcccatggtattaatatatttacaaaagaaaagtcataaataaaagcagtggccatgcctccattccatctgtgttcactcgcct

SEQ ID NO: 3490 - DNA, 427 bp, Homo sapiens
tttgctattcatttctaccttgtctattgattatgtcatttattcattaataatactttcaaggcccgtgattcacaaaacccagtaacactcttgatattccctatcagtatacagaatcactcaaacattgggtgtttcattaactatcctgttttttatatatgcatcatcaatataatacttcatgtcactcccatatcactggaataacattggccatctttgactgtatttcacacttttaaataatacgttgattactcttaaacaaaccacccaaacaaaggtaaggactttgactattactccccttggtcttcacgctccttcctaagcgtggtgcaaacagagtatgtgaccttggaggcatcctcaaatcagaacaaggacatccattattggtctccatgctcctaataccctg

SEQ ID NO: 3491 - DNA, 359 bp, Homo sapiens
  misc_feature (261)..(261): n is a, c, g, or t
ttttttttttttcatttaacgagcatttattgcacacgtctgttcaagcaccaggctcaggctggaaaccatccaaagcgcaatccctgacctcaggcagctcacagtccaggggggaagccgagaagcaaattaatgactctgaaaaagcgcaggcaagtgctatgatcaaggcatgtgtgtgggtagggtgtctgggaaccccaaagtcagcctcaggtggggaggtaagtcaaggaagggtgaggggactgggctcancctgggtcttggaggagagcggggccagccccggggatggtagagtcaacctgccaggcactgtgcactgctggccaggcccggccaatgagagcaca

SEQ ID NO: 3492 - DNA, 503 bp, Homo sapiens
tttttttttttttttttgctgctaatcttgttttattgtggtctttcatccatcagcaagcatccctgcacgcaagatcagagttgggtaaatacatccagaccctgccaggattagggcaagagggagtgctctgggccggcagatctttttcggaaattctcacttcttggagcactaaagggttgttagtctatctgggcaagcctcgtttccctggagaaaatggagtctcagagattagtgactggtcctagagctaatgagtgaccaaagtgtgaccagagcccaggtctgcttctcaacccagggcactttgattccagattgagatgtaaggtgacaggtgccttaatagtggcgcaaaagatgtgcattcccctcttcctccctccccgctccctgctcccccagcgggaccctgaccttcctcaaatgcagaatcaagatttcagcaggggggccagccctttccctgccccaccctcctcgaattcagtgac

SEQ ID NO: 3493 - DNA, 140 bp, Homo sapiens
  misc_feature (83)..(83): n is a, c, g, or t
aataaagggccttctttcactttattttcaaaatagcaagctaataagtgaaggaataagtaacattttaaacattagcagantatgattgtcagaattttgtttaattacatagttacatttcatcacatgataacaaa

SEQ ID NO: 3494 - DNA, 497 bp, Homo sapiens
tttttttttttttttttgcaaatctcaaatttaagtttatttaaaaattacaaaaatgtctccactcaagttgtccttgaaaaaaatttagaagcagcaacaatcatcttggtgagttacaagcagtctagtgcaatttataaaatcgagcaaaatttggatgtgtgtcttatccctctgtagacacgggacccttttttgaggtctctttctttagggtctggtagcatcatgactgggacactttccaaagccttcttcctttggactctatgtaaaataattctatagacccctgtgattgagctgcgagcatctctcccttggttatttcgaagatgctcttctgtaatgcccaaatgttctaaagtgcttttgacctcattttcttcttccttgagagtgctggtttccgacaaatgtttgggatccagttggaaaggttccaaaggtgtagggtatggcaccccttgcatccattcatcattcatgatgca

SEQ ID NO: 3495 - DNA, 420 bp, Homo sapiens
gaacgttcggactgaggtttttctgcctgaagaagcgtcatacggaccggattgttttcgctggcccagtgtccccggagcttgtgtgcgatacagagagcacctcggaagctgaggcagctggtacttgacagagaggatggcgctgtcgaccatagtctcccagaggaagcagataaagcggaaggctccccgtggctttctaaagcgagtcttcaagcgaaagaagcctcaacttcgtctggagaaaagtggtgacttattggtccatctgaactgtttactgtttgttcatcgattagcagaagagtccaaggacaaacgcttgtgcgaagtaaatgtagagtcattaacaaggagcatgtacttggccgcagcaaaggtaattctaaagaagagcagaggttagaagtcaaagaa

SEQ ID NO: 3496 - DNA, 481 bp, Homo sapiens
tttaaaactacagttcttttattcatcctaacacctagcagacagccctccacatagtaagcacttaagtatttggtgactggagatatgaaaaggcctacagtaaaagagaaaaatcatgcaatcactagataaaaaactacctagatttgtgtatctgactccaaaattgggctggaattgttagtagacaaattttcttctggcaaacaaacaaaaatgcaacaaaacttcaagataaacaatctatgtagtaaggcagtgtcaaacacatccgttttacccaaacgacagaacaaataccaataagatgacagacatcaaaatcaaactttgcagcaataaacaaattttcatatctgactgtaaattaaaatcttgtgtgcttagaaacatgttcatttagacagtattaaaaagtaggatgttagtctcaaaatccaagagttaaattattaattcaatttcaatacttataatt

SEQ ID NO: 3497 - DNA, 1767 bp, Homo sapiens
gaattccggctccctcccgccggccggggtgcgcgggccggcggggccggcccgggccgggccaatgcgttcggcgcggcccagcccggccggccggggggggcgccccgagcccgggccccgcgcggcccgcgcccccggcccccgctgagccctgggggccccgcagcggccgaggccatgttcccggtgtttccttgcacgctgctggccccccccttccccgtgctgggcctggactcccggggggtgggcggcctcatgaactccttcccgccacctcagggtcacgcccagaaccccctgcaggtcggggctgagctccagtcccgcttctttgcctcccagggctgcgcccagagtccattccaggccgcgccggcgcccccgcccacgccccaggccccggcggccgagcccctccaggtggacttgctcccggtgctcgccgccgcccaggagtccgccgcggctgctgcggccgctgccgccgctgctgccgccgtcgctgccgcgcccccggcccctgccgccgcctctacggtggacacagcggccctgaagcagcctccggcgccccctccgccacccccgccagtgtcggcgcccgcggccgaggccgcgccccccgcctccgccgccactatcgccgcggcggcggccaccgccgtcgtagccccaacctcgacggtcgccgtggccccggtcgcgtctgccttggagaagaagacaaagagcaaggggccctacatctgcgctctgtgcgccaaggagttcaagaacggctacaatctccggaggcacgaagccatccacacgggagccaaggccggccgggtcccctcgggtgctatgaagatgccgaccatggtgcccctgagcctcctgagcgtgccccagctgagcggagccggcgggggagggggagaggcgggtgccggcggcggcgctgccgcagtggccgccggtggcgtggtgaccacgaccgcctcggggaagcgcatccggaagaaccatgcctgcgagatgtgtggcaaggccttccgcgacgtctaccacctgaaccgacacaagctgtcgcactcggacgagaagccctaccagtgcccggtgtgccagcagcgcttcaagcgcaaggaccgcatgagctaccacgtgcgctcacatgacggcgctgtgcacaagccctacaactgctcccactgtggcaagagcttctcccggccggatcacctcaacagtcacgtcagacaagtgcactcaacagaacggcccttcaaatgtgagaaatgtgaggcagctttcgccacgaaggatcggctgcgggcgcacacagtacgacacgaggagaaagtgccatgtcacgtgtgtggcaagatgatgagctcggcttatatttcggaccacatgaaggtgcacagccagggtcctcaccatgtctgtgagctctgcaacaaaggtactggtgaggtttgtccaatggcggcggcagcggcagcggcggcagcggcagcagcggcagcagtagcagcccctcccacagctgtgggctccctctcgggggcggagggggtgcctgtgagctctcagccacttccctcccaaccctggtgagctccaagttggttgcgggggagaggggagaatggagtagagtcccttggtacaagctcctctcccccctcttttcccaccaactcctatttccctaccaaccaaggagcctccagaaggaaaggaggaagaaatgttttcttaggggaattc

SEQ ID NO: 3498 - protein, 537 aa, Homo sapiens
EFRLPPAGRGARAGGAGPGRANAFGAAQPGRPGGAPRARAPRGPRPRPPLSPGGPAAAEAMFPVFPCTLLAPPFPVLGLDSRGVGGLMNSFPPPQGHAQNPLQVGAELQSRFFASQGCAQSPFQAAPAPPPTPQAPAAEPLQVDLLPVLAAAQESAAAAAAAAAAAAAVAAAPPAPAAASTVDTAALKQPPAPPPPPPPVSAPAAEAAPPASAATIAAAAATAVVAPTSTVAVAPVASALEKKTKSKGPYICALCAKEFKNGYNLRRHEAIHTGAKAGRVPSGAMKMPTMVPLSLLSVPQLSGAGGGGGEAGAGGGAAAVAAGGVVTTTASGKRIRKNHACEMCGKAFRDVYHLNRHKLSHSDEKPYQCPVCQQRFKRKDRMSYHVRSHDGAVHKPYNCSHCGKSFSRPDHLNSHVRQVHSTERPFKCEKCEAAFATKDRLRAHTVRHEEKVPCHVCGKMMSSAYISDHMKVHSQGPHHVCELCNKGTGEVCPMAAAAAAAAAAAAAAVAAPPTAVGSLSGAEGVPVSSQPLPSQPW

SEQ ID NO: 3499 - DNA, 249 bp, Homo sapiens
tttgtttttttttttttttttttttttttttttcaacacatcttttttatgtataaatgggtcaggggtacagagggagttactttttataaatatctgcagcaaatcccctaaaaaagatgtgaataaaaactttttttcagcacaaagggcctattccttccccaaaagtgttaaattcccgagagcctgtgcttagccaaacacttgtggggcctcctgggaagaacaggaggactttgggaccga

SEQ ID NO: 3500 - DNA, 802 bp, Homo sapiens
  misc_feature (19)..(19): n is a, c, g, or t
  misc_feature (76)..(76): n is a, c, g, or t
  misc_feature (224)..(224): n is a, c, g, or t
  misc_feature (260)..(260): n is a, c, g, or t
  misc_feature (290)..(290): n is a, c, g, or t
  misc_feature (293)..(293): n is a, c, g, or t
  misc_feature (311)..(311): n is a, c, g, or t
  misc_feature (375)..(375): n is a, c, g, or t
  misc_feature (386)..(386): n is a, c, g, or t
  misc_feature (395)..(395): n is a, c, g, or t
  misc_feature (402)..(402): n is a, c, g, or t
  misc_feature (414)..(414): n is a, c, g, or t
  misc_feature (463)..(463): n is a, c, g, or t
  misc_feature (466)..(466): n is a, c, g, or t
  misc_feature (478)..(478): n is a, c, g, or t
  misc_feature (484)..(484): n is a, c, g, or t
  misc_feature (488)..(488): n is a, c, g, or t
  misc_feature (490)..(490): n is a, c, g, or t
  misc_feature (506)..(506): n is a, c, g, or t
  misc_feature (525)..(526): n is a, c, g, or t
  misc_feature (535)..(535): n is a, c, g, or t
  misc_feature (540)..(540): n is a, c, g, or t
  misc_feature (576)..(576): n is a, c, g, or t
  misc_feature (584)..(584): n is a, c, g, or t
  misc_feature (588)..(588): n is a, c, g, or t
  misc_feature (622)..(622): n is a, c, g, or t
  misc_feature (628)..(628): n is a, c, g, or t
  misc_feature (639)..(639): n is a, c, g, or t
  misc_feature (650)..(650): n is a, c, g, or t
  misc_feature (653)..(653): n is a, c, g, or t
  misc_feature (667)..(667): n is a, c, g, or t
  misc_feature (671)..(673): n is a, c, g, or t
  misc_feature (681)..(681): n is a, c, g, or t
  misc_feature (685)..(685): n is a, c, g, or t
  misc_feature (688)..(688): n is a, c, g, or t
  misc_feature (699)..(699): n is a, c, g, or t
  misc_feature (703)..(703): n is a, c, g, or t
  misc_feature (719)..(719): n is a, c, g, or t
  misc_feature (721)..(721): n is a, c, g, or t
  misc_feature (729)..(732): n is a, c, g, or t
  misc_feature (741)..(741): n is a, c, g, or t
  misc_feature (743)..(743): n is a, c, g, or t
  misc_feature (745)..(745): n is a, c, g, or t
  misc_feature (753)..(753): n is a, c, g, or t
  misc_feature (756)..(757): n is a, c, g, or t
  misc_feature (762)..(762): n is a, c, g, or t
  misc_feature (772)..(775): n is a, c, g, or t
  misc_feature (785)..(785): n is a, c, g, or t
  misc_feature (787)..(787): n is a, c, g, or t
  misc_feature (789)..(789): n is a, c, g, or t
  misc_feature (792)..(792): n is a, c, g, or t
  misc_feature (798)..(798): n is a, c, g, or t
  misc_feature (802)..(802): n is a, c, g, or t
tttgtcttctcccctattnagctcagagtgtgcccgctgcgccgacgctgtccgtacctgccgccgccgccaccgncaccatgcccaacttcgccggcacctggaagatgcgcagcagcgagaatttcgacgagctgctcaaggcactgggtgtgaacgccatgctgaggaaagtggccgtagcggctgcgtccaagccgcacgtggagatccgccaggacggngatcagttctacatcaagacatccaccacggtgcgnaccactgagatcaacttcaaggtcggaganggntttgaggaggagaccgtngacggacgcaagtgcaggagtttagccacttgggagaatgagaacaagatccactgcacgcaanctcttcttganggggacggncccaaancctactggaccngtgagctggccaacgatgaccttatcctgacgtttggcgccgatgacgnggncttgcaccagantttatntccnanagtgaagggaagttgnctttgctcctactttcaannaagggtttncaggntcccctgaggaattatgtcataggttcctgagcttnccagtggnaccncccctttttcccttacccaattttagggttgatncccccnttacccccatnaaaattttggnggngtcccccaccccancccnnnagggtttngttnccncttttttcccnattnggctttacccagtttnanctgtcaannnnggcgttttncnantcttttcnttnncaacnctcttctccnnnnttttcctcgntnanctntccttncccn

SEQ ID NO: 3501 - DNA, 482 bp, Homo sapiens
aggcaaagatcttttatttgtggttaggcttacaccattccaaaaagtaaacataattaacaaaacacttaaaagtaccagaggaggtgccccggtatcaacactaatcagaccacagaagaaagcttgacaaggatcttcatatacggatgccagcttcaatcatgtcaaatgaacatgttgttctctcagtggtaacagttagtaggccagagcagaactggagactcttttccactggtgtaggcagccagggctctccaggagtactattatagatgacatgaaagtgactaccacggtagcaatgacaacaatcccagttacaatgactgaacaaagctaaggccatcagtataggcttgaagcgatctagaaatccttctggagcctctcatcagctgatcatccctgatacatcccttggatggccacagaatccattttcacaaaactgaatccaatgcattgtgttatcactg

SEQ ID NO: 3502 - DNA, 471 bp, Homo sapiens
  misc_feature (122)..(122): n is a, c, g, or t
  misc_feature (137)..(137): n is a, c, g, or t
  misc_feature (149)..(149): n is a, c, g, or t
  misc_feature (165)..(165): n is a, c, g, or t
  misc_feature (373)..(373): n is a, c, g, or t
tttttaacggcagaaaagaaagtcttgaaagggttatttccaaagagtttgtctcctccgacccgcgctccttggacttttggaaagacaggatttccccacaccagttgaggaggctcagncttggctgaggcagnctttcccacccnctggcgtgcgtgttcnggtgccctggtctgtaaacactgtgcccaagctgccccagaccctggagccccgggttccgcaggccgggctacatggccttcatgccgttggccgtggcaccctcgggcagtgtgtcacccgcggctgcggcatcgtggaggcccgagtagtccttgagctcggcgttggtgagcagcagtggctgctcccccttcttgtgcggcancagcggctggcgcgtgttatggctcccgttagaaatgttctaaggcaggttctggtccctgctctcgggcagcaggaggatgcagatgatgcagatga

SEQ ID NO: 3503 - DNA, 506 bp, Homo sapiens
  misc_feature (439)..(439): n is a, c, g, or t
  misc_feature (482)..(482): n is a, c, g, or t
tttttttttttttttttacaactcacacaactttccaaattaaaatcagaaataattttcctctcacacttactatgatactaaggaagttcagctacacttgttaggtaggtaacccaaacctcacagtagtggcaataaaatcttcctcattttttctgttaacatttagactttaacactgataaagcgatatccgttcatgggagagaggcacacctactaccattaaggggactaagacgaaaattatcaatgcatttgtgatccaaaaggagaagtatttggctaagaagaaaatgagtattttatatagactttccagagtagctacctgcaactggagtcgggcaaaaaaactaagagtgcggcaaaaaatttatcttcttaaatattacaggtatggtatgaggtcttttgaggtacaaattgctgatanaaaaaaaaaatagccaaaaccttctaataaagacaaaatgtantagagctctggcctgttgttatgg

SEQ ID NO: 3504 - DNA, 135 bp, Homo sapiens
  misc_feature (69)..(69): n is a, c, g, or t
gcttgcgcgcgtgagctgagccggtgggtgagcggcggccacggcatcctgtgctgtgggggctacgangaaagatctaattatcatggacctgcgacagtttcttatgtgcctgtccctgtgcacagcctttgc

SEQ ID NO: 3505 - DNA, 501 bp, Homo sapiens
  misc_feature (415)..(415): n is a, c, g, or t
  misc_feature (430)..(430): n is a, c, g, or t
  misc_feature (441)..(441): n is a, c, g, or t
  misc_feature (456)..(456): n is a, c, g, or t
  misc_feature (465)..(465): n is a, c, g, or t
ggatggctctgggctggctttgttgatgatggctttcctacagccctgctcttgtgccgaggctgtcgggctgtctctagggtgggagcagctaatcagatcgcccagcctttggcctcagaaaaagtgctgaaacgtgcccttgcaccggacgtcacagccctgcgagcatctgctggactcaggcgtgctctttgctggttcctgggaggcttggccacatccctcatggccccattttatccccgaaatcctggggtgtgtcaccagtgtagagggtggggaaggggtgtctcacctgagctgactttgttcttccttcacaaccttctgagccttctttggggattctgggaaggaacttcgggcgtggagaaacatgtggacttccccttttccctttcccattcgctgntttcccacagggtgnacaggttgggntgggagaaacagaantcttcaccnggctttttcccaattaggcaggtgttttttgggtgg

SEQ ID NO: 3506 - DNA, 469 bp, Homo sapiens
aattcataggggccaccaaggcatgaggggatgaccgaccctggttaatccaaaccacaggacagacaaaagattaattccagtcgccagatgattaactctggtcattgggtcacaaccttgcctgtcagtaacttactcctaaactccttcaggaaaataaggaaacttgaacacgccacttttaaagtcaaactcagtgccattatgaaagaccctgtattctgtgcaaggtttcttggaggaatctgatttccagcttttgttcaattagtttcgtatcagtcaatccttgtttaaaaacatgtcataagtctctgtggtttgtgcacgcttcaattacctccgattattacatcaagattcacaaacgagataccagagtcactcctatttactgggaaatgctattgaagcaaactgaaattcaatttcagaaaagattgcaataacccgtcaaaacatccaa

SEQ ID NO: 3507 - DNA, 600 bp, Homo sapiens
  misc_feature (2)..(2): n is a, c, g, or t
  misc_feature (4)..(8): n is a, c, g, or t
  misc_feature (10)..(12): n is a, c, g, or t
  misc_feature (15)..(17): n is a, c, g, or t
  misc_feature (398)..(398): n is a, c, g, or t
  misc_feature (418)..(418): n is a, c, g, or t
  misc_feature (455)..(455): n is a, c, g, or t
  misc_feature (483)..(483): n is a, c, g, or t
  misc_feature (499)..(499): n is a, c, g, or t
  misc_feature (509)..(510): n is a, c, g, or t
  misc_feature (530)..(533): n is a, c, g, or t
  misc_feature (540)..(540): n is a, c, g, or t
  misc_feature (556)..(556): n is a, c, g, or t
  misc_feature (565)..(565): n is a, c, g, or t
  misc_feature (574)..(574): n is a, c, g, or t
  misc_feature (576)..(577): n is a, c, g, or t
  misc_feature (579)..(579): n is a, c, g, or t
  misc_feature (581)..(598): n is a, c, g, or t
tntnnnnntnnnttnnntactctgtggggtctattttataagggcactaaccccattcatgagagcagagcccccatggcctaatcacctttccaaggccccaccttctatctaagacaatcacgctgggaataggtttcaacatatgaattgggggaggacacatttggaccacagcatgaacctttagaacagggtttctcagccttagcactacggacatttggggctggataaatatgtgttggtacagaatgggggtatcctgtgcattgtaggatctttagcagtaccctagcctcaactcactagatgccaatgaaataccttgcttcttcaccagttatgataaccaagaatgtctccattgttaaatgtccccttaggagcaaaattgnccctggttgagaaacattgntttagacaaattgttaagagtatcatgtactacactnctgaaacttaacgtgatcatcaccactnacagatgattcacagngagagattgnngggatcttggctcactaggnnnncccgggnaaaaataaatgggggntcagttggnttacccgtntnntntnnnnnnnnnnnnnnnnnncc

SEQ ID NO: 3508 - DNA, 374 bp, Homo sapiens
cacgagggcagccgcagcagcagccgccgcggcggcacggaggagccagacacaaagagaggggctgtttgcggggtggggtggggggttcgctatgtcggatgacgattcgagggccagcaccagctcctcctcatcttcgtcttccaaccagcaaaccgagaaagaaacaaacacccccaagaagaaggagagtaaagtcagcatgagcaaaaactccaaactcctctccaccagcgccaagagaattcagaaggagctggcggacatcactttagaccctccacctaattgcagtgctggtcccaaaggcgataacatctattaatggagattaaccattctagggcctccaggatccgtgtatgagggtg

SEQ ID NO: 3509 - DNA, 2922 bp, Homo sapiens
tcggaactcgccaggggcgccgccggcggcggagggagcgtgactgcgctgcgcagggcgctaggaggcattgtcgccgctcaggcccttttgtgagaagcagaccagcctgggggctggcggcaggacacctgtgtctgcatgctgaagaagatgggtgaggccgtggccagagtagcaaggaaggtcaacgagacggtggagagcggctctgacactctggagctccacctggaggggaacttcctacaccgcctccccagcgaggtcagtgccctgcagcacctcaaggccattgacctgtcccggaaccagttccaggacttccctgagcagcttaccgccctgccggcgctggagaccatcaacctggaggagaacgagatcgtagatgtgcccgtggagaagctggccgccatgccagccttgcgcagcatcaacctccgcttcaacccactcaacgccgaggtgcgcgtgatcgccccgccgctcatcaagtttgacatgctcatgtctccggaaggcgcaagagcccccctaccttacgccaccctcctcatgcccacccagcaagggacagaggccacaggcctggaaccctggaagggagggaggcccatgggaggccaagcctgggggctgggggcgggtgggccgagcagcacgtggtgggtggggtgcagctggtctggatagatagcttacagcagtagtgggctctggaatgcccaagggaagaggcaaggtggggcctgcagcctggactcggcactcacagctgctgtgcaaactcaggcagatctcctgccctctctgagccttgtcacttgaaaaaaacaggaccctttccctcctttgggctccctggaggtttttaagcagtacgtgcctccagttacctccagatcagcaggcacaggtgggcattgccaggtattttctgagcccctgcgggtttgaggccttgtttttagtgctgagagccagttgctgccctgagaagagaagacaacctccatctatttattgcttcctgagaactgacctggatgcggccctctgcagggcccagtcttcagtcctgtggtccctggactggtgggaacctgaactaggagtcctgggagagctgtggtgggaatatgggctggcactgctgcagggcaagaacattcatgtaggagcccgaggaccagcaggctgggaatggggagcaagtcacgtcagctctgtcattccccacagttaacaaattggcggggtgggaagtcctgagtgctccgtccctctagcatcactcctgagctgcgggagaggtggcccagagaacagcagagtcagttacacctgcagctcttgtctaaagtgattagatggccaccctcaccactgtccagtccagcagcagcctggctgccttgtcatggcctcctgggggcagaaggcgatgtggaccacgggatttgtagccagccagctcccaggccaacgcccaaagccctgatgacctggttcttctgaggccctcaacctggcatcttagggtatggtcaggcaacagggtgaccagctgtcctggtttcccaggacatggaactttcaatgctaaaactggacagtacccagcaagtggggatggttggtcccctaccaggagagggcctggggctcttgcttcccgagaacgcctgtggcttgaagaaccttgactgcttggtcctcaggtatctacctcccaccttctcctcatctgtggagcaagccaactcagtgccccagaccccacctgatctgcatctttgtttgcatctccagagacacctgaggccccagagcttgaggcaaagccaggccgtccaaatcctgtgtgccgtggacgagtggccactttactactcctaaggctaagatgttgagagctcagaccactgctcagagcagtaatccctgctcagaatgctcccagttccctcgtccctgcccaggtctcttgtctcttgggaaggaactgataggtcgggccattgttgggccatcactgagcgctcagtatctcaagagactctgttcattctgctcgtatcccaaggcctggttggtcaaactctgggcaaagggttttcaggatgaggaggtcaagacaggatgtccagagctaccgagttcatctgtgggtgttgggggcaagtgggggctgaagtcctgtgcaggctgcgctggccccacctgccttgtgccctggagtggggtttctccttgttgaagaagaggcatccttctctgatgtgcacaaacacaatgtatgaccagagccttgcaactcaaagtgtggtctgtggaccagcagcggcagtgacacctgggagcttgttaggaatgcagagtctaggcctcaccctatacctcccgactcagaccctgcattttagcaagacccccagctgattcctataagcactttagagtttgagaagcaaggacctaggctggggatgtcctccgagcagagggtgaagtttctctcagttctctccctgccacttccagggatctgagcctgtgttcagcctcctccctaacccaccctgggagacacttggcctgttagattgttccagagtctgcatggcactcctgaagaagggagtgggacctgcagtcaccaggagatgagggttaggtgtgcccagccctccagacccggcctttctggttaacccctgcatgccaagctgcctgctgccccaggtcctcacctcaggcctttgaaggggcagcttctggaagttgttttctcctctgcttggagagtttgcccttgtctgtcttggaaagtgtgggcagccacagatgcccccaaatcagagctcacagtgagtgagcccctaagcttcagtctgcgataaagaatgcattggtttc

SEQ ID NO: 3510 - protein, 184 aa, Homo sapiens
MLKKMGEAVARVARKVNETVESGSDTLELHLEGNFLHRLPSEVSALQHLKAIDLSRNQFQDFPEQLTALPALETINLEENEIVDVPVEKLAAMPALRSINLRFNPLNAEVRVIAPPLIKFDMLMSPEGARAPLPYATLLMPTQQGTEATGLEPWKGGRPMGGQAWGLGAGGPSSTWWVGCSWSG

SEQ ID NO: 3511 - DNA, 433 bp, Homo sapiens
cgctggccgctcctggaggcggcggcgggagcgcagggaggcgcgcggcccggggactcgcattccccggttccccctccaccccacgcggcctggaccatggacgccagatggtgggcagtggtggtgctggctgcgttcccctccctaggggcaggtggggagactcccgaagcccctccggagtcatggacccagctatggttcttccgatttgtggtgaatgctgctggctatgccagctttatggtacctggctacctcctggtgcagtacttcaggcggaagaactacctggagaccggtaggggcctctgctttcccctggtgaaagcttgtgtgtttggcaatgagcccaaggcctctgatgaggttcccctggcgccccgaacagaggcggcagagaccaccccgatgtggcaggccctgaagc

SEQ ID NO: 3512 - DNA, 1055 bp, Homo sapiens
gcgatcttatcaagctttttgggaggtataaaacaaaatccccattttttccttggatttagttcctcaggaacagagaactttgcaattgatgatctcaactctgcatcatctggtgactcctgattctgcaggactaagacatttcccaagagttctgctgcatcagccagtgaggacaagagttcttcagtgcggttcagctcaaggacacctaggcttccccagcagggggcttgcttgcaggtctgacaaaccacagagcgttgagcagatggcctgggactcccagacctggcagagggttttattagggcccgcctggcctgcaccgtttcatccaagtaccctgacccagcactcatcttccctggcattctctgttatccaccagctcctctgcacacctcagcgtctacttccacgaacttctaaacatcaaaaggtacaatggccagggtgcggcaggagagtcgggggcagggcagccttcaaatccacactattgaatccacacgatggaaagaagagaacagatggggaagttctccagagatcatgagatgcatccaggcagtgttctcatgtgagaggatagggaggccaaaaactaaaattgctatcagcccccgccgctgtctggtacgcgaggaaactttccgaggactttacaagcatagttgcaaaatgctagtaggtctgggactcttcaactttctcttctagggccacagtagactccggtgtactgcctttctggccgcacctgggtatgggtgacaagagggcccccttccgaccctgcgcaagtgtcagactccagcgtgggcccttgcaccggactgccacaagcctgaagcaaaaaatccgtacttgttgcccacctgaatgccttgctcagcgcaggcctacacctggcttccacatttacggaccactaaaactttattgcaaccttgttgacccaggtctattacacaccaggaatccttcagaagccccattcgcctcacatggacacactcggtaaccagcgggcggcacaacctctccag

SEQ ID NO: 3513 - DNA, 380 bp, Homo sapiens
taagttgttaggatgtttttaattgtgatgatgaaattccagctcaagttaacttaagcaaaagtaaacaagcaaaattccaaaaagggagtttactttcttacataatttcagagaacaaagatgggtgtcttgctagcttcagtcatagctggacccaggtgctcaaatctctctctttctctctcttctttcttcattgtctgatagcttcaggcatacacagtaaaccctcagctcatgatttcagagtaagagagagcctcctcttggaccaacaactctagactgggaaatggggcaccacagttggccagacatgggttgcattcccccaaagccaggggataggttgaccagcagcttcacaggacccacat

SEQ ID NO: 3514 - DNA, 4639 bp, Homo sapiens
ggcacgagcggaggaggacgcgagccccttgcgggcggtcatcacagcccagcctcggggctgccacagcgcgttgcgcctgtgcgccctcggtccccgcgtccactgagcgccgcgctcggggatggggcccggccggccggcccccgcgccctggcctcgtcacctgctgcgctgcgtcctgctcctcgggtgcctgcacctcggccgtcccggcgcccctggggacgccgccctcccggaacccaacatcttcctcatcttcagccatggactgcagggctgcctggaggcccagggcgggcaggtcagagtcaccccggcttgcaataccagcctccctgcccagcgctggaagtgggtctcccgaaaccggctattcaacctgggtaccatgcagtgcctgggcacaggctggccaggcaccaacaccacggcctccctgggcatgtatgagtgtgaccgggaagcactgaatcttcgctggcattgtcgtacactgggtgaccagctgtccttgctcctgggggcccgcaccagcaacatatccaagcctggcacccttgagcgtggtgaccagacccgcagtggccagtggcgcatctacggcagcgaggaggacctatgtgctctgccctaccacgaggtctacaccatccagggaaactcccacggaaagccgtgcaccatccccttcaaatatgacaaccagtggttccacggctgcaccagcacgggccgcgaggatggtcacctgtggtgtgccaccacccaggactacggcaaagacgagcgctggggcttctgccccatcaagagtaacgactgcgagaccttctgggacaaggaccagctgactgacagctgctaccagtttaacttccagtccacgctgtcgtggagggaggcctgggccagctgcgagcagcagggtgcggatctgctgagcatcacggagatccacgagcagacctacatcaacggcctcctcactgggtacagctccaccctgtggatcggcttgaatgacttggacacgagcggaggctggcagtggtcggacaactcgcccctcaagtacctcaactgggagagtgaccagccggacaaccccagtgaggagaactgtggagtgatccgcactgagtcctcgggcggctggcagaaccgtgactgcagcatcgcgctgccctatgtgtgcaagaagaagcccaacgccacggccgagcccacccctccagacaggtgggccaatgtgaaggtggagtgcgagccgagctggcagcccttccagggccactgctaccgcctgcaggccgagaagcgcagctggcaggagtccaagaaggcatgtctacggggcggtggcgacctggtcagcatccacagcatggcggagctggaattcatcaccaagcagatcaagcaagaggtggaggagctgtggatcggcctcaacgatttgaaactgcagatgaattttgagtggtctgacgggagccttgtgagcttcacccactggcacccctttgagcccaacaacttccgggacagtctggaggactgtgtcaccatctggggcccggaaggccgctggaacgacagtccctgtaaccagtccttgccatccatctgcaagaaggcaggccagctgagccagggggccgccgaggaggaccatggctgccggaagggttggacgtggcacagcccatcctgctactggctgggagaagaccaagtgacctacagtgaggcccggcgcctgtgcactgaccatggctctcagctggtcaccatcaccaacaggttcgagcaggccttcgtcagcagcctcatctacaactgggagggcgagtacttctggacggccctgcaggacctcaacagcaccggctccttcttctggctcagtggggatgaagtcatgtacacccactggaaccgggaccagcccgggtacagccgtgggggctgcgtggcgctggccactggcagcgccatggggctgtgggaggtgaagaactgtacctcgttccgggcccgctacatctgccggcagagcctgggcactccagtgacgccggagctgccggggccagatcccacgcccagcctcactggctcctgtccccagggctgggcctcggacaccaaactccggtattgctataaggtgttcagctcagagcggctgcaggacaagaagagctgggtccaggcccagggggcctgccaggagctgggggcccagctgctgagcctggccagctacgaggaggagcactttgtggccaacatgctcaacaagatcttcggtgaatcagaacccgagatccacgagcagcactggttctggatcggcctgaaccgtcgggatcccagagggggtcagagttggcgctggagcgacggcgtagggttctcttaccacaatttcgaccggagccggcacgacgacgacgacatccgaggctgtgcggtgctggacctggcctccctgcagtgggtggccatgcagtgcgacacacagctggactggatctgcaagatccccagaggtacggacgtgcgggagcccgacgacagccctcaaggccgacgggaatggctgcgcttccaggaggccgagtacaagttctttgagcaccactccacgtgggcgcaggcgcagcgcatctgcacgtggttccaggccgagctgacctccgtgcacagccaggcggagctagacttcctgagccacaacttgcagaagttctcccgggcccaggagcagcactggtggatcggcctgcacacctctgagagcgatgggcgcttcagatggacagatggttccattataaacttcatctcctgggcaccaggcaaacctcggcctgtcggcaaggacaagaagtgcgtgtacatgacagccagccgagaggactggggggaccagaggtgcctgacagccttgccctacatctgcaagcgcagcaacgtcaccaaagaaacgcagcccccagacctgccaactacagccctggggggctgcccctctgactggatccagttcctcaacaagtgttttcaggtccagggccaggaaccccagagccgggtgaagtggtcagaggcacagttctcctgtgaacagcaagaggcccagctggtcaccatcacaaaccccttagagcaagcattcatcacagccagcctgcccaatgtgacctttgacctttggattggcctccatgcctcgcagagggacttccagtgggtggagcaggagcctttgatgtatgccaactgggcacctggggagccctctggccctagccctgctcccagtggcaacaaaccgaccagctgtgcggtggtcctgcacagcccctcagcccacttcactggccgctgggacgatcggagctgcacggaggagacccatggcttcatctgccagaagggcacggacccctccctgagcccgtccccagcagcgctgccccccgccccgggcactgagctctcctacctcaacggcaccttccggctgcttcagaagccgctgcgctggcacgatgccctcctgctgtgtgagagccacaatgccagcctggcctacgtgcccgacccctacacccaggccttcctcacgcaggctgcccgagggctgcgcacgccgctctggattgggctggctggcgaggagggctctcggcggtactcctgggtctcagaggagccgctgaactacgtgggctggcaggacggggagccgcagcagccggggggctgtacctacgtagatgtggacggggcctggcgcaccaccagctgtgacaccaagctgcagggggctgtgtgtggggttagcagtgggccccctcctccccgaagaataagctaccatggcagctgtccccagggactggcagactccgcgtggattcccttccgggagcactgctattctttccacatggagctgctgctgggccacaaggaggcgcgacagcgctgccagagagcgggtggggccgtcctgtctatcctggatgagatggagaatgtgtttgtctgggagcacctgcagagctatgagggccagagtcggggcgcctggctgggcatgaacttcaaccccaaaggaggcactctggtctggcaggacaacacagctgtgaactactccaactgggggcccccgggcttgggccccagcatgctgagccacaacagctgctactggattcagagcaacagcgggctatggcgccccggcgcttgcaccaacatcaccatgggtgtcgtctgcaagcttcctcgtgctgagcagagcagcttctccccatcagcgcttccagagaacccagcggccctggtggtggtgctgatggcggtgctgctgctcctggccttgctgaccgcagccctcatcctttaccggaggcgccagagcatcgagcgcggggcctttgagggtgcccgctacagccgcagcagctccagccccaccgaggccactgagaagaacatcctggtgtcagacatggaaatgaatgagcaacaagaatagagccaggcgcgtgggcagggccagggcgggaggagctggggagctggggccctgggtcagtctggccccccacca

SEQ ID NO: 3515 - protein, 1479 aa, Homo sapiens [sequence omitted]

SEQ ID NO: 3516 - DNA, 547 bp, Homo sapiens
ggtgggatgtcaggccaatagttggagaaactagaggcctgacagtcggtgatggaagagatgtctactaagcacggttgtcagatcttttgcggagagatgctggtgtgcgtgtgtctgtcagagtgtaacaggatccagccctctgggaaggggctgaccagaaccaggcagggggtttctgtctaggacaagtagggtccattttcaggggagctgaaatatttgcagggggtgctctgagacccacagccaataaatagggaagcaacatgcttttggtcagggtccatgtggttagggttgattttgatggggctggggggcttagagttagaccccctgccctggtcaggccccactccctggctggtgggggcgggaggcctctgaagctgcagctggaggggccggggcagtgttgcatggtgtgattaacctactaacccagggctcagccgggacgctgtggcgtgtgacgaggtgcctggccttctgccaaccaactaacccactaaccaggcccgagcatgccctactaaccacc

SEQ ID NO: 3517 - DNA, 503 bp, Homo sapiens
tttttttttttttttttacaaagtcagtgtttaataaaataattgttatagaactgtaaattagggctttcatgtctaagtgaaatagtacagatatgatcaaagggaaagatggacaaattagagcacatagactctttctaaattgttacaggattgatactgctagatccaatttttttaaagggaagctacgactctgggtttttaaaatactatgcaagccacacaaaacacttccacaagccacattcaacctaagagctattagattgttatccctacaaacttatctcatcccagcctcctcattttgcaaatgggagatagtagaaatagctagtccttttatccatatccaagaaaccatagagctgaggggatccttagcaattctagctactcccctgggaccccacacccatggccatttttgccctatttgagggaaactcagtttatgcttaacaaagaagagaagtattagtttcttgtaagtggat

SEQ ID NO: 3518 - DNA, 281 bp, Homo sapiens
ccgtatttttcacagggtgacaaattgggccaataaatctgccatctttgaactcatctttggtggctagactgctacggcagcttctctgatgggaaagttccttttttggcttaacactcaccctttcttcacactcacatttaccaatgactctgctccgtttttggagcagactgttttaagttgctcaggagcctgatggaaccatgaaccgagactcttctctgtttcctgccaagacctcatctgcactaatgccttctccctgaccttgacac

SEQ ID NO: 3519 - DNA, 452 bp, Homo sapiens
ttttttttaaaattataatcaatcataagtcattttatgtgttattaagttatattatcaacaggttattgtcatcaacagattaaaacaaaatgtctcaaaaagacaaaggcaaacacatactattgagagtaaacaatgaccgtcccaggctttccaaagcatatatatcacttacactcatggacttttttttcattttaaaagggcattttgcatgtgttttataactatgaaagtaatacatgctcattgcagcaaacttagaaaatgcagaaatgcacaaatatctgtcttctgtacaacactaactgctagctaccctacacagctgttgtttctcgctttcaaaacattctagtgcttttttataacgtgtgaagcgttcccccaattaagtggtctattaactggaagttcacaggcttctgctctcattcagtagcagaatt

SEQ ID NO: 3520 - DNA, 430 bp, Homo sapiens
  misc_feature (22)..(22): n is a, c, g, or t
tttttttttttttttttagagnttaaactgtcagctttattattgataaaccaattggagaaaatgacattagatctgtgaaccaaagagcctattaatactctgtgactgccaactctctcctgtatccaaatacacatccaaagcctccctctgcacccaaaggaaagtttggagctgtctctagggaggaaaatgggaagtttacagtcctttgatagagttgttctaccccgttagcaccccatcaccacctagcaattaggtaattaatttctctgctggaaggagtgtgtgaggagtgagactacaggccaagagttgtatttcaatggaggtccttcaacacaaaaacatgagaccagggaaaggactttccctcccaacagtgctcaattctttttttttttttttttcctcgtgccgaatt

SEQ ID NO: 3521 - DNA, 371 bp, Homo sapiens
tttttttttttttttttcaatgaattaaagcagtttatttaacattaattgcagaatgcagaatttacagcactaccatttaatgataggaataaaaatagaaagaatccagtgtaagcgatgttgcagacaaaacattggggtgggaaatgagcaaaactgaaaatgcaattaacattcaaagaaatcttccaaaaggactgggagcttatcaggggatgggcatccccttgatgatgaagcgtgatcctcatccccaccaggatttcagggcagccactgaacatataccctgttgaccgtccctggaaagtctttcagcacagtctgacttaacatgtttgagatggggcaatatctgcctcgtgccg

SEQ ID NO: 3522 - DNA, 566 bp, Homo sapiens
tttttttttttttttttcaattgattttattttcattttttattgaaagcttcatcaaagaaaacagaagtttaaacctaacatccactgatctacagaaagcccaagggatgggggagatggttgctaatttgactgtggtacagatgaagaaattaaaaataaaaccagaaacaccttagaattacagaactttccatgacagtcagagacagcagtacaaaaatgctcttaaataaagttcaaaattgaatgatgtttcagaagttccatgaagttgaatatggactgaaacaagggttttaaaagaagctgtgtccctttttttttttatagagactgaatatctcatagcagatactactacatatatttttttaaattaagattccatttttcttcttcttcttttgaaataaatggaagcatttgtgtccagaatagagaaaactttttcaaatatctttttgaaataatttttacagttcctgaaaagcatggaataacttatttttttatatatgaagagataacatatttgagggaggaggaaaaaacatctttct

SEQ ID NO: 3523 - DNA, 566 bp, Homo sapiens
gtttgttttttaaatttttattaagaatatttagtaacagacaagcacaaatctcagatggaaataacaagattaaacttagggatacattatcaagaaaataatagtagaaattaagtaatctcagctctaagattacttagatccataagcaatcccagactatacttagaggtttcagtaagtaatatggctctgcaatgaacaatattttgagaagagaatcagcccaacaacgtggaactgttctgacactcacaggttggccataatcttctcctattgaatgcaaataatttcatataacaccaagaccagaaaataaccttataacccggttggagccagacttcatgcctgaggagacaatgtctaaaaaaaaaaaaagaaaaagacaaaagagctctttttccttgctagtatgagtgaatgctgcttatttaccaattatagatttaatttcagtgtttttcccacttcttaaatgaaattcattaaaataatatagaattacccaattatctgaaagcatccaatccagagctaacctctacttcttgaacctc

SEQ ID NO: 3524 - DNA, 293 bp, Homo sapiens
  misc_feature (246)..(246): n is a, c, g, or t
tgccgaaggcttcggcctttcacattcgggaagcgtcgggattaggtgaaagtacgtagttgtctttcgtaagttaaaatgataattgggccgaaacttactgccttacctaaaaggcagcgcagtcaggatattggtaggtcgggggcggctttggaaacccttaagtttacaagcatgcgcggacttgagtgctcattaggtcgccgggcgtccacgtgcagccctggaccctgaaccccggcntgcgtgggccgtgggcctcggggaaaggttccgtgcactcggggact

SEQ ID NO: 3525 - DNA, 415 bp, Homo sapiens
ctgaaatgggaggaaagtgactgtgaggaaggtgtgtgtccaccgagcacttggattcagcttcttcatttccaacatggaagaaacttacaccgactccctggaccctgagaagctattgcaatgcccctatgacaaaaaccatcaaatcagggcttgcaggtttccttatcatcttatcaagtgcagaaagaatcatcctgatgttgcaagcaaattggctacttgtcccttcaatgctcgccaccaggttcctcgagctgaaattagtcatcatatctcaagctgtgatgacagaagttgtattgagcaagatgttgtcaaccaaaccaggagccttagacaagagactctggctgagagcacttggcagtgcctccttgcgatgaagactgggataaagatttgtgggagc

SEQ ID NO: 3526 - DNA, 6218 bp, Homo sapiens
agcttcgtcgagaacggaggacaccggcggtccagggtcctgggcagtcgcgccagagctgagcggagggcgcggcgcgagaacgaatctttgtgacattctctctcagcattctttatcccctgtttgctgaagacttcgaccaaagctggtcttagctgttggcattctcctgagaaaaggatagcttcagaaatcagaaaaacatttgggaggtgtctagcccagtggaccttctgaagagcaatgctaagaagacgtttggtttaaagaattaaaaggaagaacaacttaagagcttcttcaaagtttcccgcatgaaaattacttaaacttgcacacaacgtttcacaaaatcttttgtgaaagaagaaaaggaaattcagtgtgtgagtctcagcaggagttaagctaatgcagcttaaaataatgccgaaaaagaagcgcttatctgcgggcagagtgcccctgattctcttcctgtgccagatgattagtgcactggaagtacctcttgatccaaaacttcttgaagacttggtacagcctccaaccatcacccaacagtctccaaaagattacattattgaccctcgggagaatattgtaatccagtgtgaagccaaagggaaaccgcccccaagcttttcctggacccgtaatgggactcattttgacatcgataaagaccctctggtcaccatgaagcctggcacaggaacgctcataattaacatcatgagcgaagggaaagctgagacctatgaaggagtctatcagtgtacagcaaggaacgaacgcggagctgcagtttctaataacattgttgtccgcccatccagatcaccattgtggaccaaagaaaaacttgaaccaatcacacttcaaagtggtcagtctttagtacttccctgcagacccccaattggattaccaccacctataatattttggatggataattcctttcaaagacttccacaaagtgagagagtttctcaaggtttgaatggggacctttatttttccaatgtcctcccagaggacacccgcgaagactatatctgttatgctagatttaatcatactcaaaccatacagcagaagcaacctatttctgtgaaggtgatttcagctaaatcaagtagagagaggccaccaacatttttaactccagaaggcaatgcaagtaacaaagaggaattaagaggaaatgtgctttcactggagtgcattgcagaaggactgcctaccccaattatttactgggcaaaggaagatggaatgctacccaaaaacaggacagtttataagaactttgagaaaaccttgcagatcattcatgtttcagaagcagactctggaaattaccaatgtatagcaaaaaatgcattaggagccatccaccataccatttctgttagagttaaagcggctccatactggatcacagcccctcaaaatcttgtgctgtccccaggagaggatgggaccttgatctgcagagctaatggcaaccccaaacccagaattagctggttaacaaatggagtcccaatagaaattgcccctgatgaccccagcagaaaaatagatggcgataccattattttttcaaatgttcaagaaagatcaagtgcagtctatcagtgcaatgcctctaatgaatatggatatttactggcaaacgcatttgtaaatgtgctggctgagccaccacgaatcctcacacctgcaaacacactctaccaggtcattgcaaacaggcctgctttactagactgtgccttctttgggtctcctctcccaaccatcgagtggtttaaaggagctaaaggaagtgctcttcatgaagatatttatgttttacatgaaaatggaactttggaaattcctgtggcccaaaaggacagtacaggaacttatacgtgtgttgcaaggaataaattagggatggcaaagaatgaagttcacttagaaatcaaagatgctacatggatcgttaaacagcccgaatatgcagttgtgcaaagagggagcatggtgtcctttgaatgcaaagtgaaacatgatcacaccttatccctcactgtcctgtggctgaaggacaacagggaactgcccagtgatgaaaggttcactgttgacaaggatcatctagtggtagctgatgtcagtgacgatgacagcgggacctacacgtgtgtggccaacaccactctggacagcgtctccgccagcgctgtgcttagcgttgttgctcctactccaactccagctcccgtttacgatgtcccaaatcctccctttgacttagaactgacagatcaacttgacaaaagtgttcagctgtcatggaccccaggcgatgacaacaatagccccattacaaaattcatcatcgaatatgaagatgcaatgcacaagccagggctgtggcaccaccaaactgaagtttctggaacacagaccacagcccagctgaacctgtctccttacgtgaactactccttccgcgtgatggcagtgaacagcattgggaagagcttgcccagcgaggcgtctgagcagtatttgacgaaagcctcagaaccagataaaaaccccacagctgtggaaggactgggatcagagcctgataatttggtgattacgtggaagcccttgaatggtttcgaatctaatgggccaggccttcagtacaaagttagctggcgccagaaagatggtgatgatgaatggacatctgtggttgtggcaaatgtatccaaatatattgtctcaggcacgccaacctttgttccatacctgatcaaagttcaggccctgaatgacatggggtttgcccccgagccagctgtagtcatgggacattctggagaagacctcccaatggtggctcctgggaacgtgcgtgtgaatgtggtgaacagtaccttagccgaggtgcactgggacccagtacctctgaaaagcatccgaggacacctacaaggctatcggatttactattggaagacccagagttcatctaaaagaaacagacgtcacattgagaaaaagatcctcaccttccaaggcagcaagactcatggcatgttgccggggctagagccctttagccactacacactgaatgtccgagtggtcaatgggaaaggggagggcccagccagccctgacagagtctttaatactccagaaggagtccccagtgctccctcgtctttgaagattgtgaatccaacactggactctctcactttggaatgggatccaccgagccacccgaatggcattttgacagagtacaccttaaagtatcagccaattaacagcacacatgaattaggccctctggtagatttgaaaattcctgccaacaagacacggtggactttaaaaaatttaaatttcagcactcgatataagttttatttctatgcacaaacatcagcaggatcaggaagtcaaattacagaggaagcagtaacaactgtggatgaagcgatggcaagccggcaggtggatattgcaactcagggctggttcattggtctgatgtgtgctgttgctctccttatcttaattttgctgattgtttgcttcatcagaagaaacaagggtggtaaatatccagttaaagaaaaggaagatgcccatgctgaccctgaaatccagcctatgaaggaagatgatgggacatttggagaatacagtgatgcagaagaccacaagcctttgaaaaaaggaagtcgaactccttcagacaggactgtgaaaaaagaagatagtgacgacagcctagttgactatggagaaggggttaatggccagttcaatgaggatggctcctttattggacaatacagtggtaagaaagagaaagagccggctgaaggaaacgaaagctcagaggcaccttctcctgtcaacgccatgaattcctttgtttaatttttaagctctttgccaatattccatttctctagaatgtttatcctaagcacttgtttgtcagccctctcatactatgaacatatgggtagagagtatattttctgctgtatgttagtattatgagaatagttacagcaaaaacataactcagtcaaatgatatgttaatatgaactggaatgcaaagtgcatactttttcattcaaaatgggtattcttgatttcctcagaactgataaaaaataatgcaacatcaccaacagatcctgttatttcctctgcaggatacagttcaatatgatgcatgaaaaatgctccacatttaaaggacatacccgtgtatgttatgaaaacatggtttgatactttgtttatactaccctcagctgaacccctatatatgaattccgttttcattgtcaagagtgttactgtagtattctctagaacttcaatgtctttgtggacattgttgtgaaattggtgactatgtatagctgtcgttagtctttttgggagactgttaggaacagtttgtacagtatatacttgctaaatgagttcattatgacagtcacattgctgatgcttactgagaactattacctactcttggctcctgttactccgtaggcttcttaatcttccaggcattacagcagcacagtgttctactttttacatcatttctatgttcggttgtttttaggcataaacaatgtgtattgcagtgcatttcggcatttgtgccatactgaaagaatcaaaaacaaatcatccaaattaaatttcaaacattatttcagagaacacagggcaagacacatacagtgccttcagatattaagcattccacaacatcgtgcattctgtatcagctggtccagtccattctgggtcctagattactgtcattgtctaaaagtaacttttaaaaagcagagttcatgaaaactgcaatgctgggaaaagaaggaaacatgaaaataaaaataagacagtttattagaaatagcatttcctcataagcataaaaagaaaatctttgttgccaactgaagcacatgatgattttgtggtcctttatggtttctattacatgcagtaagaaagatgtcaacatgctagaaaattaattttaaaactaagttattccaacactaaaagcatacaacagcatgccaacagtaatatattattctccaagactttacctatgtaagtgttcaaaactctgcagcattaaacaacgtgtatgcaaattgttatggatacatttcagaatctaagaaatcaggcaagtgcttaaaaggccaacggtccaagggattacatctgcagtttaaaaagtaaatatatattctatcgtattcataaacaatatctatcaaatgggttacctccaaatatgaaaatctataacaacctatggttgaaggaatgctcagtttcatttgccaataaattggtttctcataacttgcatcaagtttaattttaagtaaagctttttatatgtagatattttgttgaatttgtaaatacacttaaaatgtagatgctatatgcttataggtgttacatacaaataaacatgcaatgtttatgttgtactgtataagaggtaagctaattaatgcagtgaatgggattggaaagcatctacttaaatatctattgggttcccccctccccccaccttttttgctgtgaaactgaaatagtgaacttttctacgtattgacagcagatttttcgatgaaatcttcagagctttgcctatggggcacagtaggcctagtaacctggcatgtttgatatatgtaggtaaagcataatttaaagtaatcccaggtaaagatggccctaaatactttcatgtctctatattcatttttcacagatccacctgtctcttgaaaatataaaaagacaaaacaggtttgccttggcatcagagagcacaaagattaaaagttactttaaatttgccaatattttgggagaacaataaaactacattttttcctcttccatactggtagatgcgaaatttatctgtgcatgaaagggtcacttctgtaatagtgcaacagatttggtattaaaaattaaatgtggttttaaaagttcctctctcttttgtaatttatgttcccaattgagtgtgaatgtccaagtaatggtgtatgtaatggtacaggcaaatgtgactggatttccctcaaaaaagtaactattaaacagtcttgatctctt

SEQ ID NO: 3527 - protein, 1180 aa, Homo sapiens
MQLKIMPKKKRLSAGRVPLILFLCQMISALEVPLDPKLLEDLVQPPTITQQSPKDYIIDPRENIVIQCEAKGKPPPSFSWTRNGTHFDIDKDPLVTMKPGTGTLIINIMSEGKAETYEGVYQCTARNERGAAVSNNIVVRPSRSPLWTKEKLEPITLQSGQSLVLPCRPPIGLPPPIIFWMDNSFQRLPQSERVSQGLNGDLYFSNVLPEDTREDYICYARFNHTQTIQQKQPISVKVISAKSSRERPPTFLTPEGNASNKEELRGNVLSLECIAEGLPTPIIYWAKEDGMLPKNRTVYKNFEKTLQIIHVSEADSGNYQCIAKNALGAIHHTISVRVKAAPYWITAPQNLVLSPGEDGTLICRANGNPKPRISWLTNGVPIEIAPDDPSRKIDGDTIIFSNVQERSSAVYQCNASNEYGYLLANAFVNVLAEPPRILTPANTLYQVIANRPALLDCAFFGSPLPTIEWFKGAKGSALHEDIYVLHENGTLEIPVAQKDSTGTYTCVARNKLGMAKNEVHLEIKDATWIVKQPEYAVVQRGSMVSFECKVKHDHTLSLTVLWLKDNRELPSDERFTVDKDHLVVADVSDDDSGTYTCVANTTLDSVSASAVLSVVAPTPTPAPVYDVPNPPFDLELTDQLDKSVQLSWTPGDDNNSPITKFIIEYEDAMHKPGLWHHQTEVSGTQTTAQLNLSPYVNYSFRVMAVNSIGKSLPSEASEQYLTKASEPDKNPTAVEGLGSEPDNLVITWKPLNGFESNGPGLQYKVSWRQKDGDDEWTSVVVANVSKYIVSGTPTFVPYLIKVQALNDMGFAPEPAVVMGHSGEDLPMVAPGNVRVNVVNSTLAEVHWDPVPLKSIRGHLQGYRIYYWKTQSSSKRNRRHIEKKILTFQGSKTHGMLPGLEPFSHYTLNVRVVNGKGEGPASPDRVFNTPEGVPSAPSSLKIVNPTLDSLTLEWDPPSHPNGILTEYTLKYQPINSTHELGPLVDLKIPANKTRWTLKNLNFSTRYKFYFYAQTSAGSGSQITEEAVTTVDEAMASRQVDIATQGWFIGLMCAVALLILILLIVCFIRRNKGGKYPVKEKEDAHADPEIQPMKEDDGTFGEYSDAEDHKPLKKGSRTPSDRTVKKEDSDDSLVDYGEGVNGQFNEDGSFIGQYSGKKEKEPAEGNESSEAPSPVNAMNSFV

SEQ ID NO: 3528 - DNA, 399 bp, Homo sapiens
tttttttttttccttcatggcaagtacttgcagcactgtttattcaaatatataataacaagcaccagaaaacaacatgcaacattctccccccacccctgatctgcaatcccagaagtaggaggctcatgactatgatagtgaaggaaactcatgtccaggaaaggtcctaggtgggcaccctggtgctgggttagagtctagtgggacaaagggcaagtaccctgcccattagcctcctacagcagctggagaaaccagacaccttcttctacctcaggccccactttgcaaagcagtgatgccagccctggttggagagaacatgagtcctatgaggcacttggccctgcccagccctctggaggtaatgaggtgaagtagcctttcctcttaggg

SEQ ID NO: 3529 - DNA, 524 bp, Homo sapiens
gtccgtgcgcaccgcccggcgtccaggtgagtctcccatctgcagagacgcggacgcgccggcccgcagttggcctgcggagcgcggtggacggtttggcgcccaccaggcgatcaatactttggatttttaatttctagatttggcaattcttcgctgaagtcatcatgagctttttccaactcctgatgaaaaggaaggaactcattcccttggtggtgttcatgactgtggcggcgggtggagcctcatctttcgctgtgtattctctttggaaaaccgatgtgatccttgatcgaaaaaaaaatccagaaccttgggaaactgtggaccctactgtacctcaaaagcttataacaatcaaccaacaatggaaacccattgaagagttgcaaaatgtccaaagggtgaccaaatgacgagccctcgcctctttcttctgaagagtactctataaatctagtggaaacatttctgcacaaactagattctggacaccagtggggcggaatgcttttgccccg

SEQ ID NO: 3530 - DNA, 464 bp, Homo sapiens
  misc_feature (371)..(371): n is a, c, g, or t
  misc_feature (388)..(388): n is a, c, g, or t
  misc_feature (449)..(449): n is a, c, g, or t
  misc_feature (455)..(455): n is a, c, g, or t
acatggtggagaaggggatgtgcaagcacatatggagggcaaatctcacaagtaagatgggacaggtgaatgcttctaaaccaatcaaaaatacctttgtttccccaaaagacaccaatgctcagtcaaaaatagcagctgctgaattagcatgggcataccaggcaaataagcctgcattgtcatagcgttcccttgattgctctatgaaactgagtaaagtttcatttcctgattcaagaattgcagctaaaataccctctggacaaagaagaagggaaattttttgataacagatgtgttggctccttacagtataaagccaatttctgtcatatctcaccaacaatcctggtttctacagtacatcnattttaagtaatatgcnaaatcatggcagcaaaaatatgttccctctagctgttaggtactttgacttgaaaacaggngtttcnatcatcttc

SEQ ID NO: 3531 - DNA, 253 bp, Homo sapiens
  misc_feature (49)..(49): n is a, c, g, or t
  misc_feature (197)..(197): n is a, c, g, or t
tttttttttttttttttttttttttttgaagagggctttagaggatttntttggacagggctgtgctgagagtcccaccctcaccccacaatgggcgggggcactggcatcgaacaccaagctgagtgagaagggctcctccaggcctcgcagggagcttgctggcttctcctggctcacagcagactgggcccgantcccatcggagggaaggccagcatcctagggcagccagtggagggctggcagaggg

SEQ ID NO: 3532 - DNA, 433 bp, Homo sapiens
  misc_feature (6)..(6): n is a, c, g, or t
  misc_feature (362)..(362): n is a, c, g, or t
  misc_feature (385)..(385): n is a, c, g, or t
  misc_feature (397)..(397): n is a, c, g, or t
  misc_feature (402)..(402): n is a, c, g, or t
  misc_feature (412)..(412): n is a, c, g, or t
  misc_feature (417)..(417): n is a, c, g, or t
tgcatngaaacgatccatactgggctggaacttgacatgtgaaatctttaatactaaagcttatctctgcttggcagctttttaggagaataatgagagttacaattttgactcttgcgttcctagaattcaaatggcatagctttctgaaatgagtatttcaagtttagtagtccgtataggagtgttgtgacttcaatttcagtgttcttgttaaaagaaataatatgatatatatatacacacatatatataacttgatgccagttttctagtaagcctcagtcttttattcactacttcaatggataatgcattgtacaaacactgtcacatggggtaaattaaaatggattattccntaggaggtgggagggtgtttaantatatttgtggnggggnggcttgggcntttcntttggggtattaggcc

SEQ ID NO: 3533 - DNA, 465 bp, Homo sapiens
tttttttttttttttttgcttggggctcttttatatatatttaaaacacacagtaagaacataagaacatctcaaatcatttagaaggtaaaagggggttatcaaccaaaatctttggaaatttcataaaatttaaatatctgcaaacagtccaaccaaaaacgaaaaaaaaaaaaatcccaacatttggctatggagggcacttcacatgtgaaccaaatggcgttataacattttccttcaactagtcactaaacccaattagaaagaatacaagagcaatattggagacatccccaaataccacgtacttgattagaacattctgttatgaagcgctcagctaccgcgggctttcctttacattgcatacattactttacattcctacagtgcaatgttgaaatagcctccaaatcttgcaaagtagattgatgtccattctacaaaaatattaacttacag

SEQ ID NO: 3534 - DNA, 283 bp, Homo sapiens
  misc_feature (262)..(262): n is a, c, g, or t
tttttttttttactcagtctgtggtcttttattatggcagcctaagcacacagatgtactatttgagtgcatagagtatgttttacctcatctcaccttcacaacagccctatgggtggggctcaactcttatcctcattttccagatgaggaaagcaaggctcagaggagggaagagacttgcctgagatcatgaaggtggtaagcagtgggaactggggcttcggcggctgggaggtcttggcctcttgggagggggttngggaccaggggaacagaaggt

SEQ ID NO: 3535 - DNA, 511 bp, Homo sapiens
  misc_feature (360)..(360): n is a, c, g, or t
  misc_feature (501)..(501): n is a, c, g, or t
caaagaccataccctccctccccctaatatctgcaaaagaacagggacgccaaagcatgcacacttaaacacaccttgagagctgcttccgcccctagaacggaatccacaaaagcagtttgcatctcctgtgtctgctttcatgaaattggttgaaatctaaatctgaacaaatctgcttgttttgtgaaaatccatatactatttgtaaatttgtgggttgtctgcccttcccaaagctcatacgttaatgaaacaatgatcaggacctactcttcttaggacttttcagctgatttttgtggtttcacaacagtgaggacagcatgagacacatcactgtggggatgttgatggatnaaatgccaattattttacagtagggaagggttcaaatgctatgtttacaggacagggtttggaaacagggagcccttactatcttttattttcatttcctttgagtacttactgtgtgcaagggtatttttttttttttcncaaataaccc

SEQ ID NO: 3536 - DNA, 324 bp, Homo sapiens
  misc_feature (46)..(46): n is a, c, g, or t
tttttttttttttttttcatgggtaattgtttttattgcattgtanagaatgccattgtccacagattacatgcagctaggtttaccgtacaaggccctggcagcctccacggagggctgggaggggcagattacaaaacacatcagtgctacttttttaaacagtatctggtggggagactctgagaccaagctgagctccccagcccctctcgaggtaccatgggggacagggaattcaccccaggccctacacaagcgtccagaggattagggctgtggtggagcaggcctgcagagtggatgaaggtgagcctcgtgccg

SEQ ID NO: 3537 - DNA, 414 bp, Homo sapiens
acaggctgaggtttggtgtgtgatctgtcctattggcctcacaatgcattatcttgtctgcacagccaccactgtccaccttcaccacgcttctgtcatggtctcaatcccagcctgaagcaggagtaaggctggactccaaatggccattcccctcacccagcccaagacgtgggaggcttgcttcccagtaagaatccaggagcaagcttttggtgaatccagtggggctgagtggctctattggattgtgtgtatgttttggatgttggtagtggagtgcttagcagaatgtgtgtgtatctcttgaggctgtcagggggtgggtgggtgtgtgtctctgttggacctgtctctcctcagtctattcctgtcatagatgtgggtgtccctggtagggaagtgcctgtgtgg

SEQ ID NO: 3538 - DNA, 468 bp, Homo sapiens
ttttgggactctatcatcattttttcttccaaacaatacaagaaataaatagaacacttgtcttaaatgcaaatgtaactgaaacgcaaatttaacaaaaacatatgattgtctggtaaacggcagcagggacagcaggattcatgggggggacgggggtatttggcacataaaaaatcgccccactcccacacgacacacaaccttatcacacggttttggtccttcaccagatacttatattaacattatttcttcacaataagaatgtctaatgccaaaaatactgttaaggaggaaataaaataagaaaagaaatgaattagaaaaaattacaagttatatacagattaaggtaaattccatcagggaaaaaaattattatttgaaattggcccctatgggaataatttaaagcccatccgagtggggaagaagttgcgtcccaagagagggaggcggctgggc

SEQ ID NO: 3539 - DNA, 325 bp, Homo sapiens
cttccctggtgccgggagcagtcgccgctgccgcctccgcccgcggccgggacccccgtcctcgcccgggactccttacccggggaacctagaccaggtctccagaggcttgtggaagagaagcaggcgacccttcctgagttatcctggcttagcctcccaatctggctccccttccccttcccattcccctggtccccctgtcccttccccatccacccaactgaactgggtataggtcaaagctcctctccttccttttccttcctaggcactcattggctaggacctgtttgctcttttttttgtgcccagagatactgga

SEQ ID NO: 3540 - DNA, 500 bp, Homo sapiens
ttttttttttttccgaaaatactttaatgcgaggtcctcgtgtgggtcgtgttttggagagataactggccttggactggagggtggctgccttcttcctttgccaggtcatgcgaggggctgctggccaccccatgcacatgcccctgcccctccatgtcaaatgcgtgcccctcggggctggccgtgtccgatgcaggccccttccggctgttgatcttgatggcggcgcgcagcgccgacttgaccgccgtctccacccagccgtgcgggtaggcggtgtgctcgccggcaaagtaaatgcggccataagggaccgtccagtcatccttttcggtttgccagagcgccggcggctgtaccacgaagccaccctggctgtgctggtcctccgcccaacgcttgacgacgcctgtgccctgccagagctggcgcacgacagcccgtgcaattcccgcacgttgtcgaacgcccaacgccaacgcctttttccggttaag

SEQ ID NO: 3541 - DNA, 643 bp, Homo sapiens
cgttatcgccaaccctaatgaaatgctttctcctaagagcaagctgctggtgacagcttcaacatctgagaactgaatatatgtgtatttaggtatctaaggcaaacctatatatggatctagatatatcacatgtgatgtatatctaaatgcatatatatgtggtatacacatacgtgcacaagggaggctcatacacatgtatattatgaaggtactttgcagttgtgtttttattgtagagacttaatttatttaaagaaagagttgtctgtagtcctgtcctgtcctggagacatgaggggctgtctggtgtgaaggaaagtaggagggacagaaaacaccgtatcgattcagttccatcatccgctgcagtgacttcggaaaacagaatccagcatcccggtcctcccagcctcaggatgaactggtgaagagttgttctttgtgctgtggccagcgtgaccagggtgggctcctggcaatggccacgagaggtcaggagggggagctggcttagtggaaggtgtcggggataaatagtatttatcgcccaacaactattccaaatgttcatcgggtgagagggcgtaggaattatatccttcttgctcatcagttgatgatacgcccgagcagatgc

SEQ ID NO: 3542 - DNA, 404 bp, Homo sapiens
tttttttttttttttttttttttctcctagctccatttaattggaaatgatggggcaggtccttttgagcagggcaagtacagagcggcactgccagcaaactacacgcggtaaaaagccgaccttggtgagcgtgttggtgctcgacagtgagcagagaaaggatggacgattacggagcgccctcgtctccagttaccgttttctggaaacaccatccgccggggcggagctgttccgccccggtgcggtactacaactcccagcatgcacctcgcagtcggccctcggtggaagcgggaacccaggaggacctgggggtgtggcagcgaggaagggccgagccacggactgtggggccgaaactcgctcccgcccaccctttctcgaggctgtggcctccg

SEQ ID NO: 3543 - DNA, 410 bp, Homo sapiens
ttttttttccaaaaacggagaaagctttacactatgaaactagttacaaactctttttttccagcagtaaaggtggtgtacaagtcctctaaccttatcttaagaggtaaccaggaagttgaacctggccaactgggaaatgctgagatcaagatataatggagtgaccaactacgaaaggaacaagactcaagaactaaggactgggcagaaaatcactccagcatactggataagttcaacaacaacaacaacaaaaacagattaaatcctcatggcctcagtgcagtgtagaatgaaggtattctgatgcaggaacagaatttggtaatagagaagcctggatcaggtggtactgaggaatatagactagcacacacttgtgagtatccaaggatatgtcagctaga

SEQ ID NO: 3544 - DNA, 484 bp, Homo sapiens
tttaagaataaagtgaagaaacaattatgatcatggggagaaagaatgtgagagcagaaaggctcaagtttatacatgcatcgaaataagagggaagaaaacaaaaggacaatgcaccatggaaagaaggaaagcaaaataatggaaagggagaaaaaaggagcatctcttcctaggaaagtaatctacaatgctgtgttaatctgccaacgctttggtgggactggcaatcagaaattgtctttcctcactgacaaacatgaccagactctggcccctgatttgtaatttttttcccaaatgtaaaatgagacaaaataactaaaactactttaacttgtttattttgataaaataattatatataattattgttgaaggaaatctacaatacacaatcttgggtgtttttatttaaatctatcacacattgaataacaaaattaaaatgtcagtctttcaactggagaaagtactcaaatca

SEQ ID NO: 3545 - DNA, 505 bp, Homo sapiens
cggccgcaagtgctgggggaggctgcttggagcatgggaggcctgcgggtggaagacaccagggtgcagcctggtgcatggtccggggcttggcctccctatggggcgtggggggctgtggtacatgcagaggcggcggctgtcccagcagcctggccaggagataccgtggagaaggcacgtgtttgagttggcatcactgtccccagacgccctccctcgggtagagccgcctgtcctaggagaagctgtactccagatgcagtgggtgacaccctggtcactcagccacaccccggcccctcagcctctgctgtcctggccgcacatagagccctgtcctgctgtgtctgccgggcacaccccggtcactcagccacactggctcggcccagcgccttcccgaggtctgtgggggtccgggcggaggtggggtcagtgccgtgcgtgtttgatccagtttctgatcatccacttctgccccgagcacctctgtaccaccagc

SEQ ID NO: 3546 - DNA, 386 bp, Homo sapiens
tttttttttttttttttggcgcaatcaagaactttaattggaggcagctcttcccatggtggctttttatgagctggagtgactcttgcttggtggcacaaggatggctcagatgtcttctcctccttcaggggagtttccgaattaatcttcatgactcctgtccaccgccctcttcctcatggagatgccccagcagctgtgcagccgccggctagaatgctcagggcctcccagtgaggcatggctggaatggccagcgctcctggcagtagcggtttaagtttctcttgtaaaaatttctttgggaagcatatgcattcagatcctcaaactcactgctgctggaggaagtgctcttttttgtctggatcaggggtgttctc

SEQ ID NO: 3547 - DNA, 621 bp, Homo sapiens
acctttgcctttgaaaaaggtttgatgcaggaattcacaggtgactgaccagtctttgacaagaatgggatctgctcacttctggtctttttggccgggaactcctgattggtgttaaggtggtaatttcccccatataagatttagaatcactgagtttgagctagatgaaatttttaaaatttctggttgtctcattagactgatgaggtgagttttcttcttcatatgaacagctagttaataacagcagagttctcactcagtgctcagtacttaattttccactgcaccacaactgtcttaactaaatgtgctgtatttttctttaaaagttaagagttctatttggtgttttcaggaatatacgtgaaaagacatgccatgttttggtaaataccatcagagttgtgtaaaggcgtgtactaagtgcaatcttaatttgtggaaataatcttcatttacccctcctaaaactacactcagtataaacactttcccataaggtgtgtgcagtaaaaatgttatattactccaacactggcaggagcacagcacagcagccttattggagagagccttataaaagtgattaaatggaggcattgagctcattacctt

SEQ ID NO: 3548 - DNA, 476 bp, Homo sapiens
atgtgaacatatatttacagtaaatattcaataatactttttacagcttacttaaatagaaacatgctttttctaatccataaataacactaatcattatccattcaactgcatttattaagtacttatgtctcatgcactgtgccagggatgcaaagatgaatatgatatggtccttgctgtagaagtgcccacaaccaagctaaagaagaaaacacgtaacattttctttcttacataatgaggccggttttatacaaatggtactgatctgctctttcctagtaaagtggttcccaaatcctgatcctatgggtcaacagatcaaaatgtttaacagttgaaataaaatgagatttgggtttcgtttttttactcagaaaaataaattaatgaataagatttcctctattaaagttttttcttggtttttaaaaaagtgacttgcacatatacaaccttttcattagtaaaat

SEQ ID NO: 3549 - DNA, 596 bp, Homo sapiens
tttttttttttttttttgaatgttattaaatttataaatttatttaactttccagatcttcttggaataaatgtcaggtagtagaatttgtacaaaccttggtaatgtcttaggtttagatacgaacttaacaggtatatttaattttctgtattccacaatggagctagaagcaggactcatgaaaatagtaactatatgttttgcatgtatccttcaaagtgaaatccttaacaaatttaacagtatatattaggctgctgatgaaacagctaaacctgtctgccaggtggcttcgaaaatggaattaatttttacatggcattgataagttactattttaatacaaccaggtggtaattgatacccaataatgtttgaggtttgctttaaataaaaaaaaactaacaaaacaaacaaaaaaaaacagtgtaatatagtactgtgggatccacaataacattttctttagtttcccttaatatcaagttgtcattaggaaagattccacaagttatttaaaccagaaatgaagtaacatgtttcatatctatttcaagggataatttttcatgacccagtataatgcaactagc

SEQ ID NO: 3550 - DNA, 378 bp, Homo sapiens
tttttttttttttttttttttttactgtgaaattctaaaatcatatttattcaccaattcacagaaagtgtcataacgaccaccaacatgaatcagtttgtaggcatttacaagccacagctgaaaataaaaatctgtctgtgttgaataggcatttaacaaattacttgaaaactgcaagaatcataattattataaatttaaagtttgtgattcaaacatgggtaagtatcacagtcatggggagaagcccaacaggattcctgtgatgatccttattttcttcctatatctttatatacataggggactctcagcgcccctcactctgtggtcagtctggaattggggatatggacaggcttcggttaggggcct

SEQ ID NO: 3551 - DNA, 565 bp, Homo sapiens
tttttttttttcacatcatataatatttattaataagtaaaatgattttcccctgcctttggttattaaaaaatgagtatcattgatgataccaattgccaacactggttttacattattcagtcatgaaacagaatagaaagatgatcgatagatatctatagacataaatgtgtagaagaccataccatacagcgatttgtttaattacaaaatactggttgtgctagcagttggaaatgtacttgcacatccttaaagttatctttttttatataagtaaagaacacacaaataaattcacttgaatttgataatttggaacattggcaatgaatacagtgcctgttgaggcctgaaagagagaggaaatcaagaacagtgtgggagaagaaaggcaatccttcgttgaaaagcttttctcttaacaatccttagtgcctgaaaaataagccattttgataacaagagtataaaaagccttatgatctgcaaagtaaatcgtatctggtttaaatttcatcccaagtctcaggttatggctgaggagctatactaagtatct

SEQ ID NO: 3552 - DNA, 303 bp, Homo sapiens
taaagatgtaaaaatcctttaataaaaagtcagttttgttttgtttttttttttaaaaaagcatgccttcattccaaatccccagattccggctctcaggaatgtttcagggtaaaacttggggcaaagcaaggccgttatgatgggggtggatctaagaagccagcagcagggaggcgtggggtctgtgctctagcgttaaagggagggttctagactaacgagggcgggtcggcccgactaagtgacttaaactcccacctactcctggaataaaggagtcaaagcccggataggcgcagg

SEQ ID NO: 3553 - DNA, 407 bp, Homo sapiens
ttttaaactgaaatcacgtttattccttgtttctggctatcacaatgagacaaattttaaaacaccaagttttaaagactgaacagtgtgatttaacatgatgtaaccatgagaatcccgtattattacaatcccacaatctaaaaactctacttcacataatttgcactctaggccttttattcttcttgctcaagcagcctggtgcctttaggtaacttgaaagatagtggaaattgatataagaggcatgtttctgaaagccccctacgtccaacaacagatttaacttttctggtagactgaaattaaaatttcctttgaacagttcgctaggttctttgaaggattatttgttttccagtttgttattcaaaatgttaatcttatacttgctaggcacgatg

SEQ ID NO: 3554 - DNA, 630 bp, Homo sapiens
  misc_feature (2)..(3): n is a, c, g, or t
  misc_feature (128)..(128): n is a, c, g, or t
  misc_feature (296)..(296): n is a, c, g, or t
  misc_feature (303)..(303): n is a, c, g, or t
  misc_feature (312)..(312): n is a, c, g, or t
  misc_feature (344)..(344): n is a, c, g, or t
  misc_feature (364)..(364): n is a, c, g, or t
  misc_feature (371)..(371): n is a, c, g, or t
  misc_feature (401)..(403): n is a, c, g, or t
  misc_feature (405)..(405): n is a, c, g, or t
  misc_feature (411)..(411): n is a, c, g, or t
  misc_feature (413)..(413): n is a, c, g, or t
  misc_feature (437)..(437): n is a, c, g, or t
  misc_feature (471)..(476): n is a, c, g, or t
  misc_feature (480)..(481): n is a, c, g, or t
  misc_feature (487)..(487): n is a, c, g, or t
  misc_feature (504)..(504): n is a, c, g, or t
  misc_feature (508)..(509): n is a, c, g, or t
  misc_feature (514)..(525): n is a, c, g, or t
  misc_feature (529)..(560): n is a, c, g, or t
  misc_feature (563)..(572): n is a, c, g, or t
  misc_feature (575)..(577): n is a, c, g, or t
  misc_feature (593)..(603): n is a, c, g, or t
  misc_feature (607)..(630): n is a, c, g, or t
tnncggtgaggggggcgaggggggcatcgcttctcggccttttggctaagatcaagtgtagtatctgttcttatcagtttaatatctgatacgtcctctatccgaggacaatatattaaatggatttngggagcagggagatggaataggagcttgctccgtccactccacgcatcgacctggtattgcagtacctccaggaacggtgcaccccctccggggatacaacgtgtttcctaaaagtagagagaggtaagagacggtagcacctgcggggcggcttgcacgccgagtgnctgtgangcgcccggnttgacttaactgcttccctgaagtaccgtgangttcctgatgtgcgggcggnagacggnaggcttatgcggaagctttcggttccaccnnngnttcttngntttgggaaggcaacaccccccctnggggggggccctaggctccaaattggaggggggnnnnnngggnncctttnaaggatgggcccccccngggnnccccnnnnnnnnnnnncccnnnnnnnnnnnnnnnnnnnnnnnnnnnnnnnnttnnnnnnnnnnggnnnaggggggggggggggnnnnnnnnnnnaatnnnnnnnnnnnnnnnnnnnnnnnn

SEQ ID NO: 3555 - DNA, 492 bp, Homo sapiens
ttttgagtgtggaaacaatgggattgagcttttatcttagggaaaacttttacaagaaacagttcactgagagggttccagaaagttattgtagacctggaaactttacaactgttcctcatgtccagcaaaagcaataacatctttcatctttaaagctttaattctttaagcaatctactttaatcacttcaaggcggtgatatcattagatgttacaaaattaaagagctgggctacataatttttggaactctgcaccaaagaagccattcacaatggaaactgtggagtttcggtagatggcactcttttctctgagtgacaactcaaggtccagcatgtgaccgtagatgtagaacaggggctttcctgaggagctgtcctttagcctcaactataatcctggtaaactcacagccaatcattcttgatttttaaaaagaagcctgtagataagacatcaatccaggaatctgaagtagttaagag

SEQ ID NO: 3556 - DNA, 343 bp, Homo sapiens
ttttttttttttttttttttttttccatgttctcaaagatgatttattagctatcctcactcatgggaaaaagaaaaacgtaaatgaaatcaaaacaaaacaagatgaaaattgatacaaatggacccctggggctttcacgtctgcagcctacgtacaggaggccccatcaaaagaaatgacgctttaatttctgctaaggtctacggtctaacgtggtatgataaggggattttttaaacaaagaaactagaatgcttactagcccatgagtgacatgtcttccaagcccacatggccacacttgggaattgctgggttcctttttgggtttttttttttt

SEQ ID NO: 3557 - DNA, 439 bp, Homo sapiens
  misc_feature (298)..(298): n is a, c, g, or t
gtcaatcatcactcccagccattgattttggtgacccacttccctgtgatgatcttctgatctagtttctcaggttccttcgctggtcctttttctttccctgcccctgacatattgacatttcctggagttggttttgtccttgattcattctcatgtcattctgcacacagtctctgcatgaactcaggcagacccttcatttaatgaccaccttagggctgatgattctcaaatctgtattccccgatcttgcatttgagctccagccccactcatcctctcggatgttctgcanggcccaagcaaactcatcatgtccaaacgtgaaactttttctctttcctggtctcctctcctctgatctgttctttcttggaacaccacccaagaacgtcacctcctccatcagattgtgagctcctggagggcaggagct

SEQ ID NO: 3558 - DNA, 564 bp, Homo sapiens
ttttttttttttttttggaatcaatccaagttttattagtgctcaaatgtggataaatacattatggtataagtcaatcaacagaatacaataaaacaataaaaatgaataaactacagctacattcaatagtctggacaaatatcataattataatgttaagtgaaagaagccaggcacaaagaagataaattgtttaggtctataaaattcaaaaaaaccatgcaaaactagcctatggtatttggatgtatgcttccacggcaaaaccataggagaagtatggaagtgaatgccataaaattctgggcagtggttacctttgtgtggagagtgaggagactggtattgagaagaaacatgaaagggcttctgggtgctggcaacattccaaatttgacctggttggtggttacatgggggttcattttgcggtaactcagtgggcttcacttttctgtatgtttgtcatgtttcacaatgaaaaagttaaaagcaaatagaaaatgatactccggcgcttaaaagaatgcaacagcactttgaacaacttctaacaccttt

SEQ ID NO: 3559 - DNA, 570 bp, Homo sapiens
gtccaacgtgtgatcccatgcacaggacctgtccctcttcccttatccaccaatctcttgggtggagagtggcgtggggaaccagaagcaccagagaagcctgggaaacggagaagccactgcatgctgctcccagactagcccaccccataaaggtttaaagaatgggccctcaccccatctggcaatcagcggagggggtggggcacaaaggcgagcagacactggtcaagcttccacttcatgtaaccaagggaggccgtgtgcactgacccctgcccagccaccgacagtccggtggaggcgtgtgactgagatgcttcggaccctctcatttgggatccagcgtccctgaggccacgacggaggctgcagggcataaagccagttggcgtctgatgtgcaaactggttcagtgtgcgacctgcgctctccacagcacagggcagggcaggcaggcatccacacgtcctgcccaccaccatcccgcatgtcaggaaatcacacagttgctatgcttggcagaactgggacttgttttacctgcaaaggcaccggacagaggcgggg

SEQ ID NO: 3560 - DNA, 586 bp, Homo sapiens
tgggagcaacgcgactgaccgtggtcgtgggcggacggcggctgcagcgtggaggagcgggggtcgctgtgggtcgcgaagcagagcccgggacgtgcgcgcttggtgcacgatcctgaaggggagctccgaggggcccgggtcgccagggctgctgcggccattcccggagcccggcgcggggcccgcgagatactggtttaggccgtcccagggctccgggcgcacccggtggccgctgctgcagcggagggagcgcggcggcgcgggggctcggagacagcgtttctcccggaagtcttcctcgggcagcaggtgggaagtgggagccggagcggcagctggcagcgttctctccgcaggtcggcaccatgcgccctgcagccctgcgcggggccctgctgggctgcctctgcctggcgttgctttgcctgggcggtgcggacaagcgcctgcgtgacaaccatgagtggaaaaaactaattatggttcagcactggcctgagacagtatgcgagaaaattcaaaacgactgtagagaccctccggattactggacaatacatggactatggcccgataaaag

SEQ ID NO: 3561 - DNA, 401 bp, Homo sapiens
ttcatggtctcctggaagctttggctggagactactcagctcgtcactgaactaacggcttttgggggttcttttttcccagttgagtttctgtgtcttttacacgtttggttttatggtccgttggaggttttttcacgctgagggtgaagattcttagtttcctcaattagcataaaagctgctccaaggctgctgagtcttcagttccattccattcaaaatgttaattcctgagacacgcaacctacgccctactgtcctttgtcccacggcttctcgagattatctctgtgttttaatagataaaacgccttctctccccacccgtggggtgcaaagcacagcgcatggggctggtggcgcccgagagcaacacacaacgcatgcgccagtcccgc

SEQ ID NO: 3562 - DNA, 396 bp, Homo sapiens
tttttttttttttttgcattcttgaaacaattcttaatcatttattttcaacacgtgtactataaagaacctaagaaatcagacaattttaataacccataaacatgttgaatccatttgcagatttaaattttgtaaaaatagctgtcactgcctccatatatcaagtgtactatgtttataatcacatttatgctaccgatactcctcagaaaaaaacagattctgcttggttctagcttcagtattatgaactccaataatgctttgaggacctccaaaggaaaaaaacagattctactaggttctagctgaaatattatcaactccaaattgaagctgaagtattatcaactccaaataatgcttcgaggacctccaaaaaaaagagattct

SEQ ID NO: 3563 - DNA, 453 bp, Homo sapiens
atctataaaggtcagtttcagaaggtaacagcatgagactagtcttcctataggcacattttagtagactgctcttctcatccctggtcaaggagcttctctaactgatggttgatatttcgcagatggctttcggctcccagaagtgttcttgctttaaataacagagctggaaggctggatgaatcatacgtttcctttacgtttggttcttgagcttgaacatctgaataatcttgataaagctgttttaaattagataaaaaatatgctgcattcctaagggaagactttctctctttaagttcatcatattttgtttgtagttgtttcagctgtggctctaacctaaaacaaaaataagtgacaaataataaaatgtaccagcctatcgtggtgaaactgaggttgtcagtacgctgagcgagtgtgaagaaccggggctggccaact

SEQ ID NO: 3564 - DNA, 2557 bp, Homo sapiens
tccagcccccaccatgccgtggcccctgctgctgctgctggccgtgagtggggcccagacaacccggccatgcttccccgggtgccaatgcgaggtggagaccttcggccttttcgacagcttcagcctgactcgggtggattgtagcggcctgggcccccacatcatgccggtgcccatccctctggacacagcccacttggacctgtcctccaaccggctggagatggtgaatgagtcggtgttggcggggccgggctacacgacgttggctggcctggatctcagccacaacctgctcaccagcatctcacccactgccttctcccgccttcgctacctggagtcgcttgacctcagccacaatggcctgrcagccctgccagccgagagcttcaccagctcacccctgagcgacgtgaaccttagccacaaccagctccgggaggtctcagtgtctgccttcacgacgcacagtcagggccgggcactacacgtggacctctcccacaacctcattcaccgcctcgtgccccaccccacgagggccggcctgcctgcgcccaccattcagagcctgaacctggcctggaaccggctccatgccgtgcccaacctccgagacttgcccctgcgctacctgagcctggatgggaaccctctagctgtcattggtccgggtgccttcgcggggctgggaggccttacacacctgtctctggccagcctgcagaggctccctgagctggcgcccagtggcttccgtgagctaccgggcctgcaggtcctggacctgtcgggcaaccccaagcttaactgggcaggagctgaggtgttttcaggcctgagctccctgcaggagctggacctttcgggcaccaacctggtgcccctgcctgaggcgctgctcctccacctcccggcactgcagagcgtcagcgtgggccaggatgtgcggtgccggcgcctggtgcgggagggcacctacccccggaggcctggctccagccccaaggtggccctgcactgcgtagacacccgggaatctgctgccaggggccccaccatcttgtgacaaatggtgtggcccagggccacataacagactgctgtcctgggctgcctcaggtcccgagtaacttatgttcaatgtgccaacaccagtggggagcccgcaggcctatgtggcagcgtcaccacaggagttgtgggcctaggagaggctttggacctgggagccacacctaggagcaaagtctcacccctttgtctacgttgcttccccaaaccatgagcagagggacttcgatgccaaaccagactcgggtcccctcctgcttcccttccccacttatcccccaagtgccttccctcatgcctgggccggctgacccgcaatgggcagagggtgggtggacccctgctgcagggcagagttcaggtccactgggctgagtgtcccttgggcccatggcccagtcactcaggggcgagtttcttttctaacatagccctttctttgccatgaggccatgaggcccgcttcatccttttctatttccctagaaccttaatggtagaaggaattgcaaagaatcaagtccacccttctcatgtgacagatggggaaactgaggccttgagaaggaaaaaggctaatctaagttcctgcgggcagtggcatgactggagcacagcctcctgcctcccagcccggacccaatgcactttcttgtctcctctaataagccccaccctccccgcctgggctccccttgctgcccttgcctgttccccattagcacaggagtagcagcagcaggacaggcaagagcctcacaagtgggactctgggcctctgaccagctgtgcggcatgggctaagtcactctgcccttcggagcctctggaagcttagggcacattggttccagcctagccagtttctcaccctgggttggggtcccccagcatccagactggaaacctacccattttcccctgagcatcctctagatgctgccccaaggagttgctgcagttctggagcctcatctggctgggatctccaaggggcctcctggattcagtccccactggccctgagcacgacagcccttcttaccctcccaggaatgccgtgaaaggagacaaggtctgcccgacccatgtctatgctctaccccagggtagcatctcagcttccgaaccctgggctgtttccttagtcttcattttataaaagttgttgcctttttaacggagtgtcactttcaaccggcctcccctacccctgctggccggggatggagacatgtcatttgtaaaagcagaaaaaggttgcatttgttcacttttgtaatattgtcctgggcctgtgttggggtgttgggggaagctgggcatcagtggccacatgggcatcaggggctggccccacagagaccccacagggcagtgagctctgtcttcccccacctgcctagcccatcatctatctaaccggtccttgatttaataaacactataaaaagttaaaaaaaaaaaaaaaaaaaaa

SEQ ID NO: 3565 - protein, 353 aa, Homo sapiens
  misc_feature (121)..(121): Xaa can be any naturally occurring amino acid
MPWPLLLLLAVSGAQTTRPCFPGCQCEVETFGLFDSFSLTRVDCSGLGPHIMPVPIPLDTAHLDLSSNRLEMVNESVLAGPGYTTLAGLDLSHNLLTSISPTAFSRLRYLESLDLSHNGLXALPAESFTSSPLSDVNLSHNQLREVSVSAFTTHSQGRALHVDLSHNLIHRLVPHPTRAGLPAPTIQSLNLAWNRLHAVPNLRDLPLRYLSLDGNPLAVIGPGAFAGLGGLTHLSLASLQRLPELAPSGFRELPGLQVLDLSGNPKLNWAGAEVFSGLSSLQELDLSGTNLVPLPEALLLHLPALQSVSVGQDVRCRRLVREGTYPRRPGSSPKVALHCVDTRESAARGPTIL

SEQ ID NO: 3566 - DNA, 443 bp, Homo sapiens
  misc_feature (192)..(192): n is a, c, g, or t
tttccttccttttaagaagaaatgctaatgtcaacctcaaaaaccagaaagagagaacctgcttgcattatgctgtgaagaaaaaatttaccttcattgattatctactaattatcctcttaatgcctgttctgcttattgggtatttcctcatggtatcaaagacaaagcagaatgaggctcttgtacgantgctacttgatgctggtgtcgaagttaatgctacagattgttatggctgtaccgcattacattatgcctgtggaaatgaaaaaccagtctcttatccctctgctcttggaagcccgtgcagaccccacaataaagaataagcatggtgaggagctcactgggatattgcacgggaggattaaaattttcccagattgaattaatgctaagggaaagcattgtaatccttgtgaccacaccggatggaggta

SEQ ID NO: 3567 - DNA, 493 bp, Homo sapiens
ggcacgaggccggtagcgccgctccagcgaggcgcgggctgtggggccgccgcgtgcctggccccgctcgcccgtgccggccgctcgcccgccatgcctggcttcgactacaagttcctggagaagcccaagcgacggctgctgtgcccactgtgcgggaagcccatgcgcgagcctgtgcaggtttccacctgcggccaccgtttctgcgatacctgcctgcaggagttcctcagtgaaggagtcttcaagtgccctgaggaccagcttcctctggactatgccaagatctacccagacccggagctggaagtacaagtattgggcctgcctatccgctgcatccacagtgaggagggctgccgctggagtgggccactacgtcatctacagggccacctgaatacctgcagcttcaatgtcattccctgccctaatcgctgccccatgaagctgagccgccgtgatctacctgcacacttgcagcatgact

SEQ ID NO: 3568 - DNA, 368 bp, Homo sapiens
  misc_feature (13)..(13): n is a, c, g, or t
  misc_feature (39)..(39): n is a, c, g, or t
  misc_feature (41)..(41): n is a, c, g, or t
  misc_feature (55)..(55): n is a, c, g, or t
  misc_feature (59)..(59): n is a, c, g, or t
  misc_feature (62)..(62): n is a, c, g, or t
  misc_feature (169)..(169): n is a, c, g, or t
  misc_feature (173)..(173): n is a, c, g, or t
  misc_feature (299)..(299): n is a, c, g, or t
attcggcacaggngcgttcacccgctgcccgggcgcgancngccggctcagcgancggnctntctagaaccgggtgattgaactaaaccttcgccgcaccgagtttgcagtacggccgtcacccgcaccgctgcctgcttgcggttggagaaatcaaggccctaccggnttcncgttagtcacctctctatagtgggcgtggcgaggcgggcctgagcttgctcaccttcaaagtctatgcagcaccaaaaaaggactcacctcccaaaaattccgtgaaggttgatgagctttcactntaattcagttcctgagggttcaatcgaagtatgtgggaggaggcaaggagccagttttgaagaaagctt

SEQ ID NO: 3569 - DNA, 392 bp, Homo sapiens
ttttgagatggagtctcgctctgtcacccaggccggagtgcaatggcataatcccggctcactgcaacctccacctgctggattttcctacaggtgcctggcacaatgcccggctaccttccttgacatattaagagaaaactgatctaatctccctttctagtccacccagtcttgcaattctggtttcacattttctcagaaagaagagactataatggtatgttgggtaatctttcagcattcctagatccctttttctctagaagaattctttctaaggacgttgataaatgacatgttgtattttctccttccagaaatatctagcaggaaagtccttagaggcatctgatttgaggggaaatccacaattgctccattatatattt

SEQ ID NO: 3570 - DNA, 350 bp, Homo sapiens
  misc_feature (295)..(295): n is a, c, g, or t
  misc_feature (321)..(321): n is a, c, g, or t
  misc_feature (326)..(326): n is a, c, g, or t
  misc_feature (335)..(335): n is a, c, g, or t
ttcatgcctttatcattttgaagcaaatatgtttatatatgtctgaccccaggaaattatttacccacaaacactactataactactatactctgttgatatgtttcattatcaacctccccaaattaaacatctgacaagtcttttatatatgtatgctgaagagaaaaaataaatcactttcttccacctttgaatctttaaaaggggtttgtggtaatgataaaaaatttatctctttccacacatttaagacctcatactgtgcaaaatcatggttatatgaaagttattntctgaatagctggatccatcaccttnaagcntaatactgntaaacaggcatggtt

SEQ ID NO: 3571 - DNA, 441 bp, Homo sapiens
gcccgcacctgccgtacccggtggagacgctcctagcctgagtagcgccgcggtcccgggaacgccgagtgcgcgccgtcggggaggcgggaaccggggcccggcgcggacgtttgcactttgaatccagaggaagatgaatttttaaaatctccatcaaacgtgccttaaagctaaagcattttgacaggagtatttaaacttagtccaggatattttcgtttgtgttttataactttacagaggaccaaagcaattcttgttttagtttctttgcgacgctgctcctccttcccttcataaggactttttttgtctttctttaacgcccaggcttcgtcttatttctactgtttttgtcgcaacttccattgatttatgtcccttccctcccccctaagtacatcagggaacctttccacactataaatgatatgacta

SEQ ID NO: 3572 - DNA, 2719 bp, Homo sapiens
gagcctaccaaacctttggttcgcagggctggagctaagtctcgctccaggagaaagaagcagaagaagaactccaggcaggaagcagtgccctggaaaaaacccaaaggcatcaattccaacagcacagctaacttggaggatcctgaggtgggtgatgctgaaagcatggcgatctcagagccgatcaagggcagcagaaagccctgtgtgaataaggaggagttggctttgaagaagcccatggcgaaatgtgcctggaagggtcccagagagccacctcaggatgcccgggcagaagccgagagcccaggaggcgcctctgagtcagaccaagatggtggccatgaaagcccaccaaagaagaaggccgtggcctgggtgtctgccaagaaccccgctcccatgaggaagaagaagaaggtgagcttgggccctgtctcctacgtcttggttgactcagaagatggcaggaagaagccggtgatgccaaagaaagggccaggctcaagaagggaggcatcagatcagaaggcccctcggggccagcagcctgccgaggcaacagcctcaacctctaggggtccgaaggccaagccagaaggctctcctcggcgtgccaccaatgaatccagaaaggtttgatctgggggaccacccatactgaggagttgaaagaacaaggaagacgtaccaagtcaaccaagttctctcttgtcactgaataagactttggactctcttagggcccctgttgatagagatctggccctgaggtaaacgataggtgaggtcttgggtgggagggagttggggaagggaggtggatctctatgcccttttctctaccaggcctgccgtttcaccgccttctctactcaccttctcttcggaggcaggagagttggtaagaggattgggaaaattctagaacattcattcccctttatgcatgagcagggtcactgttacactcatccatgttcagcttttctcccccacgccttgctccctcctcggaatggtcagcgacctctgcaggccctggcatttggaagagctgggtggccctgccatattcttcctcccgccttcctcttgtgtaaccagcggggtaagttaagccaggaccttcgctgcaaacctggttttattgctccttcagtctccagcttccatcctccagttatctagccaggaggtcccaagagttagttttagggaaaaagaatgtctgcctagacctcaaagtctttgagttttagagtctgttagtaaaaatggcactttgattcccatttgggatgagccctctcaggaatcctgtggggaaggggggtgattatagggaaggacgcaggcattcctaggtccccagctctaattccatccatctacccaactgtcaccatctttgcaccaaactgtcaccatctttgcagcagaaggtcactactcacattatagtaagaggggaaaaaaatcttttaaaacttggctgttggccgggcacggtggctcacgcctgtaatcccagcactttgggaggctgaggcaggtcgatcacgaggtcaggcgtttaagaccagcttgaccaacatggtgaaaccccatctctacaaaaattagctgggcgtggtggcgcgcgcctgtaatcccagctactcaggaggctgaggcggatgaattgcttgaatccaggaggcagaggttgcaatgagccaagattgtgccacggcactccagcctgggcagcagagtgagactctctctcaaaaaaacaaaacttggctgttaatgtctgccctctgaattcagacacactatattagaccagaccaccatgtgtcattgtgtgtgtgtgtgtgtgtgtgtgtgtttgcgtgcgcatgtgtagaggagagagcagggtccctgagataatggtttccaaactgtatcgtagccgtccacaaagatgtaatccaaatctatttttctcacgtgtttaaaaaactgaaaagtgactactcagatatgttggaagtcacatcgaagactatcagaatattaccttgtgttcataggttaacttgtttttgtacacgtcttagttatttcaggcatctctttgcttaaaattgagtttcttgtaaatgtgactgatgagcgaggttagaagtggaagaaattcctgtgcatgttctataatctgacaccctgaaagcaagtttcctttcgtcattcacatgctcttgttctgccgtgactgttcaggtgtatggtagtaagtaaatgtattaacatggtgaacagtagtaatattctatcatagagtattagcccttgcaagttttcagggcgtcttttccgacttcagtttttgtgataaagaatgtgaacagttgttagatgttctcagtgattcaactttaaaacaaatttctcgtgatgattcatttcaaaatcctgagtgagtctgactgaaaaatacgagagaaaagagagtggtttccgtttgcagctacacagctgtgtgcatcgacgttctcctggggtgtgtgccaagcgaaacccaggggtgaattggattcttgaagagaccaaagcctgtaactgtccagcttctaatttcaaaacgggtccattagggcttcgttgtgttaacaagttgacaccatgactagtaaatgtaaacgtgtatgtataaaataaagtttagcaaattaagtgtcctgtt

SEQ ID NO: 3573 - protein, 158 aa, Homo sapiens
MAISEPIKGSRKPCVNKEELALKKPMAKCAWKGPREPPQDARAEAESPGGASESDQDGGHESPPKKKAVAWVSAKNPAPMRKKKKVSLGPVSYVLVDSEDGRKKPVMPKKGPGSRREASDQKAPRGQQPAEATASTSRGPKAKPEGSPRRATNESRKV

SEQ ID NO: 3574 - DNA, 100301 bp, Homo sapiens
gatcatcctatccagatagtgggaacgcagatgtcccccagcctgtgtgagctctgggaattgctcagcttgcaattccagtttgcagtttcattgcctggctttgtggggtttcacctaatacatgtgtaggttagtattcagtaatggactaaagggatccctatgcagaggtctcccttctggaggtctttctctgcactgcaaatctcagccacctcagtttccacaaattccaatctcagtctactcaattcctgaagaaagatacattgtggtctgcaaagcacttctgggcagaaagctggaatgatcacagggctcaccttatttgtttcccttttctcaaggatcacaattctttactgcctgttgtctgctgtttatatcaattttttcatgtatctttgatccagttttctagttgtatgtggtggaagagaagattctgtaccagcaacacaacatgttgaagtatgaatttacccccatgatttctttctttttttaaccacttaaagtacaacttagtttccaaatgtaaaaatgaagtcaactttgagttagaataaataactcggcttcaagattcaggcctacctctaacttgctgcatgaatagtggcaaatcttacttgttttttggcagacacagcaaaattgaattgaatataatcctatttgccctacttctcaggcattctttaacaagcaaatggaaataaaaacaaatcacattaaataaggatgaggttatatttatagttagttgacaactcacttttcaaacctctcttgcctatcttccagttccattctctaaagaataaaagcgcctgagttaaaagtgtagtgagactggtgctgttccactgctcctcctcttaatattagccaactgctactgaatgttttctatgtgccgggaactgtgtaagccttttatgtgaataaatttactaaattttcttttttccttttttttttttgaaacggagtcttgctctgtcgcccaggctggagtgcagtggcacaatctcggctcattgcaacctccgcctccctggttaaagcgattcttctgcctcagcctcccaagtagctggggctacaggcgcttgccaccacgcctggctaatttttgtatttttagtagagacagggtttcaccatattggccaggctggtcttgaactcctgacctcgtgatccacccgcctcggcctcccaaagtgttgggattacaggtgtgagccaccacgcctggccttactaaattttcataactgccatatggataggtactattattgtcatttgacacctaagaatgagattaagcaacttggagaaggtcacatagcaaagtggcagtggcagaactaggactgatttttttttttttttgtatttttagtagagacggggtttcgccatgttggtcaggctagtctcgaactcctgacctccttatctgcccgcctcagcctcccaaagtgctgggattacaggcgtgagccaccgcgcccggccaaggactgattcttgagccatgctcttaaccaccactatgtgactactttaaaactactgaaaatgcatcaactgctgctgtagaatcattaattatccttaaatataaaagagcatcatctctgccatcctgttaacaaatcctgtttgtttagtcagcctgatttccatggggaagcagaaagattgggctatcattggaatatgtgattcctgagaaaaacaccgttacaatggctggaaatggaagatgatgtccagcaccaactaccttgagaataggctataagtggagtacagaggatctagtgtggttctcagaggatcactggtgtgtactgaatctctactgtatgtcttttaatattaataggctcattattcttttttctctcctttctcagacacatttaatcaaaccaggcaccaaaatgctaacactccttcctggagaaagaaaggctaatatttattttactcaaagaagagctccatctacaggcattcaccagagaagcattgcttccttcttcaccttgcagccaggtatggtgacccatatgggaatacttcattatccagagcaaaaaaggagtgtgttcatttgtccatgttagaccatttatgagaaatggtgaaaccagtgcattgtgttaaacttagcctgttagaagaggttataaaacataagttgttgccttttgaaaagcaatatatgtgtacttttacaaacatacttttctggttctgttttgctcagcttaatattaaatatttgtatttgctgacagagcagtcaggaagggtgtacttgggagttggaggtgcactggggagttgccctgccattagttaggtggtatatatcttgggttggccacagtgggtactctgtctaaggttaattaataattgatacttttgtgtgacgcttctcaaattagtgaaaggttcaaagatgctttttcttagcctcacataaagttggcttatgtctcttcctttggctgttctttgcttccaggtccctgttcaggggagcagctgactcagagcaggctgggccttaaacagcagggttcctgccacttggagggtgttgggaagagtgctctaatgccgggtgtgattctcaggattgctttgcctaaaccttcaaaatgccctctccctcctccaaacaaaaacgtacactcttttgctttatgtaagggcagatttaaaaaaaacaaacaaaaaacccactttttccacttacaaattctggtgtattttatagtctatattgaatgctaaggaaaagttgagaattctcacaaaacctagtttctgcagtataattcttattgtagaaggaaagaggaaatcagttattctgctttgtttttataattagatcttggaacaatttgagccaagttgggaattccatgtcctccatccttatcttaaggcagaacagaatccactctatgcctgataaaattaacaggctggacactagtagttgtttcactattctacctactgattgacttagcatcctaattgtgtcttcactccctttccaatgaaatgcctggggagtggaggacccacgtttttcacactgtcaccagaaggtttctcagagttggatagttaatgtcatctttaagaccttacaaaactagtatgtgtttagcatgtttctttaaggataatgtctaggaatgtatatttgaccaggatcaccatttagtaaaaaaccacattaaataaaaaacaaaagcaaaactgatgtgccgtatgttaaacaaacctacaaatgaaaactcagctggtaaagtaggctatggtctgatcgtatgcgatgtttgactttattaggtaggtgatgggaagtatccatgtatttgagtagggaatataagatctgatgttttagagtttattcatgatagactggcaagattgaaaacaggaagattggctacaaagttatgtgaagagtcttaagactcctgcactaggtagtaatagtagctgatactgatttcagaaaaagccaactgaatcctgcttagggcagtttttctgcagaataatatttgttcattcctgttttattaggaaagacaaatggcagtgaccagaagagtgtttcatctcatacagaaagtcagatcaacaaagagtccaagaaaaatgcgacccagctagaccatttgatcccaggcttagcacacgattgcatggcatcccctttagccacttcaaccactgcagacatccaggaagctggactctctcctcagtccctccagacttctggccaccacagaatgaaaaccccattttcaactgagctatctttgctccagcctgatactccagactgtgctggagatagtcataccccactggctttttccttcaccgaggacttggaaagttcttgtttgctagaccgaaaggaagaaaaaggggattctgccaggaaatgggaatggcttcatgagtctaagaagaactatcagagtatggagaaacacaccaaactacctggggacaaatgctgtcagcccttaggcaagactaaattggaaagaaaggtgtctgccaaagaaaacaggcaggcccctgtcctccttcaaacatacagggaatcctggaatggagaaaacatagaatcagtgaaacaaagccgtagtccagtttctgtgttttcctgggacaatgaaaagaatgacaaggactcctggagtcaacttttcactgaagattctcaaggccagcgggtcattgcccacaacactagagctccttttcaagatgtaaccaataactggaattgggacttagggccgtttcctaacagtccttgggctcagtgccaggaggatgggccaactcaaaatctgaagcctgatttgctctttacccaggactctgaaggtaatcaagttatcagacaccaattctaaatgtttgaagctttgtttctaaaagtaccttgaaatgatagagatgtaggaaaatatagttgtgggtggagagaggagtgagtttgtttaggtgggaaggtggcatgggatgaagttgtcattactgagcatcttctctgtgtaaataaagggcagtaccattgttaagacagtgggattggcatcatggctttccctcaggaaggtggtggctggtaaattccctgaatgagtctatgatgaacactgaggcagcacagtgggtatttatctctatgaaagtgccttttactcagcctgcacagagccatctctttgcccttccagatgtctgactgggaccttgcttatggatgtgtttttttttttttttttttgagatggagtctcgctctgttgccaggctggagtgcagtggtgcgacctcagctcactgcaccctctgtctcccggattcaagcgattctcctgcctcagcctcccgaatagcagggactacaggcatgcgccaccacgcccagctaattttttttggatttttagtagagacgaggtttcaccatattagccaggatggtctccatctcctgacctcctgatccgcccacctcagcctcccaaagtgctgagattacaggcataagccaccgcgcccagccagatgtgtgagcttttaatctctggctgatcttaacccacatcagcctaagcttgggatgattactcttgacccttttttttcagtgattagcaaatctccccacaacccaggtgtggagagaagagaggtagaatggtgctagtttcctattttatttttgtggtaactgtacagcactttaaagttatatactctatgtttaaatatctcccttaaaaagcctgagctgtacaacaatctggatgtgactctgttacccttttcccacaagataggagggaatcccctttgtaaaactatgaatccaaataaatgtttacaaagtggctcttgtgataattggtaattaaaccattaccaattttatttttgaaaaggcaacactgtaatagtatatgctgtcattgccctgagcctgatctgaaccagagtctagtttgacctgtcttctacccaaggcattattccttgttgttgatgtggtatctaagaggcttaaacaacctctaagggacaaacttgcaaggttataagagaactgcttctttttttttttttaacttaaattttatttttttgagacacggtctcgctctcttgcccaggctggagtgtggtggcatgaacacggttcactgcagcctggacctcctgggcgcaagtgattctcccacctcagcctcccgagtagctgaactataggcacatgccaccatgcccagctaattatttttaaaatattttgtagagatgaggtcttgctttgttgcccaggctgatcttgaactcccaaagtgctgtgattagaggtgtgagccactgtgcctggcctaatttaaatgttaaattctacttttatcgtgtatgtcatctctccagtcattttcctggaagacctgcttttaagaatgtatggggcttagtgcggtggctcatgtctgtaatctcaacgctctgggaggctgaggtgggaggtttgcttgagaccaggagtttaagaccagcctgggcaacatagcaagaccccatcgctacaaaaaaatttaaaaatttcctgggtgtggtggtgcatacctgtagtcccagctactcaggaggctaaggtgggaggctcacttgagcccaggagtttggaggctgcagttagctaatgatcccaccactgcactccggcatgacagagctagatactgtttctaaaaaaaagaaaaagagtatagggcaaaatctctacagaaagggggaagaaaccccctagaagggcaggaccttataaggaaagaggagaagccagtagcctgtttaagttcatacaccttaaaattaacaataatcctatgcccctgaaggatactgggtaatcgcaactcaagagatggacacagcaaatgcattctctctccaagtccttcctttaatgtcaggtagtgcttcaacccaaacacaagcagtatacataccatagagaaagggacctgagggcatctgagtcatgcatggtgtggtacatacaaaccttggcccagcccaaaggagcagtcaagggcctggaagaaagatggtttgctctttccccctcctcctctctctttcctaccgggcttaaagtccgtggaagagaaagtttttaatcagtggaactgataaggcctcagggccgtggagggtagatttggttgttcagtaatataaaatgtgtttaagaaaaaaaacagcccaggcttcccagcagtagcccatgtgttggctggttcagcagcctgacctctacatctagacaaggaagtgaggagggtgattgctgggcattggtgtaggtttatgacggagcagcataagattttccgtgccctgtgaacatgtatacaaacattcatagccccttcccctcagccctgctctgctgcaaggaagctgctgagtgagtgacagctgggcacaaagtgtcttgtgagaccagctatagggtctaatgcagtgaagtcagtcatttaggacctattttcacacaggggcaaggaaaaaccagaaacaacttctctcttaccctttaaactaagatacttcattctacacgattacctgaaacaaatgtctcaggtcaaatcacaagccttagcttctgctagggtttgaagtctgggaaatatataatccagctcttctctttcagtccaagctctagcttgtcagcaagactgttgcagaagatctatccttaagaggcagaaacatctgcggtgaggaaggcagctattgaaggtattccaggagcatgagactgagtttgcagagctgagggttgtcaatttccttttctactgatatcttcttcctttagagcaaacttcctccttaggacctcagagataagcacagcagggtcttcctccttcaataaactccggttcctagagacacaataatagcttgagtacttactctttcctgtgtagtgctgtatatcttttgaatacattatctcgttgaatcctcacaacaatcttacgaggtaggtgccattacaattccctttcacagataaggaaattgaagcacagaaaggttatacaagttgcccaaggtcactagtcactcagcaagtaagcggtgaatccagagttcagaaccaaactagctggttccagatctcatctattaactagaatgctttactatttcctgaaatagctataaagtatgggcaaagtaaaggaccatcagtctgttagagttggcctctggtggctaagcttctgccttctggccctgttttcttagtagcatttccccagagggtcagcaggggaagtgactgatgactcttggctattctgacccttgatagttctggagaaaaggtgtgcttgggatttcctaccaccgggtctccccttcaggggagatgattttttatgagagccagaattagagcaaaacattcacataagaaactcatgggaacaaaaccaactccagactgaagtaggcccaagttatctgatacatcatataagagggtcctagatacctggaaaatagttgcttgaaatcctagtgaacttatatacattcatcatgaaggtgttttactggtgattaagctaaatataagagccaagactgactattcaaccttcaaagcaaaaacaagagggactgcgtttggttggtgacatatctgaacctttgctgactggggtactttcccattcttattcactgacccagctccttctgatctgaggacacaagtgggaggagggggctagcaataagggtcttgaatctaatttggtccaaaaggcaagtaagagaaagtttgagagtcaacctataaaacattttgttcagaagaagacagctcagagaagaccaaaaacagcagcaactgaatttgggaatgtggaagaccaaagagatatgggtgagtatgaccaacctgactagggccagtgaaggaaggttaagagtgacttccctaaatgggtcaactgccaggaagcaatgagggagtcacttagcctggtctacttttcagagggaaatggatcccaggagacaaaaagggatccagggcaagtaactttccctttaacaagaactttatcaactcaggagaggacctcgcttccctgtccccaaaacagtttttcatctgcattaacaaacagagctgcacaagctgggtgctggccatcaaggtctggctctcaaatgcccaggaacctgcattcaaaccaagctcctctggtgagtcctgtgcagctgttgaaaccgcaacccacaactggagaaacactatgcaatggggtgactccctgaggcttctttgccagatgaagtttttcaaggtaggtattccccaaagaccctcatactccatcggaaaaacctagagctccactccttggggttctactttagtaagttaaaggtgtatttttaacaaatctgagcaattctgatgggcagctaggtttcggaactactggtgagtctcaaaagccttattctcaaatcactgaatgtgcagggtttgtttgcacaatggaccactgtattttaaagcagaaatctccaactttatgaaattctcctcccaccaaaaaagtctaccaatttgagataagaaaacataacaaaacataatgtcatgcaacccctcactttgaagggtgggccatgaagacactgtcactagcagtatgaggactgaagtggtaaagccacctgaggacagaagttggattagatgagccttcttgtaaaatccctactagcctcatatttggttggggtgaccaaacccaataaatgtagtgttgctctttcctcaaactggggccccaggcactggcaagcaggtagtcagcaagctttatgaatgacataacatatggtactactaagaacttactatgtaagtatgttgcattacataattggccatgggcaactctgagtaaatagataccagagctcctcatcagatacttacagatcttgactctgtttcattcggtgaaagtccttcaggatacccatcatgtctgcaaagctgctggccttggacaaagagacgcagtcatcctcttcagacgaactgcaggcagctttgtgttctggtttgcaacattcagggctggcagaacaaagcagggggactgatggaagctcagggacctccacctctgtctcctcggtgatgtcactaatgacaaaggaagttgtagagtggaatgaggatccaaaacaaggtaagggagaagagacatttgaacttcctggagataagaaatctggcgttaatgaagccgaagctgaaagagaaaacaataggcatgggtggacattggggctagaacacagtagcaatatcttctccccacagccctgcctactgaacattcatttcctgggctgacaccatgacaatctgggagagccaggatggtatctgtagccagtggagggtcattccactatgcttctcactcgggggctcagaaagctgtagaagcactgggcttttccagtgttccaggaaggcaggaaaacccagccccataatggccttggcatttaaaagctcccattccacaataggctgtggagtgacagccctgtcataggccaaagcagcagagataagagctaaggcctgaatttgtccttttctctaactagactagtgcttttgactatgctcctttgaaatcttgctatctgtgaactagaagacatgttctgagcaaaaccagaatggtaacagacctcccaacctccccaaatttcagtggagagaatttcctcagtttttacatttctaaaaatactttaaaaacactaaatacactaaaaactatgtttctaaaaaagatgttacttctgcttgtctcttggatgacaaaaaagtagccaagaaataacaaagtttcagtacaattcttcataaaacttccatgtgaagaaattaaatacatgaagatttcaaagaacaccatgattttcatgtgtcctaccaaatgataaatttcagagctatgactctgagtcaatgcagagtgaaaaaatgaggatgggaggaatatgaagataagccctgagcatcttgggagcgatccacctgttggctgtccatgcctctggttaaggcaggcttcccatccatttccagtggttctgccttaactgtagacagaaagctggaggggtgggttacagggcttgtttgcataatagaccactgttttttttttttctttttttgagacggagtctcactctgtcgcccatgctggagtgcagtggtgcaacttcagctcattgcaacctccacctctgcctccacctccaccttccaggttcaaggcacatgctgcgatgcccagctaatttttgtattttttatagagacagggtttcaccatgttggccaggctggtctcgaactcctgacctcaggtgatccacccacctcagccttccaaagtgttgggattacaggcgtaagccacagtgcccgaccactgtattttaaggccaagatctccaactttatgaaattctccttccaccaaaaaagtccaccaatttgagataagaaaacataacataatgtcatgaaactccccactttgaagggtggggcatggggacaatgtcactagcagtataagaactgaagtggtaaagccacttgtgattcctggtagaaacaacaaggcaagggaagataggtgcttaaaaagggtaagtctcagtggtggtggggggaatgtttacttcttgtattgaaaaggaaagcagggcgcggtggctcatggttgtaatcctagcattttgggaggctgaggcaagtggattgcttgagctcaggagtttgagaccagcctgggcaatggcgaaaccctatctctactaaaaatacaaaaaattagctgggcatggtggcatgcgcctataatcccagctactcgggaggcagaggcacgagaactgcttgaacccaggaggtggaggttgcagtgagccaagatcgtgccaccgcactccaacctgggtgacagaatgagactcttgtttcaaccgcgggcacagtggctcatgcctataatcttagcactttggaaggccgagctgggtggattgcttgaggccaggagtttgagaccagcctgattaatgtggcaaaaccccgtctctactaaaaataaaaaaattagccaggtgtggtggtgcacacccgtaattccagctactcaggaggctgaggcacgagaatcgcttgagcctgggaggcagaggttgcagtgagccaagattgcgccactgcactccagcctgggcaacagagcaagaaccaggaccctgtctccaaaaaaaggaaaactggctgggctcggtggctcacacctataatcccagcactttgagaggctgaggtgggtgggtcatctgaggtcaggaatacaagaccagcctggccaacatggtggaactctgtctctactaaaaatataaaaattagccaggcctggtggcacacccctgtagtcccagctactcaggaggctgaggcaggagaatcgcttgcacctgggaggcagagtgcagtgaactaagatcgtgccactgcacttccagcctgggcgacagagcaagactcactcagaggagaaaaaaaaaaagctactgtgggcttatgtaagatgtgatcttaaagacacttagaagagggtatcagtttgggggctaagggagggactctgcctggggtcacaggttaatattttgttcttaaccaaaccattcagcccaaaatggctggtagaaaccatctaagaggcactactggctagccaggcttcaggacaaccccagggcccggaacctaagtacctgcaaaccaaggattaccactttctttacccctatcctgcccaagagccaggggaaaggaacagcctgttacgttctggccctggcacaggggctcctacctgcatcagctgccactatctttgcaatctggctgcgcaagtggctcagctcgtcctgcagctcagtagtgcggcttagggctggcagagctggcttcttcagggccagaagcctctcctcggacccacgcaggttgggaacagaggcattgcgctgcatgacaatcagagggctgggtttccaggtgtgcctcagggggcgcgtatcactcctggaccagggaaaaccaagtagatcagttagagacagcaggccactgtgctcctaaggttccttcccccacttctgtgagagtagtatagtaaggttctgctcctctctgagcccacagttctcattcctctctccttgctgcctgccacctcttctgggaagttctccattccttagcagaccagctactgcctcaactacctgacccgggcatatgtctcctcttcatccgcagcaatccaggcgatgtcagccagggtagggactgggggcacatctctcaaacacaggtcagagatgttgggcagggtctatggagaagcaaaagtcatcaacatttacagatgccatgatgagccaatcagaaactgcagaatacacaggaggggtacctaatccggcactgggtgtcaggaaggcttcctagagggggcagaagaaggttcctggtcgaaaacattgaacagaggccagatgacagtcaggcatggtggctcacacctgtaatcccagcatttgggaggccgaggcaggcagaatgcttgagaccaagagtttgagatcagcctgggcaacatggcaaaaccctgcctctaccaaaaaatacaaaaattatctgggtatggtggtatacgcctgtagtcccagctattcaggagactgaggtgggaagatggcttgaacctgggaggcagaggttgcagtgagctgagattgcaccactgtactctagcgtggacaacagagccacattcaaaaacaaaaacaggcaagacacatgagagtctatgggattacaaacagttctgtgtcttcagtggaaaaggcctgagtcaccttttagtagagatggcaactgtctaaaaccactgtgccctctggtgaaaatacaagtacaaggtcatccacaacctgttacagcaataggaaatttttcctgactagctttttataatcctgtatagctaattgagatctacattgttacagcaatgctgttttaaacaaacctgaaaatttgaatatatttagatttaaataaaaataaatgattatacaaaaggaaccataataggatttcttaaaatagctcctcaacctagagatgttgagtaaagtgaaaaattaggattcagtcatgttgactgtgattacaacaaagtaaaaaacatccatctagaaaaagaggactacactaagacattaatagttattgtattattactatgtaattataggtaatttattttccttttacttttcataattttaatattttcatatgcttaaattttcaaaataaattggtaagagtcccttaaataatatttaaggtaatttaataataataataaatgcatatttacacacaagtaagattcaactgtttctgctacaaattatttggtatggtagatggatccaggattgatcgctcctgcatttagataggaaacctgggactcacaggagttaagtgatactccaaggtcacacagagaagaacttccagtgacccaggaactagtgctaaaatagggcatttgggggaagcctccatttgttttcctgattagccctgaatgctcctttgctcttggcaattaaatgagtaaacaaatataaagtacagcacagtgcctgacacatagtatgtgctcagtaaatgttatctagtattaccaatactgctcacatacattcctgctctgtgagagcctgtgcccttgattgtctctgcccagcatctggccaaagaactgaagagggtatagccaagtgtggggacggcctctatgcagtgagccacactccctagctgtctcccttttttttttctgatgcttctgaggcaagttaggaccagttcctgcccaggatctttagacaattctggatagctggcaatctgaatactgggacagcttttcctgccccctacccctgcgacacttccaactccattcctgaccctaataccaaccctgacacctcttctaattccagatccagttcctacagactctgcttcttagcatcttttatacagatttggctccttcatttctgtttctacctgggcccacatcctttcatgcacatatttctatctcctctgtgtgggtagaaagcacaagtatttcttttgtatcccagctctccaaatgcacacatctgaaccatatagtttggggctggtgcttaaccatttagttcctagagggaggcagctgggactaataaatgctacttagctttctaccacagaaggggtctcaagagacctgggccaggtaggaatctctgctgctgagtgggtgctaaaggatccctagacacagaggtaagaccaaagcaccccagtaaaggatgcccagattggccaaaaagagaaggctgaggaattatggcctcagagaaacactaaaaatagtggagctgggcatggtggcttgtgcctgtaatcccagctacataggaggctgaggcaggaggactgcttgagcccaggagtttaagacctagcctgggcaacatagggagacctcatctcaaaaaataataaaataaaaatactggctacatggtcaattcttagggctggtgaagaaaagcagagttcaactcaaaaatcacaatagtcagtgtcccatgtgggggacctgtcaggttccttgtggtcacaggtttgtatgcactcaggaggacacagtgaccaggatatcttataagcatttaacaaatatttcataacagaatgaaaagtgaccaggaaacaacctacttgggcagtaccaaggggtttggggcacagaagcagcactgtctgagcctctactctcctgcccttccaacatactcacctcaaaggacgcccgggcacacggcttcaagggtaggttggtcccaattcttcttactacacttcgagcagccccatgtggcttgttttgccagattgggatggtctggagcaaagagacggagacagctacaaccccagagaatgaatccaactactgtccttgtcctctcctctctaggtttgtggagactgaattccacaaacctagggacagggcactctctaggggcaagtcaactctcaattatagtgagggcaggttccccagttgccagcctacaccctggccagccacccaagggaatacctgctgctgctaaggcagtcaatgttgggagggtcagggaaggggagaggaagtagctgagtgtagagattatccaggctttccttcccgtcctctgtacagaaaggcagacatacactgactcctgaagtgccccaggatcatagttggttcttcttagggggagggagtgaaacggtggccttgctccaattccaggcctctggagaaaggagtgctcaactggagagtctcagaaccttttacagtacttcagcaggcccagcacccaaccttccccaccatacccctgccctgggaatgccccttaccacagtggcttccattcctgacatttgaaccagctcctgcacttgaaggacaaggcagccactgggcagctccgggaggcgggaggcgtgactccttcatatcaggccatctggaggagcaccagatttccctcttgtgaaacaaccccccacagtggggatttaatggtcaccacacaagccccaaaaaaccaggccctgcagagccatgacttcacaggggagaaaaccagcccaagaggctgccctcacccaacacttagctctaagtccagactcttaaaggttctgttaaagatctgcggccaggcgcagtggctcacatctgtaatcccagcactttgggaggccgaggtgggcggatcacgaggtcaggagagcgagaccatcctggctaacacagtgaagccctgtctctactaaaaatacaaaaaattagccaggtgtggtggcgggcacctgtagtaccagctacttgggaggctgaggcaggagaatggcgtgaacccaggaggcagagcttgcagtgagccgagatcacgccactgcactccaacctgggtgacagagcgagactccgtctcaaaaaaaaaaaaaaaaaaaaaagatttgcctagtgagcttggccaacccaagagccttcctgggctctcaggtttcttgaggcaaaacttctaaagatgcaaatagaatccttggtagctacaaagctcatctagccaaattataagtactatccaagcccaggattcattcttgaagatgagatgtaaaagcactgctgggcccttgcaaagggagagatcagagaaaataggagaacgaacaccagctcatgccaatctcagtctcatgagctacagagaaaaagagccaaaaaagtttatcctggctcagccaccttctggctttgtagctacaggcaagttatttaacttttctgaatgttggtttttccatctggaaaaaggagacaggaaaagctgccactggaggctaccttaagggtcaatgagtgaaatggggttgagtgcttaatgaactgttaaaacatgacacagatgggtgaggtgacatctgactgctcttcacagcagtccttgcatggtgagcagatgcaatcagtgtgctcgttcattcacttgttcatcaaacaccaacagtacccacttgtgccaggccttgtgctgggcaccgtaggggctatggaaggagtaagacacagtcatgctctcaaggaactcgctgtccagcagagtgataggacatgaatacatacttctagcaaaggctgagtagcattaggcaggtggccagatgaggtcagagctctggccctagtgccctgtagtaagttgcgagggagtaggaaatgaagacaaaacagcaagagcacaggtccagcacaagaaggtgaaggacatggaaagaggagcagagcatgataaagctacaaaagtagggggcaagtcatgaggtccgggtcactggggagccctggacaggctctgaatgggagatagactagactgacaaagcagctctttctggagacctcctgtggagggtcccctcttctacccttgggagacgaggtgtcattcacttcacgatacacatggggaaaggaagttggacaggggaaggcacttgtctaaggtcactcagtggtcatgccagtgcaaagcacccaaagcctggtccaggtcctgccacctcctgcgtgggctccatcttctcggctcagttcaagcctttattatcagagtccctctgtgtgccaggctctgtgctgaatgtccgtgtcggccacaaattgcactaacggtgcttactgccacttcctctccgaccttacctccaaagacccagccgggcctaaccctcacacacagccagaggaatccttcccaaacacagttaatcacatcgctcatccgtttaaaactggcttactagagccaacacaggataaaatccacaatcagtcccaaacccatctttctctgccgtctctagaccacattcactgagcaccaaggcctgcacgcttcgcagccagccctcctgctctcccccttgccctccagccacactggccctcaacccccaacactgggcccacctctgagccctgcatcaaacaccagcacccccttcgccgagctcattcttcatcattcctcagagctcagcttaagcatcaccttccttccctgcgacagggtcaggtcctttcctgtgcgctccgcagcaccctgcctgtccctcggagtcctcgcgagaggaactagataactgtgatccccgcgcacagcacggtgtctgcctaggacacagtgagcgcttcaacgcgctgaactaaacgaatgaaggggaacaccaactcagctgtcacccccgcccccaagtgtcactggctagaagatcttcccccggttcgccggcagcaccggtgggtcttgtcacctctgcgccccgcagccctccggaggctgcagttgctgtctgctgacaggcgtcccctcaggagaacgggagctcctccagcgcagggccctgctcagcacccctggtcccgggggcccccacggaggccgccgcgctcagtgaaactttgccgcgcgcagcagtggccggagacccgcgcggaccctctccccgcggggacccgccagggcgagtcgcccctcccccgcggcagacgacccgacctgggccaaggtcggccaagtgctcgccgcctgcccagcggcccttggacccacaggacccggacccgagtgcgcggaagcctccgagccgcggccaggtctcagaatgcgcggcggggcagcccggcccgtcaagcagcgaagccgaaactagaagcctgaggtctggcttggtcactgtttgctggggaactccgacgagcaactacccttcggggactcagtttcccccgggccaagtgagacggacagctgcggctcccgcgagaactcgcgcgggaacaggagctgcgggctccgcacagcgcccggcacgtagacccagtctactaacgggctggaaggtcgcgctcccgcctccgcgcctccctagaacctttctcacctcaagctcgggctcccggactctctcacctcacggcccctccttccaccttgggccgcccagcctcaaccgccctcacttccgctgacccgccccccggaagcgatcctccgcagctgcgcaccgaggcgcacctccgcgcaccctcaggaggcgggtccagctcggtggcgaggggagcgcggcccccgagtgggcgaggcgctggcggctgtaggctccgataccgcggagcacactcccctccatcgagaccgtgcccccgcggggtctgtgtccccgggaggagttggctgcgtttggagatccctcggcctggtattcgtcgcgtctccctgcttgttgctctccacgtttagccccatccgacttctggaagcccaggggtgtgtcgctcgacccctaaaatatgctcctacccctagggcaaacttcagaatcctcaccctggcccccttcccagttcttggttcccaggcaggtccctttgcaaagcctctctccagcaagaatgcgcagaatgggcctctttctcctcttgactcctgccctccagcactttgcagctttcttctattttagcctctctctctctctctcacacacacacacacacacacacacacacacacacacacacacggtatattcaatgagtttgcttattagatgggtacttgatgtacaagactccagaggctctgtgggaagagccacattccttccaggctcactaacccactccctctttgtgctccagccctcactgtcttggtctgtggcatgcagttcctgggtcacatttccttctctgccttcagcacagcctcgggctgtgcctggctcccaggctggagttccttggttccaaagcctgcagtcccctctgccagagacagagctggtttcatgggtgaacagcccatgcagtcacaacgggccgcatgctcagaatcctgtacttggtttagtactttgctgttgccgtcttgaaatgattttctaataggggttcttgtgttttcattttgcacggggctgtgcaaattatgtgactggtcctggctagagacctcagaggtcgtccaccctgatctccaccatatctcaaacgctgaagattgacttccaggtctggccctcttcccaggatggcacattgtgttttaatcattacctttccctcctgtgcgatggcggatcatgcaagtccacgctggctgtctgtcctgggtgtagatgctgatttggtgtcccactcagatccccttgcaggaagaacggagctccctacctgggaatttccttcacctcccaagccaatgactgataaaaggtccaaaaggccagttcagctctgcagtgtggtttatgccccacagctcttccactgtgggtcaggccaaggctgggctgagactgttcctgctcagcatttttcctttccctcttctgcttccttccttcttttactggtttttctggaagtacactcccccccagccccaccaaacaaacaaaacaaacaaacaaaaaaacacttcatgcctgtctcaggctctgcttttaagacaatgattttaactcccagatctctctcaacagagagcaccagattctcaaaacagtaagtcctaccacttgttctatcgtaaaacttattttgggcaagtcactcaagccttcgataggtaagatagtacctgaaagcattccagctcaactctgccccaagagggagccaccccatggaaggacggagctgagcaacatgccactcaaaggaaaagcacttagaaccactctagttagtcttctctaattttattacagggcatgttggggacaggggagggaagtgttagaggagtgacagggcagcccggggccctctcccaccctgagcctcgaggcctggtgggggacatgaactgcagaggcatcagataaggcctcagaaagcccaggccatcattttccatgggaccaggctggctcaatgtggaactggccctcccagagcagcaggagaagggctcgcatgggctgcccccgtcacctgtgcctgacaggatggggggggaggcagagagagagcatcagacgccctccctccccataaggggcatgggggatggggacacttcctcccaggacacagggagcctggctgagctggctggctcatgccccatctggtctggaggtcagaggggagtgagacactctggtttgaaaggccttcctttccactttggggaaaacaggcagggagagaggtgagggtgccatgccaaaaaacacccccaaatccagatgcagactttggagccacatgtgggtttgaatctcaactctacctgagtgaccctgggcaagtcacttcacttccctgagactcaagtttcatcaagatgggaacaatgagcatctgcctcacaggcttgtcgtgaggattaagtgagaaggtgcgtgtaatattagcgatgactggatgatacaaaattaagaacaaggctgggcacgattgctcacgcctgtaatcccagcactttgggaggctgaggcaggtggatcacctgaggtcagaagttccagatcagcctgaccaatatggtgaaaccccatctctactaaaaatacaaaaattagccagccatggtggcatgcacctgtaatcccagctactcgggaggctgaggcaagagaattgcttgaacctgggaggtggaggttgcagtgagccaagatcgagccatagcactccagcctgggtgacagagcaagactccgtctcaaaacaaaacaaaacaaaattgagaacaagactggctggggaaggctcagtggacacgcccaaggcaagtggggtaactcggcacataaaaggcccaggagtggctgcggagatgtctgccttccttcttcctctgccaggctgagtgagccccgggtggggtgagggggtggggagagaactgggggctggggagggggcagcctgacttcaagaccttaatgaaagagagtacaggcatgcctgtgggcctttgtggaggatgggacagtgctggggatcatggatcctctgaggactgtttttaaaaagctgaagaggagaaggaagagaggactacttcttcccataggtgcagctgcaaagacatcaagctggacccatcgaggatttcggattcagccatcatggggctgctgccggggaagccactgcccctcctttctcctcagcactggggttataaaaaaatacctacaaaccatgagaaagtttgtgtaaaaacacttttctgcacatataaaaagagagactggccgtggtcagtggctcaggacgtggaccaaagtcccaagagtggccaaggggagtccgtggtgccccagaggtagaagagctagcctggggcacccctggttgccgggacagtgccggctctggagaaggctgtggtgtttggctgggttgtgcttctgtggatgcaaggtctgaggggcaagaggggcggcaggagcgctggctcccgcagtcctgcagagaccctgtgctaaggtaggcggtgggagtgccttggccctgggcctcgggaacccccttagtgaaccccattgctaaaggcagaaaccccttcacagtaaacttccccagatagctggtcagtggcgtggtcagggaagctgcagggggtcccgtctgatttccactctgatggagggttctgcccagaggctccagaagactggctcctgttgagactgaccccagctggggacatcaggcacaggagggcagtccggggtatggccaggaacgaaggctctagataaacaggggagccgccttggcagcctggcccctcctggctggggcttcttgatgtttcctgtgggaagggctgaaagcaaggagagggtggtggccccgtcttcctagcctgctcctccctccattcttcaccccacaagggcctagactgtgcggctggctaggaaaggtccagggagttcacccaggccctgatctgggggggccaagcagcttccagagccaaatgggtagggagagccgagtgacagtcagagctagaggttcctctgcccagtcagcccaggcatcccttgtctacccgccaccatggagccaaggctgtggtggccaccctcagtggatcttgtaccctccaaggcagcctaggagtggggtgggagtgggcggcatctgcagtctgaaatgggctgaggaccactctggctctgaggcgtgggggcctgtgcatcagatcccgtccaggcactctagggctggaggaggggcaggccacgccggagtccctccttcaggaactgcatgtaggtggccgtggacgggtcttcaaaggtggatgagaagctgaagagattgctctcgatttcctcgggcttcacggaggtgatgtccaagaagtagttggcattgatgtgatggacctgggagaagggccgggtgaggcaagtggggcggaggggggcccccaggctccctgtgccctctcttctatggggagaagcagggatgctatcaggccttgactgtccttgtctgaggtggatggtgggcaggcagtgctgccgtaagccctcgccagcacccgacaccatctcatcaccctgtgtctgacgagggggctcctccctgccttgcctaccaagtgaaaacccaacaccttccaacatcacctcttctactagccctctgcccccgccccccgaaatgacccctctcctctgttcctgtgaccccggactcccatcctgaactccgtgctcccttctctcactgcagcctcacattcaatgggcctctcctttggcctctcgctccagagactgagctccttcagcacggggctgtgtctttatctttgtgcctggcacacagtaggtgcccagtagatgaacaaatgaatgaatcagcattcaatcaacattcatatgaatgggaggcctggttctcccaaccaggcccagcctcatccagttccccgacaccatctcatcacccttgcgcctgggacagcagatgccttccgcctggtgccctttcctttacaccaaaccctcactggacacctctcccgtgacagcccctgctcctgaactgctcccatcctaagatcctgaggaagccggccccctcctacagccctgggtcccacactaaccatgccttgggacttaaaggatgaggggtcgctttgatcagaagagctggagatctgaggctcaagggcaggcctcggttcaaagccagctgcacttaattgactgcaacatttgtccagtctctcaactttctgggcctccttgtttataaaatgggtattcatgaccatccatctcccaaagctgctgtgaggccccagtgagaagacttgctgagtgctaggtaaggggcccttagggagaggtggggtcttgaatcttggctcagggccctctcctggtctctgtcacaaggcctggctcctccctccccttccatcccaggactggccgccatggtccaaggtgagccttcccttccaggctgtgtttctagggaggcgctgactctgcctcaggactatgctcactgctgcgcagcccccgatgaccaacacctgcatcacgattcctgtttctacacggggacaacggaggcttagactgggtaagagaccagcttgaggctttgcagccaggaagtggcagggacagtcccgaagcctgatgaagtctgcacatccacgcctcctgctggttgctcccggggccccgaggtgcctgggccctgtggggtctgagtgggggtgcctaccacggtgccattgggcaggcagatcatcatctccacggggaagctgtacttctccaggtgcaggccagccagcttctggtgggacgagttctcctggttgttctgtggggacagttgcacactcctgatgccgcggcccccaccactgttccggacgctcctgttcctgccacctgcccgctcacctgcagttcctccagctccttcaccagggaccaggtgctgatgaagctctcgttgagcagggtgaggatgggcgaactttccaggacagtctcccggagagtccgccctgaacctgttcaggaagacagaagggtgaggcgcccccacatcttgctggggtgcaatcttgctttggggagacctcacgggctgcaggacagtctctgcacccaagtgaaataacagattcaaagagcctgaggtagagtaggtgctgaataaatgatagttggaattaacatcaataatataccagcatcctgggctgagattagggttaggggttctacctggccctggggacttgcagacagtgacagcttcttaaatccaatgaacgctctgtgtcccagggccttcacacaggctgttcctctacctggaacactccatccggtcacttgagaaactcctactcatccttcaaagtctcagcgtaaatatcactgtcttcacaaagccttccctgacccccagttatacactctggtgccactctggactgtcccctgtagaacactcaccgtgcttgtactgactcatttggtgtctgcctttgcactgtgtctccccctttgagggcagggaccccttctgccttcctcactgtgggacgcaagcacccagcccactgctgcactgacggttgacggggtgagggtggggcactgttttgttcatctttgtgcccactgccagacacccaaaggacgttgcatctagggggcctctggtgaatttcctgaatcaattaacacaagcccagcctctggcccgattttttctcttacacgtatataacactttacagtgtatgcggcactttcacctccatgtccacagctatgagaggtaagtgtgttatcccctcttactattgagaaaactgaggctcacagaggggaagacacttggtcaaggttaccaagctgacaatggctgagtttgaacccagtctgccagggccctttcttcagcatctggtagctccctctgggctcagcacagaaacccccaagccctcaccccacgcccctaccatgggcagtccctgaggccctcacaactcaacagaagagtcccattggtctcagagcctctggtaccccacaaggtgtggactttcccactgctccccttagatccagccgggcccctcacctcagcaggactggtcatccagggccccccacagcaggattgagtgcaccagcttgttctcagccttggctcggtcgaaggcctcagtgaacggcaagtaggagacctggggccacaccgagacagagcgaagccatcatcaaagcggccagggtcccactcgggctgagtctgtagtgtgtgcaagtgtgtgtgtgtgtgtgtgtgtgtgtgtgtgtgtgtgtgtgtttgtgtgtaggcatatatatttgtgtgtatgtctgtgtatatgtacatttgtatgtgtatatatgtttgtgtatgtttgtatatgtgtgtatgtgtgtgtgtatatatatgttagtgtgtgtgtttgtatgtgtgtgaagtgggtgctactaagccaggggatggatgtctcctccaagttctatttattattattattttcatttattttttattttgagatggagtctcactctgttgcccaggctggagtgcagtggcgcaatcatagctcattgcagccttgaactcctgggctcaaacagtcctcctgcctcagcctccccaaagctttggtactacaggtgcgtgctaccaccacccccaggtaattaaaaaaattcttttgtagatatggggtctcgctatgttgcccagattgctcttgaactcctggccacaagtgattctctgcctcagcctcccaaagttttggattataggcatgagccattgcacctggcctcttcctccaagttctgaatggcagcggggaggccccgctggcacagctgggcccaacagtgagacagcctcagtagcaagccctgcacacataccagcgtctgtgcccagctgctgctccacagctcccagcctctgcccatgcagcctgaccctggccttcacccctgcccagcctcaccttcttgaaggggtacatggccacctccaggcgccgggcagcctcctcccagctcagctcctgctgccacttgatctcctcaaacacaaactgcaggggctcccctgaaggcaggtggctgtcgatcatgctgccatcctcatccaggatcacggagggcacagaggggcccgtggcctccagctccatctgggccagaggtcagtggtagggggaaggctcagagatgggcaagaatcctcaggggctcccctagagaccctccaaaatgctccactcattgcagagggagggcggggccctgcagccgagcccacctggatgggagcctcctgtgcgctcacctggggtatgtagccgatgtccacctccatgttgctgctttcactggccccgtaaagccactccatgtccacattcagagacctgggatggccagggcagagtgacaccatcatcaaagcccattatctgtgtcacactttatctcacataatacctgcaactgtctccactttccagatgaggacactgaggtttctcaaggtgaacacctgctctcagagccactgggattctggctgcagagccctggccctcttccccaccaggctgccccttcctaaggcactggagccacttcaccatccgccagccctgcccctcgcaattcacaaagggcctgcacagccatggcccgtgtactctccaggaccctttgaagcagagagatggccagtgcctcaaggcgggtcacagggtggggcaggaatgaaaacgagcaccgtggtccctgcacaggcctctggcgggcagcaggaaatctgagccgagcagtgcaatctgcagatccgccgcacgagggagccccagcactggcaaaccaccacctccgcagcagggggcacagagggcagagctaggtaacccccgggggtcagcagtccctggtgcctggtcctcagacatgagcccaggaacagctggtcctggagctggccactgcctctctcctcctgtcccatacagtccaggccccctcctcaacaaccctgcgatggaggcaggtgtgcccagccctaggtgagcagatggagggcttgtgccctcctcttccttttccctttgaccgggaagcccctgcccttcccactctggggagggagggaagccacccccactcctaggggcaattttctcttcccatgttatcccgaccatcctctcacgcctgccctgtgggtgaagtaggccaggagtcagtctcccatccggcagatgaggaaacaggcctacagagggccagggccttgcccacagccacacagccaatgggttccacagcagagacttaactgcagacctcctggctcccagccaggtctcatccctgtagagcggtcactcaggcccactcggtggccacttgctatcagttaggaatctggacaaacttgaagccagggcctccggggtcctctactctgctgacaggtggccagccctgaggaggtgaggcaagcaggtggctggtgtagcaccgtcccggaagcccctctggggctctgcagcagtggagggcctgcccttggcctttggatgtgctgttcctctgcccagcaaaaccctcagagccctgatctctgctgagatgacctttttcttctgggaagccttcctggaccccacagctgggtccctgcctagctgctggccttcctcttggtggcgtgcacaggctgcggttacagctctgcctggggcctgtcagcagtatgagggcggggaggcccagcttcaggaagggtctgcggactgctgcactgggtcccaggcacagaggtggagggccaggccacgggtgcctgggaagagctggtgggtgatcagctcattctcttgcctgcctcatgccgcctcctgccacgtcagccccatgagatgggctctggggagcaaaggaaggggcagagacagaagaggcccctaggctcctggagctggggagcaggacaagctgtaggagggagccaaggctgggccagggtcaagctcccacctgtggttgggcacgaagagccggaagtcgcggacgtgggtggcgtctttggagaggatgatgtggccggtgaactgagcaggggagaaccaaaaggggaagtcgggcggctcactgagctggaactcggcatggatcctgtggggaaggggatctgctgcaccagagctgcccaccttctccccaggagcccgggaagccttggccagaatcatcagggagaggaggctgagtgtgggggtggaggtggatgggccagtgggcagcagcgaggctctccaaatgctgctcatccttcgaggcccgggtcacatgcccctcctctggaagccctgcctggaccccctcccccagccttcacagcttctggagggcatgtgtgactgggtgtccttcccacttctgtgtggatggcacaaccatggctaccagccccgtgccaagcaagttccacaacttttctttctgaaccctcacgtgccttacgaggaagtcatcagcacccggatccacaggtgagaaaactgaggctcagagagccaaagctgcttgcccaagacggcagtgggaggagaggtggagctggggggctcaagctgggccctcccctctgggcgctgtaccgtcatgcctccccggtgctccaggccagccagtgtggcccactcaccggaacatcacagtgtagtagaagtcgctgatggcagtcaggcaggccacagctccctgaggggcaaagcgggtcttcacaaagggccgagggtggaacatgctcaggagccggtggatgatgacctgggggcggcgggaggcacgtactggcttgctgggtcccgctgggcctggatccgctggggtgggggtcagcccagacccgacggcccaggggccccatggggagggggcaggtccagaggaaggcaggagagcaggtggagcaggcctggcactggggtccaggcgcagacagaggggtggccactcctgggctcgggcggaggggccccacgtcgcaccccagctgtcctcacctccttgcccttgggcggcggtggatagaagcggttgttggacaggtagccagtgaacatgctcagctcactggggatgatccaccagggctcacccagctcctggcctggcgggggaaggaagggctggaagtggcgggtggcaaacactgcacttggtgaggcggcggctgtccagtttcggaggccggacagggcgaggcgggagacctggggcgggggaaagcaaagctccaggaatctgagaacctgactccggggtctcctgtaccatgtgggtggaggtctccctcaagccccgagccagcccacaccaagggagcagatggaccccagggaggttcctgcccttatgatggccacaagcttagcaatatcccgccagagagaggctcctctccctgctgcagtgcctctgcagcccacccaggcacagcccacccaggcacagcccacccaggcacagcccacccaggcacagcccacccaggcgcagcccaggccagagcagctcgctcgagggcaaggttggaatggggatggtggggctctgtgcctcacatagtcccacctccatcctatgcataagcccatgggccagccttgggtgccaccaccctgcctggcttccctggccctccagcagccctactctccctccccagtctcctctccaagtctcctcccagggactaatgtcccactggccagctcagggtttcggtttggagctaagtccgatgagggtggtggccaatcatgtttgaggtgaaatctctagggtcaagagcaggatgagaccacagggaaggggaaggaaggccacccccagaagggccctgccttaagtacagcctgccccaccctgggcaaaaggccttccctaagcccgagtcctcatcggtgacctgcctcgcctctgtctgacaagctgatggctcggagaggacgctcagagaccacagagctgtctacacgtcggccagcatttggggaacagcagattccctcttctgtcgccacctccctggcagcaggagctcaggcttggtgggaggtaggaggaaagcaggcagggagctcccacagagacagatttaacaggcggttctcaaggcagagctggctgtgccgggccaggccgagcccgccttcctgggtcctgcttgtaggcttgccaccccctgcaggggacctgccagcgatgggtgctgggcttgctggggctctgctcgggggccagggctaggggtgctgctcctgcctcaccccagttcttgttgtctgtgcggacttatctgctcagaccagcccatcactgccaaatccatggagatgggttccccatctccttttgtggaaggtcagaccggttttgaccacttcctggactcctgcctatctgctgcactgtctccttggctgagaagaacacgtttattcatttgttcattccacaaaatgttttatgcacctactgtataggaagtttctatcagggtacactgtgcaccctgtcttcttggagcttatagtgggagacggcaagtaaacaggacccaaaacgggcaatgcccttccctgtgagctcctccttggaatttctgtccctccctgaacctgcagcgatgaggttaagaaaggggctcccggccgggcatggtggctcacacctgtaatccctataatccctgtacgcctataattcgggaggccgaggcaggtggatcacgaggtcaggagattgaaaccatcctggtcaacatggtgaaaccccgtctctactaaaaatacaaagaaattagccgggtgtggtggtgggcacctgtagtcccagctactcgggaggctgaagcaggagaatagcttgaacccgggaggcggagcttgcagtgagcagagatcgcgccactgcactccagcctgggcgacagagcgagactccgtcccaaaaaaaaaaaaaaaaaaaagaaaggggctccccagcactgcttccctgggctgggccaggtggcaattccgccacaggtgccagcctcaaggtcattcccaagtttcttttgccatgtggctgccaggctctagagttgggcactgccaaggggctgctgctgggcagcagacatccaacatcccctggggacctcaacttcaacatgtgcagactgacctcattctctatcccctactccctccccgcctacagtccccatctgggcaagcagcccaccatgcccctggtcacagccagaagcctgagtcatccaactcctgcccacccactgtccatgaggagccgctccctgcccttccttccccagcatcctccaggctgcccttactctccatctcctccgtctcccctccagaactggtcttcttgcctcccacttctccccattctacacatgccccgtccctggcctggagagcccaggtctgatgagaaagctgtcttatttaaaatctgcacgatattcagccaccatagaatgaaggccaaaggcaggcaacaaagcccttggtggggtctggcaccttctctcctggccccactgattgggatgcccctgtgtgggtcctgcatgccccctgggcccagacacacccactgcctggcctcagtgaccagcctggcactcctgccttcaggcctctgttcgtgctgaagtggcattggctgagatgaaaaggctgggtcgggctgtgtgggctgggcacagagaggcagtgttcctggcagagggaaccacatgtgagaaggctcccagttggaagaaagcctggggatttggaaggaaggaagtctggtgtggttggaacagaggaagcccacagaggggaggagagagtgggagagagtgcaaaagggcaggcaggggctgaggcagcttcatcctgcaatgcgctcaggaccctgtccaaagggccttgggttggggaggggctggcaaggagagcatctgtccacctcctacctccaccttctcaggtgccctccccaccccacagccctctgctggggaccaaacctcaggtctagatcatcagagttcaacagagtacctatcaggagccaggcatcatgctatgccccgtggggaagagatggatgtgtgggaagtaatcatcatagtgtgtgggaaataatcatcatagtatgtggggcggctgcactaacagggtctctactgcactgctgcttcctccgagacccccccaacctgtgctcagtcaccctgctgagccctcctcatcctgcagtctaccagatgtcacttcctctaggaagctatcccagattccccagtctggggcagaagctaatgcttctctctcctgctcccccagcaggctgtatgcctggacagcagggacaacatcaccgcacatggacctccagggcctggctctagtgggcacacagagggcagaggaaagatggatgaatggagcagaaactcatcttcgggatacacacagatgaccccactgcctgtggtccccaactcacccctaggaagccatctttgctcttggtcatggtctccgggagcagaggctggaatcgggcttctatggtgagcgtctcctcgctagggtcagggggcaactcctcctcctcgcagctggccgcgggagttgaccctatgagacacagacatcggagaggcactgcccttatgctacagggctcacctctccctcatcatccacactagctggtgattaacggagccaggcagggggtgggggtagctggggtgttaacagtcaccaaagtaacaaccagtgtatcgcattttagtttcaggatagcccagggaggcagataataacattaccaactccatttgacaaatgagaaagtgttcagagaggtaaagtcacttccccaggtcacatagctagatggtgggggaatcgggattgaaacccaggcctgtttactcgaaacccatgaccaaccacgacccttttctaggtcttctgggactgagaggaactcagtcaagggaaccggagtaatgaatgaagcaagaaacagaaacaggctctttggtgtcatagggagagcactggtttgagagtgaggagacccactttcccctgctttttttttttttgcggcgggggggggggggcggggggggcattgccccagctgtaggaggggctggactggcagtgtggctggatttgatttcttggatcttttcctgctcagagatctggcaagtctataaccttcccagtatagaaggattcattttgaaaggctaagggacaaatgacgcctatttcaaaaggggtgagtaatagtcaccagtaacaaagtgtagccagcggagggcgggggtgggtcttgccctgtctgccctctcagggcagggtagtggtacagagatgatgcctggcatttgctgactgactggctagcaggctgaatgatgcattaaagcagttctcaaccagaagtcctcaaaatcacccaggatgcctttaaactacagatgctcacaacccacctcagacctactgaatgagaatctgcaggggtgagagtctggaatctgcccttttaatgagcactccctgctgctcctgatccaaatccctattctgaagaatcacttatttctgtatttgtaagtcaatgaggtaaaactttccaaaacgcaatctagaaacccaagaagaagggagcaacaggaatatgcagggttattagtaagccttgcttattcaattattttactgatatcacagataaatattaataataatgattcccaaggcagctcatgcctgtaatcccagcactttgggaagccgaagcaggcggatcacctgaggttaggagtttgagaccagcttggccaacatgatgaaaccccgtctctactaaaaatgccaaaattagctgggcatggtggtgcacccctgtaatcccagcccagctactctggaggctgagacaggagaattgcttgaacctgggaggcagaggttgcagtgagccgagcactccagcctgggtgacagagcaagactccatctcaaaaaaaaaaacaaaaaaacaaaaaaaacaaaaaccaataataatgatgatgcccccaccacctagctgtatgatctggggaagggacttcacctctctgagcctttgctttctcatttgtcaaatggagttggtaataatgttattaattataatactactactcagcattttacagccctttggctttttaataaaaagttttatttcctgacttatgagtaacatttgcccattataggtaatttgtaaaaattttaagggataaggcagaaaattaaacactctcataactctaccaaatagaactagttggctctatttcctgcttggatttgattccccctgccctttgatttctcaatacttggtccatttttgcattcacagcctagaggtaatgggggaattcttttaccctgatggagaaaaagatttctgtgcaaaaaattaaaagtgcacctcaagctttgctaacatgtcattatgagagaactctcactctggccacaaaaaaggacaaagaggtagctgtgcaaatgcgcagaagtgtatgcaaaacaagaagtacaggcaaggccacaaggggacgacctgtttatctgcccatctgctttcatgacagaactgcctgccactgagagacattgatacacatccactccagctcattagcatttttcatccaaccttcctcctctagcagtgatcacaggtcaccgggccagcacggaaccaacctacacaatacacccctgaaaaacagcaggctagtgacagcgctttgaagcttatgcacccgaaacagccagcatgtctctcttgcctttcccatcaatgactgacttacaccaggcaatctgggtaataagtaggtgtccaagatcctaagttcaagaaacgtcacaagaagttggaagaaaatgggcacagaggttagggtggtggtggggcagcgagagaagcgttttataattcattagaatgtttcagcccctcatctttaaccaaataaataaataaataatcactgactgcactaggcaaaaatgatagcaagaatggaataggaggccgggcacagtggctcacgcctgtaatcccagcactttgggaggctgaggcgggcagatctcttgaggtcaggagttcgagaccagcctagctaacaaggcaaaaccccgtctctactaaaaatacaaaatcagcccggcatggtggtaggtgcctgtaatcccagctcctgggaaggctgaggcaggggaattgcttgaaccagggaggcagaagctgcagtgagctgagattatgtcactgcactccagtctaggtgacagaggaagactccatctcaacaacaacaacaacaaagaatggaatagaaatctgaaagcacctaagcaaagtttcagatttagtaatgatagttatagctcctggctgggtgcggtggttcacacctgtaattccagcactttgggaggccaaggtaagaggatcgtttgagcccaggaatttgagaccagcctaggcaacgtagtgagactgcatctctacaaaaatagaaaaatcagctgggcgtggtagcacatgcctgtggtcccacttactcaggaggctgaggcaggaggatcaattgagccagggaagttgaggctgcagtgagctgtgactgcaccactgcactccagtctgggtgacagaacaagaccctgtctcaaaaaaaaaaaaaaagttatagctgctgtctattggaaatctactgcatattcgtcactgtgcatttcttttctctactgaaacctgtgagctggtgcaggaccctgaagccagatggccccagttctagccctggctccgcacctttctagcttgggaaactggggagcctgcctgtgccttagtctctcagactattaaacatggggatcatgacagtgtccatctcccagggctactgtgaggtttaaagagagaacccacatgaaatacttaaatacctggcacggaggaggtggccaaggaatggtttttttgtttttttggttttgctttgtttgtttgttttgagacagggtctcactctgtcgcccaggctggagtgcagtggtgtgatgtcaactcactgcaacctctgcctcatggcctctagtgatcctcccacctcagcctcccaagtagctgggactacaggtgtgcaccaccacacccggctaatttttgtatttttgtagggatggggttttgccatgttgaccaggctggtcttgaactcctgggctcaagcgatccttccatctcccaaagtgttgggattacaggcgtgagctacctcgcagaccaaagaatgttagctggtattattgctcacaagtctgagaaaaacaggctcaggggttgctggagcagctcgcccaagccaccagctacaaagtgtcagagctgggaggagtccagggcctctgagatcccacgagcttccctccactccagacggccgctcctgctcagtgaagacaccgttggccaaggcgccctcctccccagccgccagtctctcctggtacctgttagcttctcagcaatgggtttgaactcctcagggctgatgtacatatccccgtcagtgtccaaggaggaaaagagaaaaaggccatctgtccccagggtcttcagcgccagttcctgcttgggaggagagactgggctgggcaccatttggcggcctggtctcctggtccccaacaggcagttgcttccgcatggagccccttctcccaccatcttcctgagctctcccagtgcctcccggtccatctgtgcaaatgttgcctctgaactgccccagagcctccagtccctcctggtccctgctcatccactgtctggtccgactgccccctcccagtttgtccccactccgccttccgcctggccctggctgcttggccctgttcctcctgcaccttctgtcctctcctgtgtcccctcctcactgtcccagggctccccagtaaccctttaagactctgcgggaaccagcttcactgtgtccaggtcacccctctggatagagacccctccagtctgtcccagccccacactggcctccgttcgccttccccccatcagcccggccccaggcaccccccacccgcctcccgtgtcccctccttcccgtgctccctcccgtccagtccccctccgccctccgcctcccccgactcgtccatgcccatgtcccccctgctgccgaggctgggtccttcagtccccgctcccgcgctcccgccccagccagctcgggcccggacctgccgcgcggccgcctgggcctcggcgtggcgggcgcagacccggacggcggcggcagcggcggcggccagcagggctccgagcagcgccagggaacgggcgcggcggcgcggtggcgcgggaggctgcgcggcggggccggggctgggcggcccgcgttggcccggccgggcccggcccatggctgcggctggcggcggctgccggcggcccgggaagcgaaagagcggggcggggccgggggcggggcggccggggcggggaggggcggggcggccgcaggggctgggcggggggtcgctggttcccggcttcgcagcccggccagagcccggggcggggtcagctacaccggaacgccaagaggggctgatcgcgtctatgcggtcgggtccgtagtcccggccaccccagcctccccaggccgcttcctgcctctccgcgccccttcccgtgcttccgttcccaaagctaagccaggcctctgcggcccacttgcctggcccagcccagagagcgattccagactggggactgggacaaagaaggggctggggagaagccacacaccctgtgctttcctggagaaggggcgtcgggggcctctgaggcctcgtgtcctcctctgctggcagccgggcacgaggccagagactgctgaggggcatccgtccatccttatcccaccagttttctaaaagttcctctgtcatctagagcaagacaaattaaaaagaaagcccagcccctgttcccctcatgtgcagttggggggccacctccgcagatgcatgggttatggggattggccttgttccaggcacagcaggtgcagctctgaacctgcacttccctgggcccaaatttcctcatctccaccaaggagttaaaagagccccccaacccccaccctccgggctctggtctggtgaggggaaggcgaggctccagcccctcagcagctggagctaccagaggccctggcttttctggagaacagcatgcggcatgcttggaggagggccttggaaataggggtgggtggtgttgaggacatattttcatgcctgtcaatccccaggaccttggttccttggggctctcttccattctttcaaagcccccagttaccatggggtggctctagatgtctctacctgcattttctcaggcgagggtggcagctgcagaagcctctagacaagaattctgagcccagaggtgagcagtgcctgcctttgcagagccccaccaacccccccagcgcaggggcacctgtcaggcctgagggatccaaaggatgctgagctctgcccatgtgctggacttcaggtggggtgatttacacattctctcactctgttctcaagccaccttgtgaggtagagactgcttccctggttttcaaatgaagaagcctgacctctggcacccaggtctatgggtccaaatctcctgccatcctgcctcccaggcttcccacgggatgacccggtcgactgagttgggggtggggtcctgcctccactgcccatcctgttcttctttggtggccagccatggcagcaccaggtgaggccttcccagagcccacacagggcgtggcacatcgtgggcactcctcagtgtctgtcagatgaatgactcccagggaccttccagagttgtgggcccacccaacccttgccctgtgctctggccccagtgtccttagagggacccactgagagcctgacatctggcgttggcttctgaaggcttccaactgtgccactttcaactcattattgctactgtttggggacaccctgtgtacgatacatgatactagaaaaccaaattctattctattggaagcaaaactagtagagcacaaagcaggttaggaggggaagattgatgagctaaggcttctggaaaataaacaaaggaagttttctttcccagataacttttatttattacacttgctttttcttaaagatacagataccccactggtctctgctgcccagtgctgaagaaatgggtttctggggcttgcgggacttgggggatgattctagaagctcgggaaggcgcacagtgggggtgggttaatgacaatcaggtcagatcagtgtgcctctgtgaaaaggatcaatcttgggcccagctctgggagatgtcagctctgggaggtgtcagctctgggactggcagtggagcagggctggtttcccactggagggcgcccttcccagaagggcttgtcccaaaccaagatccccggcagggcaaggccgtgagagatagggcctagtgggtggttctggctggggcagccctgcaggatctctttggcaccttgctattgcctcccagtgggcaagggtgacacttgggaactggcagccaatgggaaccacagcaaggtgagtgacgcactggccacgtccatgagggtctcggaggttagtgggcactcgctcattcatccttccaacacatgtattgaagggctactatgccgtgtcctggcgattgggtgtccatcagaaaacaaaacagtctctgctcttccagatgagtcaatggatactgcaaccctcctctcgaggggtaagtgctctgagaggggtgtgcacagaggagggtccccctgactatcaggagggctcagaagaggcttcccagagcagaggtctggccagaccttgacttcaggagctcaccaggcatagcacccaggaagatcattccagagggtgggaacagcagaggtgaaggcccagtgatgtgaaactcgatggagtatccgtagcgtctcgagaatatagtccagtggatttgagcagagggacccgggggggaagtgtgaagagggaggaggaggaggcaggaaggttgggctggcacgctggccagcttgtgaaaagcctggactttaccactgagacaatgtggaggcatcagaagagagggacattcagccactgcagcacccttcagactccctactgggtcccagcttctgcctgggggcacccacacccacctccctgcgcagagggtgttggtgtaagcactccaggccactccatccacccatgagaagaggagggagcctgacctgcctgcagccacatttaagtaggggcagggtcactgcctcgaatcctggtgtctctctctctctcctacacacacacacacccctgatgtgtgtgtgtctctctctctttctctctcctacacacacacacacacgcgcgcacacacacgcgcgcacacacacacgcacacgcgcgcgcgcgcacacacacacacacacacatccctgcctgcctcctagtagcatcctctcttctgcttcctgtctctttggggtaaactcaccaggaaaggccttcttcccgcagggggcgctgctgccctccagggaatcaaatcaaattaggattttccattccagtttcaccggcgacagtgagccaggaagagggccatttggctttgttttttgtgtttcttctcttcatctgggaccctagagaggcaagtgattttccccaaacccaaccctaacatcttggcagccaataataggaccaacatttgagaacaaaggatcacttgggggaaacaggtgccactgcaggagttgcttaagcatgcccggaccacgtgggcctctccgcaaactaaatacctgctgtgtgccagggactgttctcagccctgggaacacagtattatagaagacgggcaaggcacttcctctgtgggggctgaatattctactcggaggaaggaaatgacagacacacaaggtaatttcagagaaaggtaagtgtgaaggagtgagacagggcactgtggcacagtgccacaggcaggcatcagcaccgtagctgggaggtgacacatacactgcgcctggaacgggaagaagcagccagctatgagaagaatcgaggaaggagcgtcccaggcacggagaagaggggagagccggtgcaaaggcctggggtggaaacaagcttggtatgtccaggagacacacagaaggcagagtgagttatgggaagagaaaagcttggtgacagaggctgggacaggacgtcggaatcttgcaggcctcggcaacaaacttcattcaatttatttattgagacagggtctcactctgtcccccaggctgcagtgcagtggcacgatctcagttcactgcaacgttgaactcctgggctcaaagcatccttccaccccagactatcaagtagctgggaccacaggtgtgagtcacggcacttggtcaaacttcattctagatatgatgtgaaaccattataaggtgttaagcagggtggtgacaatgtgtgacttggttttttgttagtttgtttgtttttgagatggaatcttgctcttgtcgctcaggctggagtgtagtggcgcgatctaggctcactgaaacctccgcctcccggattcaagcaattctcctgcctcagcctccagagtagctgggattacaggtgccggccaccgagcctggctactttttgtatttttagtagagacagggtttcaccatattggccaagctgggctcaaactcctgacctcaagtgatccgcctacctcggcctcccaaagtgctgggattacaggagtgagccaccgcactcggctggtgacttgttttttaaaagacctttctcatagcccagatgcagaaacaacccaaatttccagcaatgaatggataaacaatgcggtgtatccatttgataagtattagtgggcaataataaaccttagcaactttaagctgggtggaaaaagccaaacacaaagaccacggcttgtgtgattcattcagtgaaatgtccagaatccacagatccagagagacagaaactaaattagcagttgcctggggctatagtgggagaccgggaggagggggctggggagtaactgctaatgggtacaaagtttcttctggggtgataaaatgttctaaaattagattataatgatgcttgcacaattctgtgatatactaaaaaaacatgaattgtccatctttgaagtgggtggattttatggcatgtaaatgatatcccagtaaagcctcttggttttgatgtttgtttaaagatctttctggtttctgggtagagaatagagttaggggatggacagaggaaggagggagacaggaggctaatgcagtcgcccagacataagatggcagggattgggcaggcgtggacaagatatatgagtgtagcagagccacagacaggatttgcggatgggtcagaagtggacggcaagaggaaagaccagcatcagccatgggttgagcttgggtagctggtggcaccatcctgagatgaggcaccctggagggaccccggctggggagaaggcttggtccagtctgccaggttaagatgcctgagagctggctgggcgtggtggctcacgcctataatcccagcactttgggatgctggggtgggcggatcatgaggtcaggaggtcgagaccatcctggccaacatggtgaaaccccatctttactaaaaatacaaaaaattagctgggcgtggtggcgcacgcctgtagtcccagctactcgggaggctgaggcaggagaatcgcttgaacctggaaggctgaggttgcagtgagccaagatcacaccactgcactccagcctggtgatagagggagactccagctcaaaaaaaaaaaaaaagatgcctgagagtcaccctcacggaggtgtcaaggaggcagttgtgtgtgtatgactatggggctatgaacggtagggaaggggggcgtggattataaatctgggagttgccagtctaaaaatggcacttaaagccacaagattcaatgagatcattgaagagagagaagagaagccgcctttggcctatgtggccacagatgccgccgtgtcttggaatgttgagtggctttggctggatttacaggcatggagctgtggctgtgattagccaaaaaatagattaacgttagaggtcatgacaggcttggcttggctctcgtactgtccaggctgggagagagatttgtttcccggggtcagtaaatgcccccgggactttgccagatggacagatttagtctcagcatcacgagtgcagaggtcctggttacccagcctggctgcccactagtcacctggggcctttgaaggagaccaatgcttggggccaacccccagttggttgggggaaagagggacatttttaccagctctccagtgattttgagggagaaaatgtaaagacggccaagttccacacacaagccacaaaaaagagtttgacattcggggcctttccaacggtgagtgtcaggcacaggcagatggtaccggatgatctggcctgaattctgttccacttgtcttgtgtgttttgaactgggtccagggccaaggagggaaccgtgctggggggtcagccaccctggtctgctcaggactgacactgatggagcaccgaggatgtgggatattcggtcctacaagcaagaaagccctaactgggatgagctagtcacccaaacaagggagaggcatagctcagcttgcatctgagaggctttatttcatcatctctgatcttggttgtgcacttcagaggttttttttttttttaccacaaatgggtacaagagggcttcataatgaccagacaagaaagtgtgagcatccttattagacaggagctaagtggttataagttgtatcatataaattaagacagaaaatgcagaggatttttttttttttttgagacaaggtctcactgtcaccctggctggagtacagtggtgcaacttcagctcactgcaatctctgcctcccaggctcaactgatcctcttacctctgcctcctgggctcaagagagcctcccacctcagcctcccgagtagctgggattacaggcgcctgccaccacacccggctaatttttgtatgtttagtagagatggggtttcaccatgttggccaggctggtctctaactcctgacctcaggtgatccgcccacctcggcctccgaaagtgctgggattatggttgtgagccactatacccagcctattttattttgagatggggtctcactctgttgccctggctgcagtgctatggcatgatcatagctcactgcagccttgaactcctggcctcaagccagcctcccgccttgacctcccaaagtgctgggattacaggtgtgagccactatacccagcctcagtggaatgtttataatgcaaaaaaccatgaaaagaatgaaatgtctgtgcctgaaattaggtgatggtgaaagaggtccacatagggtttgctctggggatggcaggtattgactagaagcagcacatgcaagccttctgggtgctggaatagtcttgatcttgactggggaggtggtcatatgagcgtgcatataggtcaacattccttgagctggtcatttaagaatagtgcgttttaggctgggtgcaatggctcacgcctgtaatcccgacactttgggaggctgaggcgggtggatcacctgaggtcaggagttcaagaacaacctggctaacatggtgaaaccccgtttctaccaaaaatacaaaaattagccgggtgtggtcctgtagtcccagctactcgggaggctgaagcatgagaatcgcttaaacctgggaggcggaatttgcagtgagctgagattgcgccattgcacgccagcctgggcgacagagtgacatcgtgtctcaaaaaaaaaaaaaaaaaaaaaagaatagtgcattttacacattactgtatctacattatatctcaaaaaaaatttttttttaaagtttcacttaaaaactcaaggagaaataggactggtttaaaacactagagccacggaaaattaaagcacaacaaaggcttaacaccggagccatggaaaacagtagtattttattttattattttattttatattttattttatttgagacagggtctcactctgttgcccaggctgggcttgctagggcacagtcatagctcactgcagccttggactcctggcctcaagtgaactgccttgaaacaccggtttgaaacactggagctttggaaaattacagcatgatgaaggcagacatgctgactgggctggaggaaaggagtgatttctcaggagacagctgggacacgtggacacagatgaaagggaagaggaggcagatagttcctgactgctccaaagataggctaaggggatcgggagatattagggatccaaatggctccatgacccctgggaggaccttgagagctatagttggtggcaccagtcaaggctgtggggtggtcccttggtgatcaggtgagctgtggacagggaaggtgtccagaccacatggtgatcataggtggggaaccgtgtggagtcaggacccttcaggaagcacacggagaatgacacagcagaaggtgacccagccaggcagacttagttagaacctgggcaggtgcggagcactcagtgtcctgcttggaattacccatggaggaggggtgaaggtagacaatgttatgtttcagcaatatgtgcttttgagagacccagaactccctgacttcatacctgccacaaatcctgaaggtttcaaagaagaatgaaaagaaggccccaggccccacaaacagcctccgttggcgcatgtgcgagagaaggagccgggccaccttgggaagcagcttccattttttaaaagcgcagctgggcccgcttgaaaggagtggtagaaacagagggggcagcagcctggaggcttgatccacggctacagggaagaagggtcagaggaaaggtttctggtgcccttgaagtctcccaggctcctcaaaacccagggagtaaaaaagcagaggagaggtcatgcacacagggcagagggcactcgggcctcgcggcactcctggggcacaggcttcagaagcttccgcttaggaatctgagaatggttttccactgagacagatgtgagaggaaaaagaattcctaggtctctccactcagaagtcggaggaaactttcagaaatgtaaagtgggtcatctcatgtgctgctttaaactcttcctagcttcttgctgctctcagattaaaattaaactctgtcttagtccattttatgtcgctataacagaaaaccacatactggataatttataaagaaaggaatgtatttctagaggctgggaaatccaaggttgggggcctgcatctggcaagggccttcgtgctgcgtccacttgtggccagaggcagaagggcagaagagtgccagagagcaagcaagcaagcaagcaagcaagcgagggctgaatcggctttcagaacaacccacgttaatgcattcacaagggcagagccctcatggtctaattacctcttaacaagccaggttccacttcttaacaccatccaaaggcaattgcatttcgacatgagttttggaggggacattcaaaccacagcaagtacttacctgcccaccaggcactgagggatggaaccccttctgccgacttcctttgaccccccagaccctcccactcgcttactgcctttctgtgtctcagatgcaacaacacttcctgcctctgagcctttgcattcactgttccctctgcctggaatgctctttgcacagcctgtcacaaatgtcagctccccaggggccatccctgacctctccatctctagtgatctccgtgcgaactcaattcctggagaaggtggtccatgcaggtcctaagacctgggaaagccacagttgaaattttgtaacttgtgcaagacgatggaattatccctgaaggtctctctctttgagaagtggcccagaggggtatggcgctggcccacatcttctccgttctctgctgtttacactctgtccttgctctggtccctggatggcgaggacatcgtggatctgggttatctgggttctgggagcatgattttgctaggataactgccagaggaaaaggagtgtgctggtattttctaacctcgggcagctgctgggaatctcatctctattgagtcagactttggaagagcagatgctccagaaatttgggctagggttaattcaacagtggagaaggtgaaagtacgacatcagcaatgtaggagttgacccaggaggtggctagggctgcagagcctgaccctggagcaagcctgttagggcctcagttccctcctctataaatgggggtgccatcttttcctgcccatctcccttccaaagttttgtagacaggatttatcaggtactccatgaagaggaaacactaattggacctcaaacattcctgggcaagctctcggcatcttcctcagccctgggcccctgcccgagcatcccccaccaccagacgggtccctggaagaccttggacagtcaacaaatcttcatcccagtttcccaatttctgtagattcagggctagctaatggcaaaatgcttcctcaatgggaaaagcagaaaacgttcagatttattgctttgagattttggtctgtctcctgggcctggttgatgcggtttcccccaagtttcagagcattttgtttaaaaagaagaatttttgacagcagtgttttgcctcacatttacacaaggttttatagtttacaaagaggttcacatcataacaatcactgctaggatgcactgagttcttacaaggggtggggtggggaggctcgattaacccttgaaagcactttccttttccatggatggaaaagcagaggctcagaggagcttaactaaggggcttgcccaaggccacacagtcctggaaaagggcagggcagagctgaacacaggtccaccagtttcaaatgttgtgcttgtatgaaaccgacatgggttgtcctctcctgtcgcacccctctgcctctcttgccttcagcctacccactgcatgccctgctgcagacagtgagtaagaaaacacaaaacaaaacaaaaccaaactcagaggcttgtgcagaaaacaggctgggatgagtataaaaataaccaggtatgttcaagggaatccttgagtccctaaacaatgtattttctgctaacatgatttatgtagtggtgcaggtgatggaggtctttgcagcaccaacagggtagttgctttctgagttctaattctgcactgtccaaaacagcagccagcagcaatgcatagctctttaaatttaattaaaatgaaatgaaattggccaggcgcggtggctcacgcctgtaatcccagcactttgggaggctgagacgggtaaatcacaaggtcaggagttcaagaccagcctggccaagatgctgaaaccctgtctctactaaaaatacaaaaattagcctggagtggtggcatgcacctgtaatcccagctacttggaaggctgaggcaggagaattgcttgaacccgggtgccagaggttgcagtgagccgagatcaagccactgcactccagcctgggcgacagagcaagacttcgtctcaaaaaaaaaaaaaaaaattagctgggtgtggtggcgcacgcctatagtcccagctactcgggaggctgaggcaggagaattgcttgaactcaggaggcagaggttgcagtgagccgagatcgcgccactgcactccagcctggtgacagaacgagactctggtcaattaaaaaaaaaaaaaaggaaataaaattaaaagtttagttcctccattgcacttgccacattttaagtattccagatccacatggggtgaccctattggacgccactgttctaagccaccagcagcctgctcctgtcttatcctggctgtcctgaagaatggagagctgttgacataggtggcaggcacacacctgttttaaggtaggtcgctttgcagtcaaggtatctatagatgctatcctaatacctgagcccctctactccactctggagcagttacagctccagggatgcaaataaaaggcagaaaccaaggcagtggccaccaactggggtcttgctactcaaagtgtggtccaaggactggcagcatcagcatctcccgggagcttgttagagaaaagcagaatctggctgggcacagtggctcatgcctgccatcctagcactttggaaagctgaggcggaaggatagcctgagcccaggattctgagaccaacctgagaaatgtagcgacaaaaaaaaaattagctggatgtggcggcacacctgtagtttcagctattcaggaggctaggtggaaggactgcttgagccctgcagatggaggttgcagtgagctatgatggccccactgaactccagcctgggtgacagaataagaccctgtgtcaggaaaaaaaaaaaaaaaggcagaatctcaggctccatgccagagccgctgaacatgaacctggattttaacaagctcccaggtgattcctgtgcacgtttgagaagctctgacttaagagacaggctgagcaggaacaaaacagtgctccaaatataggaaaccaaactgatattttcagatacaaaaaatagaatcagcccccttcctccagtagggtgtaattaagcattagtcacagagggccgagcatctttgtgccacatgaccaatgaccatacttccaaggacaggcccccaggggaaacgctgggggaagctggcccattcatctctagcactttctcaaaccacagtggggtcacctcctcaaagcagagggaacggaactgagcatccatcttggatgctgcctttaaatcagattttccatttttgcttttcttcccaatgcatttggctggtctgaccaaatagccagtcatttaaagggaggcacctagaaaaggactgtgccctgctcgtcccccttcccggggccttgaggctctgcagacctcagtgccaggagctgggtgttgatgaagctttctgggaaggagctgacatcacacccttctatgagggaagcaggtgcaaatggtgcttccatcctcagcgagggcgcagatgaggcttaaaatgagcttggcagccacaggctgacccccagctggggaaggagagggctgcttcagggagaggtttgggtgttcagattctgtggcttgcaaagctctctcctaccttcagtgagaggtttgggtgttcagattctgtggcttgcaaagctctctcctaccttcagtgaggatgagtcatcccttaattcctctctcctctcggcctgtcttgagtcgtacttatttttatccgtggaatggagttaagttgccaaaaggatgatatttctccacctgcaagggccctcctggaggatacattttaaaatattcatttttacaatttcctcccagcaatacagcagaggacaggagaggagaggtagacagccgcacgggcctggcgggggagcctggggcttggggaactgcaaagtggctttgagacagagagacattctagaagttattctgaggacataattggacaaaagtgaaaaggaggatggttaagtatgctcttcataactctctgtataatactgaagaaatcaaagctaactgtaaacagtcctgctgtttttgcctgtgcagcctgcagatcccttattttggtgatgaatctcatgtttttctctagggaacagcccaacacccattgcacagggtaatcttagggggtctgccaagccaagatgcctggctctgcccttggctggggcgggcatgtgacccaggccaggccacatggaaaggagccacagcaggatctggaaacatttggattcagccctcctgatggtggtgcctagagaggcttccctggttcttgaaggggtccctggccaagtcctctttctagcccttattgaggtttggctgtttactccttcctgagattccataagccaccccatggcatttcagtaaatccctttctgtgcttaagttgacagagttggtttctgtgatttgtaactaaaatcccagatggacacaaacccaaatgcctggcaacaggggcttagatcagcaaagtaggctacagcacacaatggaatactccacaagcacgtacagcgatgagataaacatgtatttgttgacatggaaagaggttcacaatgtacagttaagtgcaaaagcagattataagaaaacagtgtgcatagtaggataccacggtggcaaaatctatattctatatattcatagaaaaaggcctagaagaaaatataacagtattcaccccagagagtgggatggccaatgagtcttctttctgcttctattttctaatctttctacaatgtttgtgtagtcagttttcctggtttgcttttttttttttttttttttgagcacaggtgggtcatgggagtcacgctctcatgctgcctgtcaagagcatggtacttgctacaggggctactccccagcagctctgcttaagaagattctgggaatgtcttgagtctccagaacaaggaacaagcacttcctgtgcccagggaaccagcagcttcccacttcttctcacagcaaccttgtggggttgaggttttctgtctgcttgatggaaaagaagagcccagagaggggaggtacctgcctaagttcacacagcagggatttaaagccgggtcacctggcccagagccccgggggctattaaagcttatgaacagagcaagcagctgagcccagggaagggctcaacattctcccgtgatttccgctgtgttgacaagctgcaaatgtgccaggaaaggactgggtgtggtggctcatgcctgtaatccccgcactttgggaggctgaggtgggcggatcacctgagctcaggagttcaagaccagcctaggcaacatggcaaaacctcgtctttactaaaaatacaaaaaattagccgggtgtggtgacgcaccctgctactggggaagctgaggcaggagaactgcttgaacccaggaggtggaggttgcagtgagccaagattgcaccactgcactccagcctgggcgactgaacgagactctgggtctcaaaaaaaaaaaagggtcaggggaggaagagctgtcacttcagtgttaggacctgagctccttgctctgcacaacagccccagtgtttcaggccccctcccagggagggcatcagggagggtgggaaagggggctgggttatgggaagttcattcttctgccagatagtctttcggctgctcctttttatcttctgggtcttggcttgaaggtcacctgcccagagaggccctccctgaccccgtagggtaggtcctcagctgtctatctatctcctttgtagcatttcctatgacctgcagtcacttcacttacttgtcagtttcccttaccatcgctttctcccctcttgaccccttgactgcagggcttatgactgtctcactctcagcggtgtccctggcctctagcccagtgtctggtccgttgcaggcactcaccaagcatctgctgaatgatggaacagacggacactcaactggggtggccaggagacggcaggggcgagactctcctttgccttttttgggctgtgtgacctcaggcaagttgctgctcctccctgggcctcttcccaatctaaacctgagtataaataaacaactgcatctgaagggctggcctcatgcttctcgaatatatcaggaccgatttcaggggaggtaatagaagttggaatcgtttactaaattataccttaaatcaactgctggctgattattatttctgatggtaacattgcaatggtttttctaggagtcactgatgtgcaatgagcccaatcatatttcttattcaataaactcttttattctagtccacagatttttccattacaataataatgaaaatagcactagtaatttgtaacactgaggcccaaagggaaacccctcctcaaattataaggtaaatgacacaaagttgaacatagggtcagtgttgggcaaaaagcatttaaaatatagataacggggtcaagattttgtgtgtgtgcaaacactgggttttgtttttcaggatgacaccattttagaaagtgcatgattttgaaaactatatgtgtaattgtgacaaaactaaactgtagagaaaagacaaaatcaagcaaaaacaaaaaccaagaaaccaaaaggaagcaaatcaaatacaaggggcggatatgcaaacctccggtcctttggccctggaatggcaagtgagtgggcttcatagaaattctctgtagaaaggaatgtgtgggccagtgtggccatggccctggcctgacatcgctgagtctccaagtcttgtctcctcacagaggaaaagaagttgcttgtccgacacatctgctgggggtctgcccgagatggggccttcgttcccaatccctttgagaacagtctcaaatcctgaaaaggcaaggcatccctgcggcggccccagggcggcggcaggagatggggtcagtgtctgccccaggctctgccggagctgtctgagtggttcaccgggagtgggtgggcctcggtgttgaacacccagtcttccagggagagcaagtcatcttcagagaacagaagatagagatacctgtgccccacgcagggcagggaagcaagacacagtctgtcagtggcctggggaagaagggtgggcctgggaacaagtctcagggcctttgtgataggcctatggtcaaggtctggagccttgcaaccccaaaactgtgggcagcagggtgggggtgctagtcctggggaaggaggctgtggctgcagagaaaagccttgagctttggggtcagaaggacttagtttaccctggctctgccatcagccagcttcacctgcccggccctgtatgtgagcccttatggtccagattctctgcaggggtgcctgagggctgctgcagtccagttgactctcacgtgccccgctgctgcccactaagactctatattcagagtacacattggggcactgagaagaacatggggttgtgactctagaactccagcttccaggttgtgggttttttcctcactggaaggaactgatcattctgacccaccctaaagggttaaagcacaaggggcttgctttggggaacagtgaggaagtgggatggccaacttccatggcatgaaatcgaggagggcacagcagccacactgcagaggccacaggagggaaagtcaatgccagcaaccagcactgacatcatcatcgttaaccctatcccattttacacacgaggacgcggttcccagaacggaagcaacctggggagataagcgagaaactgaaggaacctgcggtatcacacggtgcgtccctagggaacttggattctagcccagtctcactctccgagaaagcggcctggcccaaggctcacacctggggtgcagccctctggatcccaagcccttcaccccttttgggctcccgtcctgtgaccacagaacctgactgtggaggggagggactgcggacccctaccctcaacctcccacctgtccatccctaggaagagcccacactgctcactttagtgtctccgctagaaagaagctctgctgcttgttgtcgtggttgggggtgctactgtacacgtcttggatcccagagaaaccggcttctgtccgacagtatttctccaaggcctgaggaaggggaagaggaggaggaaaacagccttaacacgggacaggaaaggcccctcaagacttgtgcatgcctggcaggctggagctagaagaaagcagacagcacccccaccccttggctggggactcctggcatttgtgggaacagaaggtcaaattattctttcggggtttagccacctgtccccaggctggaggggccacactccttccacccacacctctgagagctctggcccgatgggctgcctgtcctgagctcttcacctggtttgaacttagaggaagcttctctttgtgtttcaggggactaggctggtcttacagattcacccacagtggtaggcagaggtgaagagaagccacgggtgatggccatgggctgggatttggggacggacttggtactccagggattctcaggagagatggcccctgggctggaggcaagtgagccaagccattcatctttctatataaatgcatttttttttcttgagacaaggtctcattttgtcgcccaggctggagggcagtggggcgatcagagctcactctgcagcttcaacctctgcagttcgagcaatcctcttgcctcagcccctcaagcagctgggactataggcgtgcgtcaccatgcctggataatttttgtatttttctgtatagatggggttttgccgtgttgcctataggctgataaatacaatttctacccacggagggggtctatggactgggcataggagcacaagacgcttggcctttgaaggccaagaacaatggtcctggggaagcaggtggacttaacagggccagtaaacctgagcatgccctggaccccgtctgagtgcaatgctcggaatgggcacgggggtggtgggggagataggggcagagaaggctcagcatccaccagggaacctgctggaatccccacacctgcctttgacacctcccccaagacagccattaaatttccacctaggtgtggggccggaggctgagggcagggtaggcctcaagggccagtagagactagggtgggggggtccctcaggctgggctgcctgtgggaagaggagggaggtggaggtgagctgcccagcttcgagatcaggaaagcgtctgttgggacagcggtggccgcgtggtgcctgcgtggtgctctaggcagctgcctagcctctgaccctctaagtttgctgaggcctggtcccaggccccaaggatatgggcactcagaaccctcttcacaagtctggcctgtcctgtctcaggacaactttgcccagctggggactcttggctctgtaaccaccaccttgaccctttgcactctgaactgtggtcagaggtcaacgtggcttggccttccactccaggcccaagccagggcacctagcacccagcctgtaaattctcaggggcatctagcaccttgctgcccatccctggggcccactcaccagcaccacctcccagccccactccctgtagatggggttgtgggtctgtcgccacaggtacatgtagctctccaccacctctggccggaggatgtagtagctctcgctcagctgggtggccacggcctctctgccggagttaaaccagaaggcctcaggcccaagtttggtgtctggggaaacagccaagcagagggcccaggtcagacctcccacctcctgcttttcgggatccaggagagatgtcagttgccttgaacccgcggccagggtgatgtcaggtgtgtgtgggtgtggggtgcccctgcctggactgctgtgtaaggctgcaccgggcagatgcacagcttccctcttggcctgggctggacagaacaagaccctcggggactggaaatgtgagcagctttggactctgagagtccaaatgagctactcagcagtctgggtaggtgaaggtttgggcggggttccacaactgtgtactttgaggcaatagctctgcaagaggttagccagacctcagccaagagggtttcgggtttcaacacatctggggaaccgagggttaaacaaaataagtctcccatctgcaggatttatcagatcctttaatatgctaatgtgaaatgaggcttctccttgggaccctttgtcttagaaaactgcttttaacacctcccagaacaaacttcgagagtttgggaacagctgaggtagagatggagggaagattgcccaggaatgcacctactcccacagagggagctgaggaaggagggcctgagggagcctgggttctgtcattgtcactgtttggttttgaggcaatttgctgtcattcttgtcatatggccataattataaccacctctgtagccactatttatgatttcaaaggccgtgctgggtgctttaatacactatttctatccttaaaaaatgtttctttagtaaggtaattgctactatccctctcacgcatgtggaaactgaggatcagagaggctaagtaatttgcccaaggtaacacagcgagttgtggctgagttgggacttgaccctggatgtgtctgatgcctctcctagggcggtgctctttccctcctgggtctaaccctcataggcccaacatgtagggtatgagggccagatccttctccctttaatgcctgtccctcctgtccaggtcacccaagtccccagctccattcctaatgtgagccctcttccctactaccagggttcaaaaccctgagaggccctaggttgcttttactttagaggcaggggttagaggtttgcaggacttcctgctcttccatggagggcttcagggaagaggaattagctagaccctagcctctctaaccttttcaaatggtgtagcggctcctggccatcagaaaacagtcattttgccaagtcgctagtggggtgaaggcaggagccactgctacaggcgtccacaggacaagccgaggctggctagaacaatatgctttattaagcggctgtcttttatggtctgggctgattgtctcagacaaatagcgagccttttattagtcctgagatttcttatttgtttatggccctggcagagcaagctctttgaagagaatggacaaccagttttaaagacccattgcgaatctctgacttcctggaaacagctccaggagaccccattcagctggggcgggcacagacacatcatgatgggcggtcagcaagtgcctgcagtgctgctggccaaaggtggctgccaaggtactttctcatgggaccctgtgcctcactctgagacctgtgtcatgattcccatcgaacagataagaaaacagaggctgcccatctggcctctctaatcttttcaaatggtgtagcggctcctggccatcagaaaacagtcattttgtcaagcgctgcttgagcctgggatttttactgcaaatcttgggtcgtcccctccaaccaacactgggattaccactcagagcggtgggcgtctcctgggaccacacgggggctggggatttttctgaggggtgcagtttgcgcacggggtggaaccaggcatcagaaggcctgggttccagcccaggatcaattcctcatgtgcagtgtgactttggctaagtcacttcccctctctgggctgactccacttctctgtgtagaatgaggagccaggctcaggctctcaaatgtgacctctgattctagcatcggacaattcagtggtgagtggtgggtggggaggaccaagctctcaggctttccggtgatcatgggtcaaagagggcgactaaacaggtgggagcaggaggcggtgaaaccccctctaaggagggtgccgggggaaaggcagaggcacatttgaaagtaggagactcagggtgggacatgtgccgggctcaggaagccgccgtttctgcctccggggctggaggatcctttactctgtgcccctctcaagggaccttggccaagtaatctctgagcctcagtttcctcatctgtgtggtgaggttcagtgatgttgtgtcaagtgcggaagagtaccaggtacatgcaaagcgcttcctgtgtctgtactagtttccctttcattcagggtatggtctcggagcctggagagtacctctctcaaattctacttaacttccaaggggaggcttccctaaggccatgtgctcccttcgctcactgctgccggtctttccagttcttcctggtgtctagcctcagtctctcctgctgccccttccccttgcagggttacctgagcgggcgtatgactcgtgacacgtcttggtgatctgggctgcgagctctcggtagtgggccctcttttcttccttggcatcctcggcgccaagggcgatcatgcccccggagaaacaggccaggtgccccatcttgtggtccagaatcccccctcgccactcggcaatgtaggtcagccccccgggagagacattcagcaagtaggtctctatcgcctgggagcaaggtggggattgggcagggagaaggggcgtgggagggcacagagaagggggggaaaggatggaaaatgaacattttggagacagtagcaagggcagctctgccaagccctccatcccaggcaaaggaggcccattgatctctgctggtcaagatgcctgccagggcacaggaggggctgctattcgctgggaggctcagacacagggcagctccccagggcaagtctcttacacagcctttaaaatcttccatgttttaaaaaacgttaaaaaatattttaaggtgatcctcctcctccattatgtcctctgtttgatcttaaccagaagcccagctggcctgtggatgggcttcaggggtccaggcccttaaaactgtacccaacactttctggtggatgtgcatctttatgggaagagtgtccatctattcttaccagtttctcaaaaagaacctgcagaaaattaagagctgttctctaggagtatcttgtcacacgtttcctcatttaatgcctacagcaagccaggcacctgggctgccgcgccctacacagacaaatgggaggtgtggcagcttgtcccaggccacccagccacaccagcctagaaacaagaccccacaatgtccagagctctgcttcttccactacctgatggccatgccttttggtgggaagggaggtgatgctgttgtaaagactctgggatgtcgggggcgtgagggggtcagactgctctcaccccaggagccctggggaccaaggggagggaggaagctgctcacacagtctcgaggccagactccatgggctggtggggcctggcccatggctggggtcctctggggcccttccaggcctctgcctccactttcacccctccaatctactctccagggggtctctgtactctgcaattaacaaaccggatcatatcatctgcctgcttagaaccttcagtggtttccaagtgcccttatgtgaaaacaccagaggggcctccaagactccacgatctggaccttgagggtggacctgattctatggacatggctctggggcacagactcatcaggttcaaatttcatctccaccagttccacgctgtgtgacactgggcaggttgtatgttctctctgtgcctcagtttcctaacgtgtaaactggggataagagcattaactgcctcatagggttgtgagaattaaatgagatatgcctgcaggacttggcctatttcccagcacagagcgagtccccactaattactgacccctatgattccactctagtctgtctcctgcccctccctcctcacaccctacctcacctacactggccttttttcactcaggtaccctcctggcttacaatatctcggcagccatgtaatatttccttggtgtcagcgctgtgctaggtactggggctacaggtgtgctggagaggagcctggactctgcctcagggagctcacccattagtgcagagaattcccaacaaaaccaaatatatatgagaggtgcaattcgttttgttttgagacacagtcttactctgtcacccaggctgaagtgcagtggcatgatcttggctcactgcaacctccgcctcccaagtttaaaccattctcgtgcctcagcctcccaagtagctgggtaattataggcgtgtgccaccacccccggctaatttttgtatttttagtagagatggggtttcaccatgttggccaggctggtcttgaactcctgacctcaggggatccacccacctcggcctcccaaaatgttgggattacaggcgtgagccaccacaactggctgagaggtacaatttgtgatcagcattttgaataaaacaaagtgagaggatgagattaaaaaatgcaggggtatgcggggaggggctggacgcagtggctcacgcctgtaatcccagcactttgggaggctgaggcagatggatcatttgagcccagtagtttgaaaccagcctgggcaacatggcaaaaacccatctctactaaaaatataagaattagccaggcacggtagtgcatacctgtagtcccagctacttgggaggctgaggtgggagaatcacttgaatccaggaggcagaagttgcggtgagccaagattgcaccactgcactccactctgggcaatagagtgagactctgtcataaaaaaacaaacaaacaaaaaacccaagaaaacaaaacaaaacaaaaaaaactggggtgggggcagtgctgtactttgcagagggaggtcagggaaaatctctctgcaaaggtgacattcttgaaagctgcatttttcttcctgcttcggggcttagctggtgctgcgcctccttcctgcatgctccagccctgactctgctaaccccacctcctccagaatgtcacttccttggagagaatgccccaatttaaaccagcactgccactgccattacctatgggcccctgtcacccttctacatggtgccattcctacttggcatctgtttctgttgtatatctgtctctctctcagactctgagtgccgtgtgacagcagaagccaccagcagcagcctccagccagtgcccgacacacagaagatgctcaaggaacactcgctcactcctgggtctgttttttccttttttctctcctgtcagggcccagggctggtgggctggctgcaggacccacactgagtggcagatggaaaagcgctgacaatgtgacatgccagggcacctgctccacatgggggagtgctgaggacacctgcagagcagccgggctgcaggcaggggtctgctctgggcccggcctggctcccgggcagagccatgtccctggcagctgctcggcgtcactaagcctgcggtgcaggggaggagtgtcagggctcagaaacctgggtccgagtcaccagttgtcaacactttggagagaacacagacatctgagggagacctcaggatgctgcgcaccagacctggcacctgcaccttccagaccgcctcccacacattatttccactgggggttggccccaagctaagtaattgcagtcaagaggaaattataaaccactgcctctttgaagacacaactgagacacgcagatgcaaagataaaaaacaaggctttctaaaacaaaacacaagacagtgcaggctggcagacgactggtaaaaggtttaaatcacagcaagcagcggtgcaaggagctaagtggggcacaagaccagggttttttttttttaatgtattaacaaaaatatttgtgctgttccttgtggagcagggctaacccataggcagtgagcccagcgtggcgagaggcctgggtttgaatctcagctctgcgatttaggagctagatgaccttgggcaagttatttcactttaatgaagactcactttgctcatctataaaatgggagtaatgattcctgggttggttgtgaggattaaaggagaggatattcgaagcctggctcagtgcctggcgctggctgttccttcctttgccgcctgcaggagccccatctgagcactcgcgggaggggtttcaggcaagccaggcccctctgtgatttggctgctggtaagtagaggccagcccaatggatctggagtcagacccgtgtttgtgtcctggctctgacacttgttgctatatggaccttgggcctttctgaccctcagtttcgtcatctgtaagatgggggctaaataagatgaggtacttagagcactagctcagaggaggccaaagtgaccaaagctcttcctgttcttcttctttgtctcctgccgtgacactcaggggtgtgcccagtccgatctgtctgaccctccccggtccatcccagctggacactggtctaacctggtggttttctgaccccaggtgcacaacagaattgtggaaggaactttttaaaaatctcagattgggatttattggcctggggtgaggctagacatgggatttttaaagctctccaggtgatcctaaggtgcaggcaggggtgaaggtctttggtgggtggttcccaaccctgactatacacgaaatcccaaggaggtttatgtgtggcccgggcccagtgcccagaggttctgagtcaggggtgcagtctgaacatcaggactttgcagctccctaggtgattttaacatggcaacaaggttgagaaccaccagaaaattcttcaaaaccccaaacttgccagaggcccagccttcacccagggtcaaagatgctccaggctcttcactgggaagatcaaatgcagagagcaaagcctcttctattcaaagttctctcctacaaaatcaagtgctctgagtttccttaaataattcatggccatttcttcccttgatggctcaactactgtgtgccctgagggcagggagcctggctgctcattaactttatgtttactctgcaagggaaggcagaaagggcctctgggcagcacactccggccaccaccagctgcacactaattctctgaccggggctctggtctgagctcagccaaagacaggagtgaacaagactgggacccagactgagatgggactgcagtcccagaagctgcttcatgactgaggtcttgtgccagggagctgagcagggaaaaatcattactgagcctacagtttaaagggtccatggctctagcagtccgtttcaatgtgtgtcttttaagcaccaccattcctggccagattcctgtgatcagagggtagtcacagaccatctatccatccatccaactgcccacacccacccacccatctatctactcacccatccatccttccctccatccatccttccctccattcatcctttcagcattcatgcacccatgcattcattcattcacaaaacagttaccatgggcctgctatgtgccaggcactgttttaggagcagacaagatctctgatcccagataactgatattctatttggggaagatagagaatgagcaagtaaacaaatatgtgcctgtgataattttagaggctgatgaaggtgaagagaataagcctgagtatgtgacaggctgggaatggtagtttcagtggcatttgaattgagagttgactagtgaaagggacccagccattggaatgatattccaggcagaggggacagcaagtgcaaaggccctgaggtgggagtcgcctggggtgtctgaggaagagcaggaagactggtgcccagggcccagagagcacagagcagagaggcaggcgtgaagtcagggtgatcagcagggcccagggaaggcggacccgatgggtaaaggagaggagttggatttattccaggtgctaagggaagccagagaggagagggatgtgcgtgtccagctcttctggcttctgttccccacacagcattcagagggcagggcagaggggaagccagtttagagaaaataaggaggtagtgtagaccaaggtggtggcagagtagatccgacttgctcaacttgctttatggggaaactgaggcccagaacaggcccagtgccttttccttagttgggctccaaagtatctgttgagtggtgggattccttagccctcttcccaatggctcaggctaactgattccctctttcgtcctcgtctctcctctttggaaggactcacctcagccttccagccctcgttcattccacaccccgcggacagaccagcagtggtgccagcttggccagctctgtgctgtgtggccttgggcaagtgccttcccctctctaggccttggtttccatccacacaaagagaaggagcaaaactggatgctccactgaaggaggcctcttccagcttggacatacttctcatgtcacctctactgtccaaggaagacacagctgagggtctcactctggcagccacccttgggggtgccagcccacagtctagctgcactctgggctctgatacatcagccaaagcatagacaccaagcaggtggtggtttctgaatcagactgacggtcacttcccgtgagaccttggataaatgacttcacctcccagagcttaggtttcacatctaacaaagccccagtcttagagcatgtgggagggtcgcagggtgtaaaatgcctggctgggaggggactgtcctgtcaatcttctcaccggttcattgcagggggtgggagcaagtctcggcccatctggccccgctgcccgcagcaccctcgctcggccgtgagagagccgggggctggtgaccagcggcctgtgaataatccagggcttgtcttacctccaaggcttcgtagtacatatttttagcctccatatctgtcttgcccgacatcaaccaggatttgatcaaatattcataaaaactgtccccgagtcctccaactgagacatggtctgtgaagggaaagaggacaagaacattatctccatctgccgccggctctcacggggcagggcctcgcacacccgcctgacctcaggggcccggtgcctgtacgggtaggaagcgggcatctcgccagcagccaccgaacctggaatgggtactgcgaggcagacacagcctgcgacttggaggaaaccagggctgtctagagagcgctcatcctgcacaaaagtgcacgggctcatccggcgggtgctataaatcacctcgccttagcaggctggggacggcagggcctctggttattaactgtaagtgagttgcatttctttacaaagataatctggtggcagggagttcagagatttttattacccagtgacaaacatgataattaatgctgggtagcttcataaaaggccacgggaaagaggaagaaaaaccttaatttagctggccaagccctcaagtagagccactctggaaaaacagagtttaaatttagcaaattgagataaatggagttcaaaggagcgggaaagagaagaattgagttggaacaccccctctctgccctggtggcctctgcctgctggacagtgggccagccaaggagcagggcctcacaggctgtggctgaaccagaggtctctccacccagggccgtcccaggaggaagacgggttgcccgaggaacacttcaccgcagacgcaagacagaaaacacttcgctcccaggctttgaaaattaacaacagggaaacgtaaaggcatttgatagatttaacaaagaacaaaccagttctgtgttctgattcacttaagcagagagacagagagaagaaagaaaatgggggtggactgaaggcggggcggggggaatgggcagagtgttttcaactcctcagcagaagaagggggcagacagagaggggagaaggaaagtgggcggggggaagagggacagaaagagagaacacgtcaacagctaccatttattgtgggccaggagcctcaatgtattatttataacttaatcttcctgggcaccctgcaaggcaggtgctatcggccccatttcccaggtgggagaacggcaactgggcctaaatggctcatccaagaccatcaagctggtgaaaggcagagcctcaccttccacagctgcacaaagtcaaccagagagtgaagacagagatacgtagagaaagaaagacaaatgtgaggaccaagggaccaaaagacagggcaaagacagatgggacccaggaatgggggtcgagaggaggccagccacatggtacactcgcccttccggccccctccagccctgatccagaaataagtcctggcccagcaagtgttccagagcggaccagcatctgcaaaaattggaacagacaagatgaagcatgtgctttggggaggagctggaaagggctggggtgggctggactatgctctggtgtggagggaagagagaagtggcacctctctccttcctaggtgccccacagaagagaagggctgggccaggcctggcatgttgaggaggggcaggtctgttgcagaggaggggccggggaggctggaagtcatgggttgtcctctgctcagagcccttctccagccccgtcatgggcacggcagctacgagcactgtcacctctcggtgtggcgcaccctccccacctcattccccacgcgggggctcaggcattctcacaagcctgctcccggtccctccccatagggtggccacggggattaagtgaaacaaggccaggcaccatctgaagccctcggcggcagcactccccttgggtggtgggccccccttgccatcgggtgcccgccgggtgtgcgatgagtgcctgcgtacgggtctgcctccctcactagctcgtgggctctttgtggggagggattgcatgcgactcccgctctgtgcccagtaactacacggcgcacagagatgcccatggagtgctgagcaggtgaatggaagggaggcctgggctctgccgggatgggaggcttgggctgtgccaggaagggcctggaatgccaagccaaggagtttagccacaatcacgcggtggtggagtgtgtgcgtgacaaggtccaggcttcctctggaggggcacgcaggggagggagccaggtcattagggtccgcggtgttgagatgcagctgcctctcaggggcacttatgtgggcatctcacatgtgaaagtcccactgctttacagcttgtgtgtgtgtgtgtgtgtatgtatgtatggggtgtggggtgagtgtgtatgtgtggtgaatgaatgtgtgtggtgtatgtaggtgtatgggggcgtgtgtgtgtgctgaggggtatgggtgtgtggatgtgtgtgtagggagagtgtgtgtgtgtcaaggagtgtggtgtgtagtgtatgaggggactatgtgtagtgtgtggggtgtgtgcatgaggcgagtgtgtgtaatgtgtggggtgtgtgtgtggaatgtgtgaggggagtgtgtagtgtgtgaagggagtgtgtggtgtgtgtgtgggagggagtgtgggtgataggtgtgtgtgtgggagtgtgggtggtgtgtagtgtgtgtgggagtgtgggtggtgtgtagtgtgtgtgcctgaggggagtgtgtagtgtatgtatatgtgaggggagtgtgtgtagtgtgggggtgtgtgtaggggaagtgtgtgtgtgtagtgtgtaaggggagtgtgtatgtgaggaaagtgtgtgtaatatgtgtgtggtgtgtgtgaggggagtgtgtgtagggagagtgtatgtaatgtgtgtggtgtgtgtgaggggagtgtggatatgtgtgagcgcagtgtgtgtaatgtgtgtatgtgtgaggggagtgtggatgtatgtgaggggactgtgggtgtgtgaggggagtgtatgtagggggagtgtatgtagtgtgtgtgtgttaagggagcgtggatgtatgtgaggggtgtgtgggtctgtgtgtgtgggggagtgtgtaattgtgtgtgtgaggggagtgtggatgtatgtgaggggagtgtgggtgtgtgggtctgtgtgtggggggagtgtatgtaatgtgtgtgtggtgtgtgtgaggggagtgtggatgtatgtgaggggagtgtgggtgtgtgggtctgtgtgggggagtgtgtaatgtgtgtgtgtgaggggagtgtggatgtgtgtgaggggagtgtgtaattgtgtgtggtgtgtttgaggggagtgtggatgtatgtgaggggagtgtgtgtggggggagtgtatgtaatgtgtgtgtgtggtgtgtgtgaggggagtgtggatgtacgtgaagggagtgtgtaatgcgtgtgtgtgaggggagtgtggatgtatgtgatgtgtgtgaggggagtgtggatgtgtgtgaggggagtgtgtgtaatgtgtgtatgtgtgaggggagtgtggatgtatgtgaggggactgtgggtgtgtgaggggagtgtatgtagggggagtgtatgtagtgtgtgtgtgttaagggagcgtggatgtatgtgaggggtgtgtgggtctgtgtgtgggggggagtgtgtgtgtgtgtgaggggagtgtggatgtatgtgaggggagtgtgggtgtgtgggtctgtgtgtgtgggggagtgtatgtaatgtgtgtgtggtgtgtgtgaggggagtgtggatgtatgtgaggggagtgtgggtgtgtgggtctgtgtgggggagtgtgtaatgtgtgtgtatgaggggagtgtgaatgtatgtgaggggagtgtgtggggggagtgtatgtaatgtgtgtgtagtgtgtgtgaggggagtgtggatgtacgtgaggggagtgtgtaatgcgtgtgtgttaggggagtgtggattatgtgaggggagtgtgggtgtgtgggtctgtgtgtgtgaggggagtgtgtaatgtatgtgtgaggggagtgtggatgtatgtaaggagagtgtggctgtgtgggtctgtgtgtggggggagtgtgtaatgtgtgtgtgtgaggggagtgtggatgtatgtgagggtagtgtggtatgtgggtctgtgtgtgtgggtgtgtgtgaggggagtgtgtgtgaggggagtgtgtgtaggagtgtatgtagtatgtaatgtgtgtgtgagggaagtgtggatgtatgtgaggggagtgtgggtgtgtgggtctgtgtgtatggtggagtgtgtaatgtgtgtgtgtctgggagggtgggtggggtggtaggggtgtgtgtgtgtgtgtgtggagtgtggacgtatgtgagggtagtggtgtgtgggtctgtgtgtggggggagtgtgtgaggggagtgtgggtgtgtgaggggagagtaggagtgtatgtagtgtgtaatgtgtgtgtgtgaggggagtgtggatgtgaggggagtgtgggtgtgtgtgtatgggggagtgtgtaatgtgtgtgtgtctgggagggtgggtggggtggtaggggtgtgtgtgtgtgtgtacgagtgtggtcttccccaacactgcgaggcgggctgggagaagcacaggcataggaatgagaagacattgttctgcattagctcagggtgcacccctgcccactctgggccttggtctccccatctgcagatgtgtgaagggggcacgagctggtgtccgtgagccccagagcagaggcaggctctgctgcttcctgaccgtgccaatgcgctcgtcacacctggcagcaggaggctgggccacaagcctggaaatcagccgatctgatgccagggaagctgccaggctgcagctcacactcctgtacctaccaaggaggtctggacttgccacttccctcccacagaagaaagtgtgggattcaggcagtggacaagttactcaggtgccgcaccgaggggctggtgacccctcctcggcagctctcagggggttggcctcagggtggtctcatttgtgttgggcaccatcgggagcctggtggatttatcctggatgtgaactcttagcaataggacgggtcttggggctcccctgttacccctgaagctcggtttccaggaggagtgggaagccaacaagagcagaggcctaggtaactgagatgcagtcctaactcctccttcgtttctctaggctgcaatttctgtggttgcaaatgggctacgcagaacctgcctgtcctgccttcaggcttgttctgaagattcaagaagagaaaatgatgtgcgtgcacttaagcttatgcaaggtggtaatgctatcaagtgctaaaagaatacgtatgcaccaaaaaaaaaaccaacaaaaaaccacaggaaacctgagatgaccccgggcaccaaggccaggggaggaggaaggcagacgtttgggcgagctgggcattataaccccctctgctctttagcaggccgagggctcagattttattaataggaaacaatttcccatatgcgactgactttgcccagacctgcaggccctgactctgcctgagaagaaaattatgcttcccggcaggggctcccttataatttgccaaggtaactgttgagctaggaagcccacacccctttcagcccttttcatgggttctgctgccttgccctggagcagctcagaggggtttatctccttatccagtcaggtctcgcaattaaaaccagcaactgttatcgaactgcctcttcccgtggctataatctgcaattcaagcttcattttctccccgtacttttggattcggcagtgtgttttggttaaaaatactctgcatttctctaagtggtttttacgggaggccacttggggtgaggtcgtccctgggggaaattcctgggttgagttttctgggggaggttcaggttggaaggaaaggcctcagctgcttcgccacagtgtccccaatgctgcctctctaggccccacttgcattgttcccttttgggacaacttggaccatctttggcagatggaagtgaaatctgtttcctgcagcctttgaccattcttcctacgcccctccatggcacacaaagaatgcatctcattctcttctttcattttgcaggacaggaaaccaaggttcaaagagatacagtgaattcccccctaagccacacagtcattagactcatacccactttgcccctgagcccttgctgatgtcacaaaaactgggttggaggcaggggaaagggaagggggtccttgtttgcacacagacagtgggggtgggggctctgccaggtcttgggaggccctagaggcagtgcccacggaacctgtcactgccagttccagctgaccatgaccatgtgaccagggcctgcctctgcttcccagagctgggcttctcaacaggcatgcacattccagaggcctgggggacttgtccacactctcacacctaagcgaccccaaaccccattctgttgcaatgggtagggctgggggcttgtgaatgatgttccatgggtgactggctgttatctggctgagaaacaagtctctgaacagagaccttctgaaaactctgggactgattcttgtaggtctaagatgtatagatgaattcatgacgtcttttgtttttttttgggacggagtcttgctctgtcgcccaggttgaagtgcagtggtgcggtcttggctcactgcaacctccgcctcccgggttcaagcgattctcctgcctcagcctcctgagtagctgggactagagacacgtgccaccacacccagctactttttgtatttttagtagagacagggtttcgccatgttggccaggctggtctagaactcctgacctcgtgatccgcctgcctcggcctcccgtcaggtgcttggcctgaattcatgatttctacactgttgtatggtttttgtttgtttgtttgtttgtttgttttttaaattaaagttggagccaggcgtggtggctcacgcctgtaatcccagcactttgggaggccgaggcggttggatcatttgaggtcaggagttcgagaccagcttggccaacatctctactaaaccccatctctactaaaaatacaaaaaaagtagccagacatggtggcacatgcttgtagtcccagctactcgggtggctgagtcaggagaatcacttgaacctgggaggcagaggttgcagtgagccgagatcgtgccactgcactccggcctgggtgacagagtgagactctgtctcaaaaacaaaaaaacaaaaaaaaattgaagttggaagtggggagcctgatcaaagaggcttggaaaggatgcctggcctctcttggagccacttctagaatggatgactccacctgggaccctcccgagaacctggggtataatgcaggaggctcccgcagcagcataagagatggaaggctgcgccattgatggggccagagaaggtagggtttggaacgcacagggcaggccttcagtaaacagcagccatcacatccggcactgcagcagcagacaaccacaggcaagcccccaggatgcatgggaaggcaggtggtgtccaggagcaccgagcgaatgccttgctggctgcatggctctgacagacacatcctcactcagcccaggggcctggcagggtcttcctaggaagcctgggcaggaacccgctgaataaggggcagtggcgtctctgtactcacgttgcacccagttcccactcactgggctgaggaagttggggtagaggccaaagggcttttcgatcttcctgaggaccttgcggatgttcctgacctgccgagagacggacaccaggtgagccttcatgcttccgaagaagccgactgcacccagcctgctgaggatgggaggcagctggttcagatgcatggaggaaaccttatgaggaggcaggaagggagagctgcccaacggactgcaggctccaacccggggatggtgacgtggccttgccctggtgccacgtgaagggtgtgacagggcctgatccatagcctctccactgactgctctgcctggcacctggacagtctcaaccccagaaccactgcctggccgactcctatcccacccaactctcaacacttcctcattgcttgctgctttaggggtactttgagggattcttttggggagggttttttttttttttttttttttgagacagtctcactctgtcactcaggctggagtgcagtggcacgatcttggctcactgcaacctctgcctcccaggttcaagcaatgttcgtgcctcagcctcctgagtagctgagattacaggcctgtgccaccactcctggctaatttttgtatttttagtagagacagggtttcaccatgtcagccaagctggtctcaaactcctgacctttttttttgagacagtctcaatccatcacccaggctggagtgcggtagcgcaatctcagctcacggcaacctccacctcccgggttcaagtggttctcccgtctcagcctcctcagtagttaagactacaggcatgcaccaccacacctggctaatttttgtatttttagtagagatggggtttcgccatgttggccaggctggtctcgaactcttgacctcaagtgatccaccagcctcggcctcccaaagtgctgggattataggcgtgagtcactgtgcctggcctagggagggttcttttaaaggtggggttaattgacagtagctcgtttgttagctttaggtaaaattgccttgttaataggtcaaaaatggtcaaatccagcaatcccactattgggtatatatacaaaggaaatgacatcagtatgttgaagagattatctatattcctgtgttcactgcagcattattcaaataggcaagatgtggaatcaacctaaatgtccatcaacagatgaatgaataaaaaaaatgtggtatagccaggcatggtggctcacgcctataatcccagcactttgggaggccaagggaggtggatcacttgaggccaggagtttgagaccagccgtggcaacatggtgaaacccccatctctactaaaaatacaaaaattggccaggcgtggtggcacaggcctgtaatcttagctactctggaggtggagacacaagcactgcttgaacctgaaggtagaggttgcagttagcagacatggcgcctttgcactccagcctggactctgtctcaaaaaaaaaaaagaaaagaaaatgtggtatagtataggttaggggtggtggctcactcctgtaatcccagcactttgggaggctgagttgggcagattgtttgagcccaggagtttgagacaagcctgggtaacatggcgaaactgtctctacaaaacaaacaaattagctgggtgtgatggcacattctcatagtcccagctactcaggaggctgaggtgggaggattgtttaagtccaggagattgaggctggagtgagctataatcgtgccactccactttagcctgggcaacagagtgagactctgcctcaaaaaaaaaaaaaaaaagaaaagaaaagaaaagaaagaaaatgtggtatacacaatggaatataattcaaccttaaaaaagaaagaaattctgtcatttgcaacatgtatgaacccagaggatattgtgttaagtgaaataggccagtccagaaagacaaatacttgatctcacttataagtgcaatgtaataaagttgaactcatggaagtggagagtagaggctgggtgcagtggctcacccctgtagtcccagcactttgggaggccgaggcgggcagatcacctgaggtcaggagttcgagaccagcctggccaacatggtgaaatcccgtctctactaaaaatacaaaaattacccaggcatggtggtgggcacctgtaatcccagctactcgggaggctgagacaggagaatcgcttgaaccgggaggtggaggttgcagtgagccgagatagtgccactgcactccaggctgggcgacagagagagactccgtctcaaaaaaaaaaaaaaaaaaaaagaagtagaggtagagagtagaatggtggttaccaagggttggggagatgctgatcaaaggatataaaatttcagttaggaggaataagttcaagagatctatggtataagacatgatgactgtagttcataacaatgtattgtattcttaaaaactgcttagtgctaagtgttgctaacttaagtattcagaatgcttaagtattctggccatttaaaaaacagttaagtatataaggcaatcaaaaaaaggtccaatattggcagtttcatatggcccaatctagtaatatgctattttatctgatgccctggaattatttcgggggagaggcttgggctcctgaataaccccatgtcctaacaggcgtttcagtgttttaataaaaataataataattataaaaagcaataacagttgttatcctttttcagttcctttgagccagatccgttatatacattatctccaaccctcataaccgacaagggattatctcagtgtaacagacaagaaacctgaatctcagagaggtctggtgacttgctgatggccacctggtccttaagtggcagagccaggacgtgaatgaattctgacaacataaaccatacatattcctgcccaacacagggcagcactgggccaacacagatcagggccgtgaccatggagcacagcctgccccagctggagcagaaagaggctgggtttgcaacctttggggctatgaaggtgagaagtggaattcaagagggctttatctatagtgcctgctctccgacagtggttaaatcctactcagcacgtcctagccagcacaagaccccttgggagagaaaggcccttgggaccacactgtctcatgttgatagagttatgtgtgtacggggccgggagtgcgggagagccacctttctgcaggcagaccttcctttccaggtgacagcacttggctttgccacgtcagatttcatatccatttatgttaacgaagtccattacggggacaggaatgtgcttgtacctgcgttactctcgactgtcctggtggtgagcagtgaagcaggccaaattagctcccctggagggtgcgggcgcttctagaatttgggccaatttgttgactgccaataattgcctctgtgggaggcatgattgggggatgaaaatagccagagtatgtaaatgtagaggagacagagatagacggatggactccagagcaaaagcctgcagcctgctctatcaatctggtctggaaggagccagcacatcctgggcttgaatcacggctttatcactgaccagctggaaggcccagggcaagtgacttgacctctctgagtcttagtttcctcctctgtaaatatgggaactccaggaagacccacctcatagggttgttgggaagagtagagccattataaagtgcccagcacatagcgggtgctcaggcaggggtagctattactccagaataaccagggactggagtgagctccctgtcccactccattcggagctggtcagaaccttcctagaggagtctgatttaagagcaatggcaacagggaggttgggggatgggacttggaggtgggaaaggatcagaaaataagagctaccaggaagtgaggttgaactcattccacgaactttcaaatgggggagtttcagggaggcagagtccctctcaatgtaaggaaaacacttttgaaggaagggctgccaggaggacggactgtttaagggtggcggcagtgagctccttgtcagagaaagtaatcaagaagaggctgaacagctcttcttgagcttcttaaggacactcaggtggactcctacattgagtaagtagtggtcccaaaccatgcgtcaaaaagcacatgaatgcatattaaaaatgtagatgcctggccctggagtgaagcccagaaatctgtttcctcacagctgtgccaggtaatgctttgaggctggatggcgacatgatactgggagccatggggtagctgtgggaatctatcatctcccagttgcctgctgggagccgtggcatagaggtgggaatctatcagtcatctcccagctcccatactggtctaagaggcgggcattccagggggaagacaaggctttgggagtggcactgccacagagttctccttggagggctccagaggatgggcagggcttccatctccccaggcagccctcagggagggactgtagctgctggagcctgagtgccatatgagggaggtgtgagcacttcccttctttggatttgaggtcagacctacagcgacacttctagctagtggggactgcccaaggccaggtatgagcagctgtcagggctgattggtgttctaagctccccatgtggccttaaacagcaggaatgaacagtcagggcatctgccatggcagggtattgccatgccagcctgctgatggcatgagctaaacaggcacagggaagaaggcaggcagatctcacatggaaaagctaaatgtctctggaaaggggacttctgcagtgggtggccaattcctgccaatgcaaggtggtgcctagatttcagttgcactttctccagatttcacatatgggtggttgccactgagctcacgcagaccagtgagaaccttttccccggcagaatcttgtctctccttttccctctgtagaatcttattgactctgcgtgctcaccttccctgccacctggcgttggggtataggtagctactatttgctaccttagtggtagcttgggctcccgggctccccactgccctcctgctgatccatgagggaggacccactcgcctctgaaaaccctgtggcagccgcacgctcatccctctgctccgcaggaagaagggtggggaggagacttgccttttcagcgaagacctggttgccagagagttcagtgaggtgtaagaattccaagtgcagggatccaaactccgccaagatgctgctgctgccggctgtggcccagccccagttcccactgaaaagacagaagcagcccccgtcatcccccctttggccaggctggctcctctgctgacagtaacagcagctgctcggtgggggcacctactatgtgacaggcatggaaccaggagctttcgccgtacaatttcagtgaatcctccctggccccatgtcctgatgaggacactgagataaagtgactcactgaagttcatttgaacccaggcctgtctgacttggaatattctttgtctccatcatcaagcaacccctgtaagacttgggagctcgagacctggtacaagagttatgctgaatttacagatgatgtggataatgctatcaggggccacaaagaccccacagaacacccggttgctgtcctctggctgaaggcaccggatggctcacaaccattggtggttctgcatgtggaggataaacagtgctgtgattcgggtgcaaatgggaccaatgaaaagcagagtccccgcctagctctttccctctcccagcacactgtcagtgctgcccaaggacatgaaatggccccggcctggaatttcatggaacctacataggacaggcagggagctctggtgtgaccacacatctggagctgtgtgctttcaaagacaaagaatgcagaggcaggatcctggttaatcctcacagctgccccttttgcaaacgcggtaaacaaggcacaggacagtgatgtcccctgcctgagatcacacagtaatttgaagagctgggacccagagctggctctgatgccagagcctgtgctaactgctgtgcagtttgcttctcttttgatcataggatagggaacaaggacactgcctttccgggagcattcactgaaagtctccctgagatctggagccagaaggtgcaggttcaagtgtcgctcagctggagccctcgggcaaaccacttaatcctcgcatgcctccgtgcctgcatccgtaagacacagtgaaggcgaagcctccatctcctaggttcatgcctcctccttcctgggcttttgtgggaataaagaggaaaagaaggtgcagaatgggggtggttctgggcaagctgccccccccccccgtgcctcagtttcctcatatgtatcatgattatctttcctgtgggatatttaggacaaccaagggcacagggtctgcaggaaggctgtggtggacagaggtggggcagagcagggtggtgtgacctcctcccatttgtagacgctctgaggtgtagttagtgtggagcaggttgagcgactggctctgccaggggcactctgcttccttgctcctggtcacactgccctcccaggaactggcccctgtctgcccctccatctccacggacaggacttaggaaggcaggcgtgggggtgtggaggtcactgtttgccacttgaggggtgctgcttttcctgggatagggctggggatcccctgatactgctgttctctctaaactccattcttggggctggatgtggtttctgggaaagtagggacacttaccagcctcccagcttgtgggaacagacgaagggctcgggttttgagatctttggggtcaagtgacctcaacacatatagagacagccaccttcatcctggcttggggcaggggacagtgggggagggatgggttgcacaggaggggaaacttggctcctgatctgaataaacaaaacaacttccatttattgagccggtatagtgtgccaggcacggggacaagcagtttgcatcactactttcattgaaagcccataacgtaaagcatcattcatacccctatgcaaaggaggaaactgaggctcatacagggaagtgaagtgttcgaggtcagaggcggaagacgacggagacaggattcaaacaggtctgctgggcctcccaccctaagacagccccgcactcacccagagggaaagagagaggtgccaccctgccccatctctgtccctcttcccccaaggctaactgagacttctctctccagcttgtgatctcagtgagtctcagagagcttcctgaataattgattcttcctgcattctcagggaagtttaaggtaggaaaaagccaccagccctccaacagtcttttgttctccttttcccccacatgggcctctccttcctctctcccacccccacatgctcaccctcccaagtgggcttcctgtggtggagatgccctggcagacaagtgagctggcctgggcagaggcaggcaggtggctgggcgcctttcctctcctgcccagcttccaatggtggcttctccgggtcccaacaaagtgacctcgggcaggttggttaacttccctagaactcagtttcctcatcccttaagtgacagcacccacacttcatagttattgtgaggtataaattatgcatgtaagtattgtcatttttatcattatgtaattatgcacatgtaaatgttgttgttactaagtttctgatctgtgccaggtggttctggtggttcttattttaccttcacaaccaacttcggaggtagataccattgtctttatttcatagaatgagggcgaggccacagagtaagtggtagaactgaatccaattccaaatcctaggtgttctgtgccccaaatgcatctgctctgggcagcatcccagagaccaggagggcctctgctcagccctgtgagccaatgggccagcaggaagctctgatctcctctcccagcctttcaagtgcaagtgggcccatagcctgtgttctctctcctggcaggaggggctgctccacaatgccccttcccaccctggctgtagcttctaggcaggtacactcatgagtatggtgtaatcatcaactttggaggtagacagacctggattctaattaagtttgctttgctgctgtgtgacctcaggcaagttacctcacctctctgagcctcagtttctttaccggtaaaatggagtccctgtggttgctgtgaggttgaaaagacaatccatgtcacgtgctcacgtgatgcctgacacacagtgacttctcaccagacgtttgcaattgtgaagacatgtctatttgtgtgtggcgggagcatgcatgtgtaaatggatattcgtttgtgaatgtgtgtgcccatgtatggatgccagcatgtctgtgacaaaggccagcttgtgtatccaggcctttatgatctataagggtggcaggagagtgtctgcatgtgtgtgagagagcatgagtgaaaaagaccagcttggctgcagaggtccttgcacaggccaccgtcactctcccaggcagtccagtgtccctgaaggtcccaggtcaggctggccctgcctcagtctcccaggccggtctgtgcagacaccagtgaggaggtgcagctcacacctgccagggaacggcctctcctcagggtccttcccaccctgacgagtagggcagggctggttacctactctcctgaagggcccacgttcttccccctcctgttggggctgcccacagcgagccctgccgggggcaggtgcaacaacagtagcccagctcctgccaggaggccccctccgaagagcaaactcagtgccacatgggcccatacagccctgccactctctgagccaggcatttttagcaacagactttcttaccaagaacaaaaaggcggatgttgccaggaaatatacatgaatgtacatgcgcacacggcacggacagcaggcaaacagcctaaaagcaaacgcgcttccttaatcacaaatgtcaggattcgtgtcagatcaggtccctgctctgagagacctagggaagggctggggacagaagaggaagggatgcccccaatgatgtcctaccccagacccggggagggggagccagaggacagtgtgtgtgtgtctgggcttcatgacagctggctgtgtctctccaggatcagtgtttatggaagagggatctgagcagagatccaggagtccagctctgaggagtcaaccctggcatcgagactgggatttctccggcccccgagagcacccccctccctggcctatggtgagattccaatgagttcacaccctgagaattcttcccaactacaggggaggacagttgacgaagatgctgaacatgccaagccctctttttgcaagaccagagaaaggtggtgaagcccttgaggccaacacgaaggtgcaacctccccaggacagtgatcggagccatgggtcctccaaccagagcccagggcccctgcctcccctcccagacagctggctgaagcttctgttggtttgagagccctgagatgagaaatcacttcaggagatgggatgggaagtctggtgcagtggaacgtcacagccttcctagcgtcgggattgttggagggcctcgaggatggccccagagagctgcagggtgcccggggatgtggcttctactaagtagctccatgaagcacagggacagtggctagggctccttgagagctaggctcctgtttgggagggctgggatcctgagatctcctagcagcttcagggacctcctcgtgggaggaggatggtgtgatgtgcctgctggctccggaaccccagcgggggaagagagtgtttggggccattgtggaagactctcaagtcaagacagcactgtgggatgtccagaggaactgcccccgcccaccccaggaggctcaggcttatgtggactaaaccctgacacccaggtttggtgacaaacacctgtccagggaagtcgctggcactttcaccgtgccaccgactcactgtggctcccaaggtaggtatggtcctctccctgtgcctcagtttctacatcataaaagaacgggttcaacagaggtggtcccaagggtcccccctcctgcttgcctgcctactgcccctggagcctcctcaccagcaccacccagacaaaacacaaatggtgggcatggtcgcagtaaagccccagtggggaacgcgatggcgccctaccttttgaagctcaccacgccctttgggattcccgtgggggtgttgaacgccggcaggagcttctctcccagcctgatggcctttattcggaacacctgtaaaggaggggatcaaagggcttttgactccaggctgggtgagggaaggtcaaccccagaactgctgcaggcaggatgaaccccccagggctgcaggtctagagtagggggcagtgctgcagtccaccagcccggttcttccaactgctggccacgtggactttggcaaggtacttctgagcctcagcttttgtccataaaataggataatactggccttcttagagagttgttgggagaaatgaaaattagataattgtggcaaagcatctaccacagtgtcaggactctggtggcaaaggctggatgctgcttattgggatggggcagccactgggaagatgagggagaaagcagtgaggtgcggggggtggggggcacctccaagtccagatgaagacctggcagagacgggccggtctccaaaggtcaatgcctgcccacactgcaggactacgataccacaggcagagggcatgggaacaggtggtgccgttcggacagactgtcaagagcactgaactgggagccaagaccaccctcaggttccagagacccttcctcctgggcgacagtttccctcttcctgcgtaagagcagtggacaggcctgtcccgctttgacatcctgatcctgcccactgttcccatttcacaaatggggaatgaagggagagggtgagtggcttatcctcaaccacccacaggacagcaagggagccacagcgaggtcccaggcctcacggcccctgcctgaggctcagaccccttcaaactgttctgagatgtctgattaattcaaaaggacctgtgaccttctgacccagccgtttcctgcctgggaatttattctgaggaaataaataatcgagaatgttgtaaagacttatttattccagcattgtttagaatagtgggaaaaactggaagtgttctaaatatcaaacaataggaaagtggttagataatggctccatgcaacaaaataccatgcagctattgaaatgatgctgtgggccaggcacggtggctcatgcctgtaatcccagcattttgggaggccgaagcaggtggatcacctgaggtcaggagttcgagaccatcctggccaacatggtgaaaccccgtctctaccaaaaatacaaaaaatagccaggtggaggagcggggacagtgggaggaaacctcgctgcaccttggtttcctcatctgcacaacacaatggtggcacgagcctggctgctgcaggggtctttgtggaaatcaaatgagaggatgtagagaaatgaatgtactttataaactgtgaagtgccgtgccaacctcacgtgtgcagctgtggttatacgagttactcccatgggcactggctctcggtaggactggcctacccagcagggggtctccctctgaagcttcatcttaagcaaagaaaggcctcagcccaggaaaagtgtggggtctccttcacccttcattccacaaacctttgtgggaaattttaagaatggaaagacccacccaacaggcacccactgcatgtgagctcaaggactaagggaagagagaggcctcagtctggtgtggctgagccctggtgacaagcagtgacgccatgccaagctgtgacccaggcccatagcacaaaggccacagggtcaggagtcaggcccaacacaaccctcagacactgtgcgacccggagccagttactgcttctaagtctcagtttcctcatctgcaaatcggtgataacatgcacctgatggggccatccgaggctccagtgagaaagtacacgaggtatgcagcatggcatctggctcagggaggtgctcgggggatagatcaggaaggtgtggccagagggcaggggctgcactgactgacacaggagcctgcctgcctgcccaggggttctggccacgttggcccctccttgagtcttttgagctgtttttcaagtcacaggtgctcctgtccacaccccactatctggtctatgttctggaaagctgggttgctggtgccttctaggaagttgaggcctcaaagcaagttctcagaaccacagatgcccttgaagagagaagggaggaagggaagaaaaatgcagggaagatgcatggaaggagaatgatggaaggatggatggaaggagaaaaagacagaagaaaaggtggatggaaggagaatgatggaaggatggatggaaggagaaaaggacagaagaaaagatggatggaaggagaaggaaggaaggaaggaaggaaagacgaatggaaggaagataagacagaaggaaagataaatggaaggaaggatggaaggaaagatgaacgaagggaaggaaggatggaaggaaagatggatggaaggaaggaaggaaagatggatggaaacgggggagggaagggtggaaagatggatagaaggaaggaagaacggaaggaaagatggatggaaggacagaaggaaagatggacggaagggaggaaagatggatggaagagagggaaggaagaagcaatgtgtctcaacagccaccaactctttcctgaattgctcacccccaaaccgccccgagagccctgagctgtgtcctcccctcttccttcctgcaggccatctccactgaccacggccaagtaggaaggctgggcatatgccctgaagaacacagatgctttttctgctccttctgtcattttcctgttctggagttttcaaatgaaattcaggctccgggtggctcaaagccgagggcttccatctacaattatttggggacaaattggtacaagcgctaatctctgctgaggagattatgctcgatggagagaggcctggagcaattggagagataaggtgcccgcctgttgcttcgaaacccttgacttcagcccctggcaccttcacagatgaagggaagcggaaatgactttccagacagcagcagtggaggtgaagagggattattctgtggcttgcccgcctcacctccatggctccttgggtggcggggggcaggcatcattatttgtctctgggtggtcagagcaggggggcgtccagcctcacagcagcctctctgagtaatggggaacagaactgaccaatgactgatgttttggggactcagccaacctcgccaccagatatctgggctgtgcttttaccggagctcgggagcggggatgaagaagcctcccatttctaagagctctgtggttttcaaaattctctcgcagggaggagaagatgggctttggagccatcagccttggggccccaccctttccttcctatcccatgtcctaagaggtctttgagcgaaggggtatcagaaccatccatgctggggaaggaagcgaggcccagggtgggacaaggagctcgctaaggccatgagtaggtgagggtggtgtggagtgagggccaggtttcctgaccgcaccagctctgccttcctgtagcgtgcacttcccagccctccttgtggaaaccaacacagctcacctgggggcaaggcctggcactggcagatacagcagtggctgccccacctcacctgctgcccccgtgagacctggagcaggtgtctggctggtggttggcccaggaggggagggcaaggggtggctgtggaggacaaggcctgggggtcttggtcttggctttatcagtcctaagaaccaacacttgtgaaaagcagcccaggtgcctgctggatgctgagtgggatctgagtggatgatgtatggacccagctgctgctctcagagaacatacaagcacctgtgggagccagttgggctcacctgggcagcagaatggagggatcagagagtaaaggaggaagagccattctcctcttgctgccgctgctttgtgtgatagattcagccctggggggccgtctggggtgggagcaacatgcccatgatgagcaatgactgattaaacagggagcggagggatggtcggagggaaaacaggccctcaggggtggacttgggtggccccaggcccatccctgcccccttaagtcccttttcccatggatggcatgagggggaaggactggatattctccaaagccctttccagcctggacagttcaggggtcatgaaaggccaacccacctcttctcctgtcaggtagaaggctgagaggagtcccccgatgtagcggatgttcacctcaaacaaggatgcttctccgctctgcaggacagaaagaaggagggggacagtggggacacttgtaagatgcaggcccttgagacaggtcaccctggccactgatattcctcccatacctgtccccggctctggtaagccaggcaaggtgacgatggttttcataacaaaagtcaagaggaatctgcacctgcctggcagaactcctgcaatttctagcattccaaataaatgctgggcttggcttccttccccagcccttgctgagatgatggcagcaaagcgatgcctggttgtgctccaaggagcgccagaacctgccgggagagctgctggctggagcttagactgaggggaggtaaatcccactctggccaggctacttcaccttcttggaggagaccccaaggctcagcaggaagacagcaaggccctttcctggttctctgaggaggctgtggggcagacagggaaaggctggggctaagaaggagggagccaggcagccaggcagctacgtattcagtgaacagcagtttcttgggccctcagctcggagcgcacagggcatgcccacacttgccttaatcatttctattttctttcttaagttgggattgcaaatcaggggtgctggagcatcatgccaggaccagatctggggtaaaccccacctgagccactgacctggctttggcacctcagaaaagatgtgcagcctttccctgccccatttcctcagctgcagaagggggctgccaacccctcccgtgcagggtgaacacaggacacaggggagctgcagagagaggcctgcccacagccagacatgcctgttgtcaccctccttgccccagagggttccctcagcatgctttgcacaccatcgtctttattactgagaacagcagtgctcatctgttaacctgggggagctcttcatccacagagcacctgcaaaaccgctccccttcagcttcccagggctcggtgaggtcagtgtggcgagggtcatcattcccatttctcagatgagaaagtcaaggttcgaggtcgagtgaccccaccttgctttcttccagggacatttcctcacctgccccacctgcctgagtgtcccccagctcctaaggcactgtgggcagctgcctgagcccgttctgtatcccaaagagccactgtctacacagggaacgaggcaggcctatggggacactccttccttctccttcctccacctttctccaacccaaagaggggtaatggggggattctcagcttccttggcctcacacaaacaaccagaaatgtcaacaagcctcaaaatcatcctaacaatgacaagggtgacctcactttacatcagtatcagacttcatagtgttataaaatgcggttacaactctccactgtatttaatcctcatgataagcctatgagttaggcattattaatattgttgctgttgtcatcattctcattgtatagttgaggaatctaaggctcagggagggtcaatgacttttccaagagacgcagggcagccaggactccagaggtctctgtctccagggaagctcccctaaagtgttgcgttcccaggctctcccagactctctctccaccctgctctgtgctggcaagctgtctctcaaggaggcagggtcctcgctgctgccaggagctgcaggaaccagccccagacctgtctgcagcaggacctggcactcccggagcccacatggagcctggtgtgtgcttggatgcggcccctcccggtctccactgcttactccccaagtctatgtaaatagcctctctccgtggggagctcccctctgggatgcatgccttgctttagtctgggctgagagatcaacatggtgggctgtggtgttcaaggctgttgtgccatccagacacacgaccattccctctgaaaggctctggtccctgaccaagtgtgcctgcaaggctggagaccaagaggtcccaggcctggccatgggtctgcaaagggatatgcaccacccactccacgcccaccccacccggccatctcaacaggccagtgcagggcgggctcaaggctggagcagctctcagcagatgagccacgtcccccctccacaaagccattccccacttgctgcagctgctgtgtgtgatagatccagccccaggggccgtccagggtggaagcaatgtgccccagatgagcaatgactgaccttgcagggaggggatggatggtcgtggctgtgtcccctccccagggaagatgctagactggggaggatgtccccacctcaaggctgtcttaaggaagggactcagcacagactgcacggcagctccggttccgagactgctgggctgtgcagccgtgggagagaccctcaacatctctgggtctcagagatgacagggtgaagctggctgttgggcctcttctggcccccgcccccctcccccgccgagggcctctgactcaccacgttcaggtggaagctctctcccacccaggccttggcctcctggaactcctccttcagctccatgaggtagagggtatcgagggagtcaatgactgttgccccgctgaggcctcctgcaggcacagagcattgagggtgtgacccagggccatctttctcttttccccaactggacaagccaccgttctcagggcccctccaatgccagcgcaggcttggtggcaaaggctggcctcaggcaccatccgggggactccagtgccaccatcgaaggtgacgccgagacccagagtccccgccatgggctgcttcctcctcaaggcagcaaacagcggccagagagaccgagggcccaggctgagccacttcccagactcggtccactcttctgttggtcagcgggtcaactatcagtgccaatcagccacccacttttctctgctttggcatataaaaatctttgtttgtttgtttttgagacagggtcttactctgtcacccagtctggagtgcaatggtgcgatctcggctcactccaacctctgcctcccaggttcaagcgattctcccacctcagcctcccaagtagctgggaccacaggtgtccaccaccacgcccagataatttttgtatttttagtagagatggggtttcaccatgttggccaggctggtcttgaactcctggcctcaagtgatccacccacttcggcctcccaaagtgctggattacaggcgtgagccgtgagccacctcatccagcctggcatacaaaaatcttttttttttggagacagaatcttgttctgtcgctcagactggagtataatggtgctatctcagctcactgagaccttcatctcctgggttcaagcgattctcgtgcctcagcctcccaagtagctgggattacagatgcatgctaccacactcagctaatttttgtatttttagtagagagtgggtttcaccatgttggccaaggctggtctcgaatgcctggcctcaagtgatctgcctgctttggtctcccaaagtgctggaattacaggcgtgagccactgcacctggcccaaaaatcaaccgtgccaatcctctgtctcttcaagattagttgtagctaatagagggtgaactatggctcaaatataaaataggataccatgcagtcatccacgcaggtgaggtcgacctgtgcctatttacctggggagacatccacgggatctttttctttctttctttctttctttttaagtaaattgcaaataagaaaaaaacacagtataattcttattgtacatcaaagtgtaagtgtacagaactaagtctggtatgacccactgactacctctgagtgccgggattacaggtgccttttgatttcttcagctcatgggttactttcttataaccagaaacttatttccattaaaaaaaaaaaaggaaagaaaatttgggcaaagaaaccaaacaaatacacaaagtaaaaatttgcggccattctcattctagtgcacgaaccagctacgaggcctggcccctaccactgggcatcaggcacctgtcctgggagtaaaggctgagataagtgcaaaatgatagttttccatcccatgaaccagacagaagagtaatgaggaagacaccctctggcacaaccagagccttttgcactcagtgcagaaaactgtgaaggtggaggggagggagaaagggacatgcctgctactatctgaaaggcttcctgaaagaggtggcgcctcccatcaactccttacaactatggagtcattgcaggcagcagtagtttcctttagggaccagagtgtaaccctaagaggagtaattgttccttcagtgtcctccctgcagaggctgaaaacattgagagtcacaggctccaccttccgcagtggaaactctggagcctgttgagcccacttgagtctgcagcgtgggctttgcggcacctcctgaattcagagttagcctctaatctccttaatgagtgcttcctaactgctcacttgtgttgactgaaggcagagaatccttctgaaattcacacacttaaccacctctctaggctgggcaaggtctgaaaaaggatacagcctggaaaaagaatggaagtgagggtgagagggagggagaagttaggaggaagatgaggctggaggtcaaagaatctattaccagaagggagggcccgccaaggagggagcagagggctggaggcacccagccctgtgtcctgggatgggctggaggtcggagaatctattaccagaagggagttcgccaaggagggaggagaaggctggaaggacccagcactgcgtcctgggatggcttccctgtttgggctgaagtgaatttccagaatgtcagcccctcccatgcttaagaagtggtaggaaaacacatcccaaagccaaacagacttgatcctttgccggttcatcccagctgcttcccctgtaggtggcagggctgaacagagttcctggcccgtattcaccctctcgaggtgctcaagcagggaggcactgaggagcccaggcagactgagcaaagcagatcgtgcccagcacacagggtacaggcctggtgtccatgctcctggctgtagctcaggccccttcctgttctatcacaggacctcaaaccagacgtttgaagggcctggaagaatctgggggatcctgctgcccctaccccttcattgtcatagatgaagacctcagagaggggatgggacacactcaagattagaccaaggggggactggcccagccccaggccaagtggaatgtgttttccacgcatcaggcattgcagggccgctcaattctctgtgaaaacagttgcagatctgattgctcaccccaccccacccactctgatcagttacggatcaagagaggcccaggccgtatgtccttcaaggccaggggagaggcagccgcagtgtctgatttctgaatcctgccttgagctccctggtgttttcaccccatgcgcccttcttcctctagatcaggctgggagggcagccaggactcctcgtgaccagctctgccccgtgacgtccctggggacgctctatgaggccagctgagaaagcagcttgctaagagatttgttggcaagttcctgcccctgctctcaggctcctgaatccttctcttggttggtctcccacccccattcccacctggcacatggctgagctgcagtccagcaaggcacttactggaaagcctttcattccagtccagaggctactcagcggtcaggctgggcaggagagaaggccctatcctgaattcaaccctatttgcacctgcagccaccctggggcagctccccaggaggaaagacacactccctgttcagtaaacagaccatgatttatacacaaagagccagcttggacgcttccctagggctgtggctggggcgggctccatgttggtccactttcctgttccagttctgaagccatggggttcaccccttcctgctagtgcagaaggcagtgaggtgtcttagaaataatacaggcccagaaatcagcagccccgcgttcaaatgccgctatgagccagcaacacatctgctctaagcatcaaagttctcatctataaaatgaggttaagaccactggaccagggcactggggagccactgcaggttcctgagccaggataaatacatcacatacacacctggcctagatacatctgataaatacaacctatatgcttggcacagactaagtgcttgataaatcagttcattgaaccgattgttcatcagttctggggtcccttagttcaccttgaaatagcagcctggccagggagtgaggaagggcaacgaggtcagggagaccctcttgatcctttcctttgggagggttcggacctttggctactgaataaagcctttgcaaggcaacctcacacatagctaagaggctggctttggtgtcagggagatgttcaaatcctggcctcttataccctagctgtgcaatagggcaagccattctacctctttgtgcctcgtttccctcatctgcaaaatggcggtgacactaggacctgcctcataaggctcctgggagggttaaatggggtaggttgatggacaagggctggcatgatagtgagtacatgtggccctccttgcccctactggcactgggcagcccctccacaaaaatcttcttgggtcagtgaggccttggggtgcaactacattcccggccctctctctcaccctgcagggcaacgtgagcgtgagattgcagcttgcaaaaacccttggcccaacttaaaggaaaaccgccccacaggtcccatctgtatctgctgccgaggccatcactacctgatctggttgtgtagttgcctccaaaagggtcctcctatctccaagaccccttccctttacctcttattcactctaaagccagatccaacttgggtctctccccaagctcaggaactgccaatggttcctcagtacccatgtaggaaggggtgcaagctcctgcttccataccttggcaagtgtggtcttctctgccaagaaatcttctctgtgcatcttggcatgttcaacactaacatgttcttcaaggtctacctcccaggggcagcctgaactggttccactagctaacctcttcttgccctgagagtgcccacagcactttcttgggcacccaccactacctccctgcactgtggggctttgcctccctaactagactgtgagccccttgaggtcaagggtccccactgcctctctcatacccctccccaccaaccttccagccttgtctccaagcatcccaaaggtcagaaccccccaacccaaatgggccacttgccattccctccttacataccgatacttttatgactcttctacagactctgccagaactgccttttcccatcccaccttctcctgtggaaatctagggcccacctctaatggctcattgcccacaaagccatgcatgcaatctcaccctctgatgtccggcttagagcccttcttctgtgagagggtcttccccagccccaatgtccacattctaggcccctacactgtgcacctccacctccccccattctcatctcatgctaatggactcatgcgtttccctgtccctgtcactttataatagtggggactgtagtctgcatctgtgtcctccccacagtgggacggcaggagggcaggagccaggctggtctccgggtgtcacggatcctggctccttactggatcttggccttcaggctgccattcttcctcttgcttctccttctaccctgggatggcttcttcccagtctcctgtgctggttcctccccatctccagacctctaaagactggggtgccctggggctctgcctttgggcttcctttctgtcctccctcattctcttagtgatttcaaatcttaaaatccatcggccaggcacagtggctcacgcctgtaatcccagcactctgggaggctgaggcaggcggatcatgaggtcaggagtttgagaccagcctggccaacatagtgaaaccctgtctctactaaaagtcacatatccaactctgcatgcatgtctccacttgaaggtctttgggcatcgcatgtttcactgtctgaaagccaatcccatgccttcctccagacctgttccttccagtcttccccatcttgattaacaccaatgtcctcctcccaagagctgtggcccccaacccttgaccctgtctcacaccccctcatccagtcctgcagcaaatcctgctggccgtctctgcgagatttccagacactgcccacatctcaccttctccgtgctactgccctgacccagctacctcctctctcttgcatttattccactggcttcctccccgcccccttggcatctacccttgcccttccctcttccccgatccacccatctgtcctcagcgttgcagccagagagattttttaaaaaattcaagtcagccgggcgcggtggctcacgcctgtaatcccagcactttgggaggccaaggcgggtggatcacgaggtcaggagatcgagaccatcctggctaacacagtgaaaccccgtctctactaaaaatacaaaaaattagccgggcatggtggcgggcgcctatagtcccagctgcttgggaggctgagacaggagaatggcatgaactcgggaggcggagcttgcagtgagccgagatagcgccactgcacttcaacctgggtgacagagcgagactccgtcacaacaacaacgacaacaacaacaacaacaacaacaaaaattcaagtcatatcatgccactcctctgctcgaaaccccccatggctcccatctgactgagagttgaaagccttagtccttcccgtccctggggccctgtgatctgtcctggttccctcactgcctctcctcctccactttggctgcacgctgtcccttcagcctccacttcggcctccaaacctgctccttgcctaggccctggtagctgcgggctactctgctgaaactgttcatgccactcactgtctccttgtcttctctggttttccccagccttcatcaccaggggcatcacgcacggatctgctttcccagccactctgtcttctcctgaggggttggctcctagggagagaactcggttcaccgccaccttccactgcccagaacactttccagcccccacgggggcccgtaagtatttaggaatgaaagaaaggccccctccaactggatggggagggcttcaaggggggctgtggcgcattcacaactcccagtgcctggctacagtctgaccctaggaggcattaaaggtaaggggttcggctgaacaaaacgagcccacagcatgggcgtctgtggtgactacgtccagagcagggttaagtgtctactccaggggctgccaccactagacaaagaccctcccaccaggctgcccagagtgacaacatgtgcccaaagcctcgccctgcacaaagctttctgtgaagagcgtgtcaatctctacaaggaaatgaacctccagctcccagaacctcctccccaggagctgctgagccaggaaccagcctgcctccctggatcacggtctgtatcccaccctgctgactctgccatattaatgatgatgatgtttttatgtgatatcatattagcaaagagaaatggtcaggctggcaacacaaactccaggaagaacatttagaagaaaaaaaatcacccaaggcatagcctattcccacaatatccccagagccacatactaatggctgcatttaatttaatgagacaatgcacagacttttcttaatctgtaaagaaacaacacacacgtttttctcagcatccacagaaacccatgtggctgtgtggcagaccatcttttcaaaggcagctgctgtggtgtatcttatcccacaagaagaacgaagcttttcttgtgacactgacacacctcccatggctcctccccttgaacctgggcagaccattgtgatc

SEQ ID NO: 3575 - DNA, 445 bp, Homo sapiens
ccgtgacaagcccaaccggacggctggagagggcgagaagggcagacgggacatgcagcctcttccgcctgagccccggaaggtgtatgtggctgcggcatcgcggcctcgctatgtctgccattttcaattttcagagtctattgactgtaatcttgctgcttatatgtacctgtgcttatattcgatccttggcacccagcctcctggacagaaataaaactggattgttgggtatattttggaagtgtgccagaattggtgaacggaagagtccttatgttgcagtatgctgtatagtaatggccttcagcatcctcttcatacagtagctggggaaaatgccagaatgtagttgccatcagatttgattgtgaacaaggactgactgcagaaaataatggaaaggatgtttaactcttttatctccgaacattgaatgaga

SEQ ID NO: 3576 - DNA, 401 bp, Homo sapiens
tttttttttttttttaatgaaaaaacaactttattcacagaggctgagagtttgggatagcaaaatatccagtgacagccctttcgctacattttcagtgaatcacagggagcctggatctcagcaatggctcctcctggaagttcttccaatcaaggctggcctgaagtttcccaaagtcttcccactggcctgggtagaacccagtcgtggaagcctggttcagcatggataggagaatgaattttccaaaagtcacctctatgcctgtgaattatccaattactctgccggcctgaaatgtcctttccaacacattgaccaacaggccctctggattcaaagtttgtcatcatttttagacaagtcctggaaactattttaaaagcgatcttaaagac

SEQ ID NO: 3577 - DNA, 446 bp, Homo sapiens
gcggccgccaattttttttttttttttttttttgtgtttatgttttactgttaatatttatttgaatatttaagaatcaaataaaagagactaacccccttcattgttaaggtttggaataccggtgtgtggctgccgtgctgccaggtgtaaacgaacttgtagggagctgatacagccacagcatggaggacaaggagtgaatgttcaggctccccagctttcagagtaaggtggggcctttggtcggtctgctgcttgacagaagaggctggcttcccatcattctggcttggggtccccgggtctgggctgagagcagtgctggagcagagaggtggtgaaatgctgccttttgctgatggaagttgtttatgtaactggcgatcaaaagagtgatttcaagaatcttgggttttgccatggcaaaaagtaatttctctgtt

SEQ ID NO: 3578 - DNA, 245 bp, Homo sapiens
  misc_feature (33)..(33): n is a, c, g, or t
  misc_feature (106)..(106): n is a, c, g, or t
  misc_feature (228)..(228): n is a, c, g, or t
ggctttgatcccacacagtgatcagagattgcnccctcagcgaactaagcaatatgtcctcctgtccatcctgctttgtctcctggcatctggtttggtggttttnttcctgtttccgcattcagtccttgtggatgatgacggcatcaaagtggtgaaagtcacatttaataagcaagactcccttgtaattctcaccatcatggccaccctgaaaatcaggaactncaacttctacacggtgg

SEQ ID NO: 3579 - DNA, 1147 bp, Homo sapiens
cggcggtcggtcagcgcacagggcacggcttcctctgcttctcccaccacttagtctcaacccgggtgtgtttgcactactagagaatgaaatatgactgaggactctcagagaaactttcgttcagtatattatgagaaagtggggtttcgtggagttgaagaaaagaaatcattagaaattctcctaaaagatgaccgtctggatactgagaaactttgtacttttagtcagaggttccctctcccgtccatgtaccgtgcattggtatggaaggtgcttctaggaatcttgcctccacaccacgagtcccatgccaaggtgatgatgtatcgtaaggagcagtacttggatgtccttcatgccctgaaagtcgttcgctttgttagtgatgccacacctcaggctgaagtctatctccgcatgtatcagctggagtctgggaagttacctcgaagtccctcttttccactggagccagatgatgaagtgtttcttgccatagctaaagccatggaggaaatggtggaagatagtgtcgactgttactggatcacccgacgctttgtgaaccaattaaataccaagtaccgggattccttgccccagttgccaaaagcgtttgaacaatacttgaatctggaagatggcagactgctgactcatctgaggatgtgttccgcggcgcccaaacttccttatgatctctggttcaagaggtgctttgcgggatgtttgcctgaatccagtttacagagggtttgggataaagttgtgagtggatcctgtaagatcctagtttttgtagctgtcgaaattttattaacctttaaaataaaagttatggcactgaacagtgcagagaagataacaaagtttctggaaaatattccccaggacagctcagacgcgatcgtgagcaaggccattgacttgtggcacaaacactgtgggaccccggtccattcaagctgaacgcacccgctggttgtggaccgtctgccaggcaccacagtgagcattgtgttcttggcatgtgatctgggaaactgattgaataatacacttttcttgctttggtgctcaaagtggtttttttcccccaataaaattatttaattgaaaaaaaaaaaaaaaaaaaaaaaaa

SEQ ID NO: 3580 - protein, 293 aa, Homo sapiens
MTEDSQRNFRSVYYEKVGFRGVEEKKSLEILLKDDRLDTEKLCTFSQRFPLPSMYRALVWKVLLGILPPHHESHAKVMMYRKEQYLDVLHALKVVRFVSDATPQAEVYLRMYQLESGKLPRSPSFPLEPDDEVFLAIAKAMEEMVEDSVDCYWITRRFVNQLNTKYRDSLPQLPKAFEQYLNLEDGRLLTHLRMCSAAPKLPYDLWFKRCFAGCLPESSLQRVWDKVVSGSCKILVFVAVEILLTFKIKVMALNSAEKITKFLENIPQDSSDAIVSKAIDLWHKHCGTPVHSS

SEQ ID NO: 3581 - DNA, 1893 bp, Homo sapiens
atttaccgccgcgcggagagtgagggcccaagtccgccctgctccgccacttaggccgccccagacgcttccctcggggctgccaccgggtcgggcgcggctgccgcggctagcgggccttccccgcaccggcgcggcccaaccgccaccgaaccttctggaagcggcggctgcctgggcccccacgccgccagaatcgtacgcccgcgcgagctctctgcagccttggcggcctgggaggcggggctcggggtggggccggcgcgggggcggggtcggcgcggggaggccgcgttcgattcgcccccggcgcgcaggccccgcctcaccagccccatcgctccacctctgccctccccctttatggcgcggcccgggctcattcattccgcgccgggcctgccagacacctgcgcccttctgcagccgcccgccgcatccgccgccgcagcccccagcatgtcgggcccagacgtcgagacgccgtccgccatccagatctgccggatcatgcggccagatgatgccaacgtggccggcaatgtccacggggggaccatcctgaagatgatcgaggaggcaggcgccatcatcagcacccggcattgcaacagccagaacggggagcgctgtgtggccgccctggctcgtgtcgagcgcaccgacttcctgtctcccatgtgcatcggtgaggtggcgcatgtcagcgcggagatcacctacacctccaagcactctgtggaggtgcaggtcaacgtgatgtccgaaaacatcctcacaggtgccaaaaagctgaccaataaggccaccctgtggtatgtgcccctgtcgctgaagaatgtggacaaggtcctcgaggtgcctcctgttgtgtattcccggcaggagcaggaggaggagggccggaagcggtatgaagcccagaagctggagcgcatggagaccaagtggaggaacggggacatcgtccagccagtcctcaacccagagccgaacactgtcagctacagccagtccagcttgatccacctggtggggccttcagactgcaccctgcacggctttgtgcacggaggtgtgaccatgaagctcatggatgaggtcgccgggatcgtggctgcacgccactgcaagaccaacatcgtcacagcttccgtggacgccattaattttcatgacaagatcagaaaaggctgcgtcatcaccatctcgggacgcatgaccttcacgagcaataagtccatggagatcgaggtgttggtggacgccgaccctgttgtggacagctctcagaagcgctaccgggccgccagtgccttcttcacctacgtgtcgctgagccaggaaggcaggtcgctgcctgtgccccagctggtgcccgagaccgaggacgagaagaagcgctttgaggaaggcaaagggcggtacctgcagatgaaggcgaagcgacagggccacgcggagcctcagccctagactccctcctcctgccactggtgcctcgagtagccatggcaacgggcccagtgtccagtcacttagaagttccccccttggccaaaaacccaattcacattgagagctggtgttgtctgaagttttcgtatcacagtgttaacctgtactctctcctgcaaacctacacaccaaagctttatttatatcattccagtatcaatgctacacagtgttgtcccgagcgccgggaggcgttgggcagaaaccctcgggaatgcttccgagcacgctgtagggtatgggaagaacccagcaccactaataaagctgctgcttggctggaaaaaaaaaaaaaaaaaaaaaaaaaaaaaaaaaaaaaaaaaaaaaaaaaaaaaaaaaaaaaaaaaaaaaaaaaaaaaaaaaaaaaaaaaaaaa

SEQ ID NO: 3582 - protein, 338 aa, Homo sapiens
MSGPDVETPSAIQICRIMRPDDANVAGNVHGGTILKMIEEAGAIISTRHCNSQNGERCVAALARVERTDFLSPMCIGEVAHVSAEITYTSKHSVEVQVNVMSENILTGAKKLTNKATLWYVPLSLKNVDKVLEVPPVVYSRQEQEEEGRKRYEAQKLERMETKWRNGDIVQPVLNPEPNTVSYSQSSLIHLVGPSDCTLHGFVHGGVTMKLMDEVAGIVAARHCKTNIVTASVDAINFHDKIRKGCVITISGRMTFTSNKSMEIEVLVDADPVVDSSQKRYRAASAFFTYVSLSQEGRSLPVPQLVPETEDEKKRFEEGKGRYLQMKAKRQGHAEPQP

SEQ ID NO: 3583 - DNA, 336 bp, Homo sapiens
ttttttttttttttttttttttttttttttttttttttttttttttcccccttgagcataaatgttttattgccacctcagggctttcaggcagggggggctgttgcatgccagttagagggaagggcctgacttttcacactttaggaaactggggcccatgagcggtaaaaaaatgtcctaaaggcataccgagtaaatagcaaagttgggaccacccttaattgttccctttggcctccccatccaccctccagttgtttttccatggttgggggggggggcaaggggggtccttaataaactgaccttggggccttcccaaacgggtgtttt

SEQ ID NO: 3584 - DNA, 411 bp, Homo sapiens
tttttaatgttgagcagatatgagcagatagtagctctggagtcctcaggtatccagcatgtgttgggaaatgtggatttccctgggtcaatgctcccaccatggccacttgaaggctaccagtatgattttcctgaaaacagatttaagaagagatgtcaccatcagcttcctcaaaccatgcgatcaatcctgaaaatgagtgtcctgtgttgactttgtcctgccaaatagcatgcccacccagaacctcagaatgtgggtttatttagaaatagaatctttgcagatgtaatttagttaagatgaagtcatcctggattaaggtggtctctgatccaatgactggcatccttttacaaagaataaaatttggacacagagcatctcagaaggaagatgacgtaaagg

SEQ ID NO: 3585 - DNA, 580 bp, Homo sapiens
tgcccgacgagtgcccgcgcaccgtgcgcagcggcgacttcgtgcgctaccactacgtggggacgttccccgacggccagaagttcgactccagctatgacagagactccactttcaatgtgtttgtgggaaaaggacagctgatcacagggatggaccaggctcttgttgggatgtgcgtaaacgagagacgtttcgtgaaattcccccaaagcttgcctacggaaatgaaggagtttctggtgtgatcccccccaattcagtgcttcattttgatgtacttctgatggatattaggaattctgaagaccaggttcagattcacacctatttcaagcccccgagttgccctcggaccatccaggtgtctgattttgtgaggtaccactacaacgggacgttcctggacggaactctgtttgattcgagtcacaatcgcatgaaaacatatgacacgtatgtgggaatcggctggctgattcctggaatggataaagggctgctggggatgtgtgtgggtgagaagcgcatcatcaccattcctccttttctggcctatggagaggatggcgatgggaac

SEQ ID NO: 3586 - DNA, 433 bp, Homo sapiens
tttacagctgcattagaaagttaacatgggggcaggggtgggggaaggagtccgagagcctgaggcctgagaacaagacgggaagacattgctggacatttattttatgacgtgcctcatcagcagaacaaagaagggcatggacttatgtttaaaaactgtccagaagtgaccaaagaaattcaccagtgatgcagatgagctcctaataatcatgccatcggagcaggctgtgatagcctggaaatcctgcctgaaaccaaactgcaacatttccaactaagaaatcaagcggtgataaacctcagtatctgaaagggttaaatattgtgcccacgtgactactgttctttctttctgtgaattaatgtgtgtgccagaaaatatttgtgaataaaaaacaattacataatctcattgtcatgaatgtggt

SEQ ID NO: 3587 - DNA, 906 bp, Homo sapiens
gtaaactactagcaagttcttacacagccataaccttacagacccacataaacctctctcatattttttcttttagctcatcttgaatattgtaaagccatacatgtcgtataaaatgcccattcttccaatagatttcttcaaactattaagcaagttaaatgtggaaggaaggagggcctagttatactggaaccggggtttcaggtaatctgtgatgtcttacggtaatcacaaaacaggttactcagaaagaaggaaaagaggagctacgtccacggctagctttttgctcattacaagtctcaccattgtatcaccaagaactcattatgcgtggtgacagattcagaagtaatttctggggaacatatagaaacactatacataacttagaaactagatccaaatatttcaaaagtacatcaactttgatatacaaatagtagtcagaggtggttacaacatagtttgttttgctacagtgcgtctatgtatccatgcgcagttactcgggtagatgcataaataatacaggttcatctttcttctgacaatagcaataataaacgatggaaaacatatatttgtatataacggatcaatgctggtcttaagaatagtgtcatcagaaagccttaaatctgagaggcgacactaacgaggttttgctactcttgtaaataaataccaggaaagtcaccagttttatgattcacatggagggaggtgctcacagcccctcaatattaaacttgcttcatttgtaccatcacttagcaccatcaacttagaagtgtgcaaaaattgtgtaagttaacacatttatcctgcagcctaagtaaggacggaaaggcggctttgacccgcctttgggtctgggggggcatcactggttgatttaaa

SEQ ID NO: 3588 - DNA, 672 bp, Homo sapiens
  misc_feature (438)..(438): n is a, c, g, or t
tttttttttttttttttagaggttaattactttttattattgaattatattgtaaagtctacatctaccacctaatcaggaagaaatgctttgcatttacatcaaggacacatttattctaatggaataaaacagacacacacaaaagaccaagtacatgtttttaaaaaatgactacatgtttcacctggtcctatttttgctatttggaccatacttttaagtgaattgatcttacatacatgttaagtctgatttatctccccacatttttaaacactaaatgaagcttctcacaatttctaattataaacaaaaggctgaaaacagtatgggaaacaaagtttcaaaacaaagaaaagttgagtaaaaggtgccccctctatggctcatctgaaagaaacattttactcagagaggcaaacatttctgatctangagtaagtttccactcactttgcaaggacccactcattctgcagaaagacctacaagtctttctggtctcaattgcaaagtacgtgaaaatgtgtatgaaagatctaaaagctaaatattagaataaggctaattgaaatcaaaattgtgtgctggtctaaatatacatcttcggcttcttcctttttagtaagtatttttatttcaaatgtatttaaaaataacttacatttt

SEQ ID NO: 3589 - DNA, 224 bp, Homo sapiens
tttttttttttttttttttttgggaaagatgaaaaaacatgctttatttgtttattccattggtcagcttctctttaaattctttccacatggacaaattgcttgacaacaaagtttacttagttttctaaacacttgggatcatctctaaaattaaaaaaattaatattaaatgttggaccaaggatttcaaccatgcagtatgttgcttctggggtctgctg

SEQ ID NO: 3590 - DNA, 618 bp, Homo sapiens
ggcacgaggcaggtggggtactcgggaagctggagcgggccggcggtgcagtcacgggggagcgaggcctgctgggcttggcaacgagggactcggcctcggaggcgacccagaccacacagacactgggtcaaggagtaagcagaggataaacaactggaaggagagcaagcacaaagtcatcatggcttcagcgtctgctcgtggaaaccaagataaagatgcccattttccaccaccaagcaagcagagcctgttgttttgtccaaaatcaaaactgcacatccacagagcagagatctcaaagattatgcgagaatgtcaggaagaaagtttctggaagagagctctgcctttttctcttgtaagcatgcttgtcacccagggactagtctaccaaggttatttggcagctaattctagatttggatcattgcccaaagttgcacttgctggtctcttgggatttggccttggaaaggtatcatacataggagtatgccagagtaaattccatttttttgaagatcagctccgtggggctggttttggtccacagcataacaggcactgcctccttacctgtgaggaatgcaaaataaagcatggattaagtga

SEQ ID NO: 3591 - DNA, 367 bp, Homo sapiens
aacttcccaggagctccgagaggcggggaagtggcggtgggacgcaattccccgcgcggagtcgggcagtggcagcgggagaagcggcacgcaggggcgcggcggggccgagcagaggcggtcccctgggaggacggggtctccctcgttgcctttgtagtggagaaggtggacaagtggcagtcggcgtgatccagggaagcggggcggcgcgcgcgagcggtccaggcgagccccgggcggactgggagatgccgctgctacaccgaaagccgtttgtgagacagaagccgcccgcgacctgcgcccgacgaggaagttttctactgtaaagtcaccaacgagatcttccgccactacgatgact

SEQ ID NO: 3592 - DNA, 384 bp, Homo sapiens
gaacactgttttccagacatgacttgggacatcaaatataagaccgtccgctggagctttgtggaatctttagagccctctcatgttgttcaagttcgctgttcaagtatgatgaaccagggcaacgtgtacggccagatcaccgtacgcatgcacacccggcagactctggccatctatgaccggtttggccggttgatgtatggacaggaagatgtacccaaggatgtcctggagtatgttgtattcgaaaagcagttgacaaacccctatggaagctggagaatgcataccaagatcgttcccccatgggcaccccctaagcagcccatccttaagacggtgatgatccctggccctcagctgaaaccagaagaagaatag

SEQ ID NO: 3593 - DNA, 315 bp, Homo sapiens
  misc_feature (256)..(256): n is a, c, g, or t
  misc_feature (271)..(271): n is a, c, g, or t
  misc_feature (282)..(282): n is a, c, g, or t
  misc_feature (306)..(306): n is a, c, g, or t
gtttaaatgatacaacttaattttattaggacagacgctggcggccaccagaagtttgagcctctttggtagcaggaggctggaagaaaggacagaagtagctctggctgtgatggggatcttactgggcctgctactcctggggcacctaacagtggacacttatggccgtcccatcctggaagtgccagagagtgtaacaggaccttggaaaggggatgtgaatcttccctgcacctatgaccccctgcaaggntacacccaagtcttnggtgaagtggnttggtacaacgttggtttaaaccntttaaccat

SEQ ID NO: 3594 - DNA, 318 bp, Homo sapiens
gcgcggtgggtgcggaggggcgtgtgtgccggcgcgcgcgccytggggtgcaaaccccgagcgtctacgytgccatgaggggcgcgaacgctgggcgccactctgcctgctgctggctgccgccacccagctctcgcggcagcagtccccagagagacctgttttcacatgtggtggcattcttactggagagtctggatttattggcagtgaaggttttcctggagtgtaccctccaaatagcaaatgtacttggaaaatcacagttcccgaagaaaagtagtcgttctcaatttccgattcatagacctcgagagt

SEQ ID NO: 3595 - DNA, 553 bp, Homo sapiens
  misc_feature (25)..(25): n is a, c, g, or t
  misc_feature (456)..(456): n is a, c, g, or t
  misc_feature (464)..(464): n is a, c, g, or t
  misc_feature (475)..(475): n is a, c, g, or t
  misc_feature (511)..(511): n is a, c, g, or t
  misc_feature (522)..(522): n is a, c, g, or t
  misc_feature (534)..(534): n is a, c, g, or t
gtacacattccaaaaagagattgantacacttgcaatgaagggttcttgcttgagggagccaggagtcgggtttgtcttgccaatggaagttggagtggagccactcccgactgtgtgcctgtcagatgtgccaccccgccacaactggccaatggggtgacggaaggcctggactatggcttcatgaaggaagtaacattccactgtcatgagggctacatcttgcacggtgctccaaaactcacctgtcagtcagatggcaactgggatgcagagattcctctctgtaaaccagtcaactgtggacctcctgaagatcttgcccatggtttccctaatggtttttcctttattcatgggggccatatacagtatcagtgctttcctggttataagctccatggaaattcatcaagaagggtgcctctccaatggctcctggagtggcagctcancttcctgnctgccttgcanatgttccacaccagtaaattgaatatggaactgtcnatgggacagantttgactgtggnaaggcagcccgattcagtg

SEQ ID NO: 3596 - DNA, 394 bp, Homo sapiens
ttaattattaaacataatttttatttcatccaaggcaaagctaaatacaattctacaatgcaaaacttgttgtagaggccagactgattatatccgttctgtgctcgaacacaagtcagtgctggctgtgtgggcatctgcgcctcccagaggcactcgcacacctgaggcctcccaaggcctgttgttgcatcatttgatctatagttacataggaaaattgactatgggtattgttgtcatccaagccagaggaataaaccatgcataagatagtcaaaagcactgcatatcaggtgggaggtgggagggtagggactccaacctgggacaaagtaaagtaaagcaagttataggattttcccgagaagtccccgctcctggaactccctac

SEQ ID NO: 3597 - DNA, 267 bp, Homo sapiens
gcggccgcgattttttttttttttttttgttttattattattttattttcatatacaaaaagataaaacttgaaatagttctagatttttcctcctattgttggggtgtaactgcttcttcacacagggggaaaaaactacattcacatcggtttatttgaggacccagtgcagagttcaagcagcaaaaccccaacttagcagatctaatttcaaacttgacactcatttttaaaattaccacagtaaaaaggaacaaagatccac

SEQ ID NO: 3598 - DNA, 158 bp, Homo sapiens
cggctcctggtcccactgctgctcagcccagtggcctcacaggacaccagcttcccaggaggcgtctgacacagtatgatgatgaagatcccatggggcagcatcccagtactgatgttgctcctgctcctgggcctaatcgatatctcccaggccca

SEQ ID NO: 3599 - DNA, 479 bp, Homo sapiens
ttttacaaatcaggctaaaggataatttagcaagcattcctgatacaagcagctaagtgctcaaatctaataggtttatctggattttccatttgaagcacactttaaagagatagtgggatatggaagattcaaatacatctgactagcacagggataatacaactttggggacaggaaaaccaaactcttcctggtatactcctagtatcaacctctgaaattcacaaataagtgtctccctatattttacagcccgtttcaaaatggtctcaggatctcaatatgaaaaagatacttttctgtcctaaaatcatctgcatatgtgagcattgctcaggtaccctgccttgtgggctgaggctctccccagattgactgggaagctagagaccagtatggtcccagtaatacttgccactttatgtacactatcaaaacagaaagcatatatgtgtaaaaagcctgcgagggaatga

SEQ ID NO: 3600 - DNA, 7918 bp, Homo sapiens
  misc_feature (7434)..(7434): n is a, c, g, or t
atgcagtccggccgcggccccccacttccagcccccggcctggccttggctttgaccctgactatgttggccagacttgcatccgcggcttccttcttcggtgagaaccacctggaggtgcctgtggccacggctctgaccgacatagacctgcagctgcagttctccacgtcccagcccgaagccctccttctcctggcagcaggcccagctgaccacctcctgctgcagctctactctggacgcctgcaggtcagacttgttctgggccaggaggagctgaggctgcagactccagcagagacgctgctgagtgactccatcccccacactgtggtgctgactgtcgtagagggctgggccacgttgtcagtcgatgggtttctgaacgcctcctcagcagtcccaggagcccccctagaggtcccctatgggctctttgttgggggcactgggacccttggcctgccctacctgaggggaaccagccgacccctgaggggttgcctccatgcagccaccctcaatggccgcagcctcctccggcctctgacccccgatgtgcatgagggctgtgctgaagagttttctgccagtgatgatgtggccctgggcttctctgggccccactctctggctgccttccctgcctggggcactcaggacgaaggaaccctagagtttacactcaccacacagagccggcaggcacccttggccttccaggcagggggccggcgtggggacttcatctatgtggacatatttgagggccacctgcgggccgtggtggagaagggccagggtaccgtattgctccacaacagtgtgcctgtggccgatgggcagccccatgaggtcagtgtccacatcaatgctcaccggctggaaatctccgtggaccagtaccctacgcatacttcgaaccgaggagtcctcagctacctggagccacggggcagtctccttctcggggggctggatgcagaggcctctcgtcacctccaggaacaccgcctgggcctgacaccagaggccaccaatgcctccctgctgggctgcatggaagacctcagtgtcaatggccagaggcgggggctgcgggaagctttgctgacgcgcaacatggcagccggctgcaggctggaggaggaggagtatgaggacgatgcctatggccattatgaagctttctccaccctggctcccgaggcttggccagccatggagctgcctgagccatgcgtgcctgagccagggctgcctcctgtctttgccaatttcacccagctgctgactatcagcccactggtggtggccgagggtggcacagcctggcttgagtggaggcatgtgcagcccacgctggacctgatggaggctgagctgcgcaaatcccaggtgctgttcagcgtgacccgaggggcacactatggcgagctcgagctggacatcctgggtgcccaggcacgaaaaatgttcaccctcctggacgtggtgaaccgcaaggcccgcttcatccacgatggctctgaggacacctccgaccagctggtgctggaggtgtcggtgacggctcgggtgcccatgccctcatgccttcggaggggccaaacatacctcctgcccatccaggtcaaccctgtcaatgacccaccccacatcatcttcccacatggcagcctcatggtgatcctggaacacacgcagaagccgctggggcctgaggttttccaggcctatgacccggactctgcctgtgagggcctcaccttccaggtccttggcacctcctctggcctccccgtggagcgccgagaccagcctggggagccggcgaccgagttctcctgccgggagttggaggccggcagcctagtctatgtccactgcggtggtcctgcacaggacttgacgttccgggtcagcgatggactgcaggccagccccccggccacgctgaaggtggtggccatccggccggccatacagatccaccgcagcacagggttgcgactggcccaaggctctgccatgcccatcttgcccgccaacctgtcggtggagaccaatgccgtggggcaggatgtgagcgtgctgttccgcgtcactggggccctgcagtttggggagctgcagaagcatagtacaggtggggtggagggtgctgagtggtgggccacacaggcgttccaccagcgggatgtggagcagggccgcgtgaggtacctgagcactgacccacagcaccacgcttacgacaccgtggagaacctggccctggaggtgcaggtgggccaggagatcctgagcaatctgtccttcccagtgaccatccagagagccactgtgtggatgctgcggctggagccactgcacactcagaacacccagcaggagaccctcaccacagcccacctggaggccaccctggaggaggcaggcccaagccccccaaccttccattatgaggtggttcaggctcccaggaaaggcaaccttcaactacagggcacaaggctgtcagatggccagggcttcacccaggatgacatacaggctggccgggtgacctatggggccacagctcgtgcctcagaggcagtcgaggacaccttccgtttccgtgtcacagctccaccatatttctccccactctataccttccccatccacattggtggtgacccagatgcgcctgtcctcaccaatgtcctcctcgtggtgcctgagggtggtgagggtgtcctctctgctgaccacctctttgtcaagagtctcaacagtgccagctacctctatgaggtcatggagcggccccgccttgggaggttggcttggcgtgggacacaggacaagaccactatggtgacatccttcaccaatgaagacctgttgcgtggccggctggtctaccagcatgatgactccgagaccacagaagatgatatcccatttgttgctacccgccagggcgagagcagtggtgacatggcctgggaggaggtacggggtgtcttccgagtggccatccagcccgtgaatgaccacgcccctgtgcagaccatcagccggatcttccatgtggcccggggtgggcggcggctgctgactacagacgacgtggccttcagcgatgctgactcgggctttgctgacgcccagctggtgcttacccgcaaggacctcctctttggcagtatcgtggccgtagatgagcccacgcggcccatctaccgcttcacccaggaggacctcaggaagaggcgagtactgttcgtgcactcaggggctgaccgtggctggatccagctgcaggtgtccgacgggcaacaccaggccactgcgctgctggaggtgcaggcctcggaaccctacctccgtgtggccaacggctccagccttgtggtccctcaaggaggccagggcaccatcgacacggccgtgctccacctggacaccaacctcgacatccgcagtggggatgaggtccactaccacgtcacagctggccctcgctggggacaactagtccgggctggtcagccagccacagccttctcccagcaggacctgctggatggggccgttctctatagccacaatggcagcctcagccccgaagacaccatggccttctccgtggaagcagggccagtgcacacggatgccaccctacaagtgaccattgccctagagggcccactggccccactgaagctggtccggcacaagaagatctacgtcttccagggagaggcagctgagatcagaagggaccagctggaggcagcccaggaggcagtgccacctgcagacatcgtattctcagtgaagagcccaccgagtgccggctacctggtgatggtgtcgcgtggcgccttggcagatgagccacccagcctggaccctgtgcagagcttctcccaggaggcagtggacacaggcagggtcctgtacctgcactcccgccctgaggcctggagcgatgccttctcgctggatgtggcctcaggcctgggtgctcccctcgagggcgtccttgtggagctggaggtgctgcccgctgccatcccactagaggcgcaaaacttcagcgtccctgagggtggcagcctcaccctggcccctccactgctccgtgtctccgggccctacttccccactctcctgggcctcagcctgcaggtgctggagccaccccagcatggacccctgcagaaggaggacggacctcaagccaggaccctcagcgccttctcctggagaatggtggaagagcagctgatccgctacgtgcatgacgggagcgagacactgacagacagttttgtcctgatggctaatgcctccgagatggatcgccagagccatcctgtggccttcactgtcactgtcctgcctgtcaatgaccaaccccccatcctcactacaaacacaggcctgcagatgtgggagggggccactgcgcccatccctgcggaggctctgaggagcacggacggcgactctgggtctgaggatctggtctacaccatcgagcagcccagcaacgggcgggtagtgctgcggggggcgccgggcactgaggtgcgcagcttcacgcaggcccagctggacggcgggctcgtgctgttctcacacagaggaaccctggatggaggcttcccgttccgcctctctgacggcgagcacacttcccccggacacttcttccgagtgacggcccagaagcaagtgctcctctcgctgaagggcagccagacactgactgtctgcccagggtccgtccagccactcagcagtcagaccctcagggccagctccagcgcaggcactgacccccagctcctgctctaccgtgtggtgcggggcccccagctaggccggctgttccacgcccagcaggacagcacaggggaggccctggtgaacttcactcaggcagaggtctacgctgggaatattctgtatgagcatgagatgccccccgagcccttttgggaggcccatgataccctagagctccagctgtcctcgccgcctgcccgggacgtggccgccacccttgctgtggctgtgtcttttgaggctgcctgtccccagcgccccagccacctctggaagaacaaaggtctctgggtccccgagggccagcgggccaggatcaccgtggctgctctggatgcctccaatctcttggccagcgttccatcaccccagcgctcagagcatgatgtgctcttccaggtcacacagttccccagccggggccagctgttggtgtccgaggagcccctccatgctgggcagccccacttcctgcagtcccagctggctgcagggcagctagtgtatgcccacggcggtgggggcacccagcaggatggcttccactttcgtgcccacctccaggggccagcaggggcctccgtggctggaccccaaacctcagaggcctttgccatcacggtgagggatgtaaatgagcggccccctcagccacaggcctctgtcccactccggctcacccgaggctctcgtgcccccatctcccgggcccagctgagtgtggtggacccagactcagctcctggggagattgagtacgaggtccagcgggcaccccacaacggcttcctcagcctggtgggtggtggcctggggcccgtgacccgcttcacgcaagccgatgtggattcagggcggctggccttcgtggccaacgggagcagcgtggcaggcatcttccagctgagcatgtctgatggggccagcccacccctgcccatgtccctggctgtggacatcctaccatccgccatcgaggtgcagctgcgggcacccctggaggtgccccaagctttggggcgctcctcactgagccagcagcagctccgggtggtttcagatcgggaggagccagaggcagcataccgcctcatccagggaccccagtatgggcatctcctggtgggcgggcggcccacctcggccttcagccaattccagatagaccagggcgaggtggtctttgccttcaccaacttctcctcctctcatgaccacttcagagtcctggcactggctaggggtgtcaatgcatcagccgtagtgaacgtcactgtgagggctctgctgcatgtgtgggcaggtgggccatggccccagggtgccaccctgcgcctggaccccaccgtcctagatgctggcgagctggccaaccgcacaggcagtgtgccgcgcttccgcctcctggagggaccccggcatggccgcgtggtccgcgtgccccgagccaggacggagcccgggggcagccagctggtggagcagttcactcagcaggaccttgaggacgggaggctggggctggaggtgggcaggccagaggggagggcccccggccccgcaggtgacagtctcactctggagctgtgggcacagggcgtcccgcctgctgtggcctccctggactttgccactgagccttacaatgctgcccggccctacagcgtggccctgctcagtgtccccgaggccgcccggacggaagcagggaagccagagagcagcacccccacaggcgagccaggccccatggcatccagccctgagcccgctgtggccaagggaggcttcctgagcttccttgaggccaacatgttcagcgtcatcatccccatgtgcctggtacttctgctcctggcgctcatcctgcccctgctcttctacctccgaaaacgcaacaagacgggcaagcatgacgtccaggtcctgactgccaagccccgcaacggcctggctggtgacaccgagacctttcgcaaggtggagccaggccaggccatcccgctcacagctgtgcctggccaggggccccctccaggaggccagcctgacccagagctgctgcagttctgccggacacccaaccctgcccttaagaatggccagtactgggtgtgaaggcctggcctgggcccagatgctgatcgggccagggacaggcttgcccatgtcccgggccccattgcttccatgcccggtgctgtctgagtatccccagagcaagagagacctggagacaccaggggtggagggtcctgggagatagtcccaggggtccgggacagagtggagtcaagagctggaacctccctcagctcactccgagcctggagaactgcaggggccaaggtggaggcaggcttaagttcagtcctcctgccctggagctggtttgggctgtcaaaaccagggtaacctcctacatgggtcatgactctgggtcctgggtctgtgaccttgggtaagtcgcgcctgacccaggctgctaagagggcaaggagaaggaagtaccctggggagggaagggacagaggaagctattcctggcttttctactccaacccaggccaccctttgtctctnccccagagttgagaaaaaaacttcctcccctggttttttagggagatggtatcccctggagtagagggcaagaggagagagcgcctccagtctagaaggcataagccaataggataatatattcagggtgcagggtgggtaggttgctctggggatgggtttatttaagggagattgcaaggaagctatttaacatggtgctgagctagccaggactgatggagcccctgggggtgtgggatggaggagggtctgcagccagttcattcccagggccccatcttgatgggccaagggctaaacatgcatgtgtcagtggctttggagcaggctaggctggggctcatcgagggtctcaggccgaggccactgtagtgccagtgcccccctgaggactagggcaggcagctgggggcacttggttccatggagcctggataaacagtgctttggaggctctggaaaaaaaaaaaaaaaaaaaaaa

SEQ ID NO: 3601 - protein, 2322 aa, Homo sapiens
MQSGRGPPLPAPGLALALTLTMLARLASAASFFGENHLEVPVATALTDIDLQLQFSTSQPEALLLLAAGPADHLLLQLYSGRLQVRLVLGQEELRLQTPAETLLSDSIPHTVVLTVVEGWATLSVDGFLNASSAVPGAPLEVPYGLFVGGTGTLGLPYLRGTSRPLRGCLHAATLNGRSLLRPLTPDVHEGCAEEFSASDDVALGFSGPHSLAAFPAWGTQDEGTLEFTLTTQSRQAPLAFQAGGRRGDFIYVDIFEGHLRAVVEKGQGTVLLHNSVPVADGQPHEVSVHINAHRLEISVDQYPTHTSNRGVLSYLEPRGSLLLGGLDAEASRHLQEHRLGLTPEATNASLLGCMEDLSVNGQRRGLREALLTRNMAAGCRLEEEEYEDDAYGHYEAFSTLAPEAWPAMELPEPCVPEPGLPPVFANFTQLLTISPLVVAEGGTAWLEWRHVQPTLDLMEAELRKSQVLFSVTRGAHYGELELDILGAQARKMFTLLDVVNRKARFIHDGSEDTSDQLVLEVSVTARVPMPSCLRRGQTYLLPIQVNPVNDPPHIIFPHGSLMVILEHTQKPLGPEVFQAYDPDSACEGLTFQVLGTSSGLPVERRDQPGEPATEFSCRELEAGSLVYVHCGGPAQDLTFRVSDGLQASPPATLKVVAIRPAIQIHRSTGLRLAQGSAMPILPANLSVETNAVGQDVSVLFRVTGALQFGELQKHSTGGVEGAEWWATQAFHQRDVEQGRVRYLSTDPQHHAYDTVENLALEVQVGQEILSNLSFPVTIQRATVWMLRLEPLHTQNTQQETLTTAHLEATLEEAGPSPPTFHYEVVQAPRKGNLQLQGTRLSDGQGFTQDDIQAGRVTYGATARASEAVEDTFRFRVTAPPYFSPLYTFPIHIGGDPDAPVLTNVLLVVPEGGEGVLSADHLFVKSLNSASYLYEVMERPRLGRLAWRGTQDKTTMVTSFTNEDLLRGRLVYQHDDSETTEDDIPFVATRQGESSGDMAWEEVRGVFRVAIQPVNDHAPVQTISRIFHVARGGRRLLTTDDVAFSDADSGFADAQLVLTRKDLLFGSIVAVDEPTRPIYRFTQEDLRKRRVLFVHSGADRGWIQLQVSDGQHQATALLEVQASEPYLRVANGSSLVVPQGGQGTIDTAVLHLDTNLDIRSGDEVHYHVTAGPRWGQLVRAGQPATAFSQQDLLDGAVLYSHNGSLSPEDTMAFSVEAGPVHTDATLQVTIALEGPLAPLKLVRHKKIYVFQGEAAEIRRDQLEAAQEAVPPADIVFSVKSPPSAGYLVMVSRGALADEPPSLDPVQSFSQEAVDTGRVLYLHSRPEAWSDAFSLDVASGLGAPLEGVLVELEVLPAAIPLEAQNFSVPEGGSLTLAPPLLRVSGPYFPTLLGLSLQVLEPPQHGPLQKEDGPQARTLSAFSWRMVEEQLIRYVHDGSETLTDSFVLMANASEMDRQSHPVAFTVTVLPVNDQPPILTTNTGLQMWEGATAPIPAEALRSTDGDSGSEDLVYTIEQPSNGRVVLRGAPGTEVRSFTQAQLDGGLVLFSHRGTLDGGFPFRLSDGEHTSPGHFFRVTAQKQVLLSLKGSQTLTVCPGSVQPLSSQTLRASSSAGTDPQLLLYRVVRGPQLGRLFHAQQDSTGEALVNFTQAEVYAGNILYEHEMPPEPFWEAHDTLELQLSSPPARDVAATLAVAVSFEAACPQRPSHLWKNKGLWVPEGQRARITVAALDASNLLASVPSPQRSEHDVLFQVTQFPSRGQLLVSEEPLHAGQPHFLQSQLAAGQLVYAHGGGGTQQDGFHFRAHLQGPAGASVAGPQTSEAFAITVRDVNERPPQPQASVPLRLTRGSRAPISRAQLSVVDPDSAPGEIEYEVQRAPHNGFLSLVGGGLGPVTRFTQADVDSGRLAFVANGSSVAGIFQLSMSDGASPPLPMSLAVDILPSAIEVQLRAPLEVPQALGRSSLSQQQLRVVSDREEPEAAYRLIQGPQYGHLLVGGRPTSAFSQFQIDQGEVVFAFTNFSSSHDHFRVLALARGVNASAVVNVTVRALLHVWAGGPWPQGATLRLDPTVLDAGELANRTGSVPRFRLLEGPRHGRVVRVPRARTEPGGSQLVEQFTQQDLEDGRLGLEVGRPEGRAPGPAGDSLTLELWAQGVPPAVASLDFATEPYNAARPYSVALLSVPEAARTEAGKPESSTPTGEPGPMASSPEPAVAKGGFLSFLEANMFSVIIPMCLVLLLLALILPLLFYLRKRNKTGKHDVQVLTAKPRNGLAGDTETFRKVEPGQAIPLTAVPGQGPPPGGQPDPELLQFCRTPNPALKNGQYWV

SEQ ID NO: 3602 - DNA, 485 bp, Homo sapiens
aattagggagaccactgtgatggggcaaggaatttggcaagttacgttactaacaaatctttaagctgatgttaacagcggaatctttagaattatttgacaggtttacaatgtttccagacactcaaaaaaccactagtacgttcttatcaggaagtattttacaacgtaataaagtaatgtaagtactgccatcctcagatagctccatgattcattcagcctgacactcagctgtggcaatagtagtggggagcaggaaccagggggagggcccagagaggaagaagatgccactcacagtataattgcactgagaaagctactttcaccagaaatctaagcttctcaaggtcaggagccatcccttattctttcctgaatattcagcagctaggacatgggccaaccagatacaggtatttattcagtgtaaatatttaaaagtcatcccggaatagtccattaacaaatatatgtttcat

SEQ ID NO: 3603 - DNA, 138 bp, Homo sapiens
tcctgattttatttgaaaagcctcttggattgatagtatagtagctcaggcattggaaactttctgcaaactgttttgggtttgcaggccagatggtctctttggcagctactcagctctgcaatttcagtgtgaaag

SEQ ID NO: 3604 - DNA, 476 bp, Homo sapiens
atattctcattttaatatcttatgctattattctgtaaacattttaattttagtttcatgagtctttattttttgttacctgcaagttatgttcttcttcattgaatttcatatttgagagacatttgtcttcatgaagcagatttgcactggaaccattgctttactctggttggaaatgccattgttttggggacagacttttaaaatgcccttgtgtctcccagtgaggagccctaagcattgacttctctaccctaaaactgtttgagagagggagagtgggccctggctttctcaagcatgggtcgggggttcagcggggcctctgtcttttgtggtgacccctcaggggtttcattgtttccttctgacttaagcaatagagagagaatttgttttggtactcttcagaggaattgtgctttggctcataacttggccatgttctccatgaattagttctcctatttttt

SEQ ID NO: 3605 - DNA, 489 bp, Homo sapiens
tttgaaaatcatacatttcttttttatttcaatttattgttgttgacaactcctcaagacaatataaatgtttttttacatgttgatccccagaaaataggtgcctaaaaaaagttactttaggataatgatttcaggggagtagaaggtgaaaaatcataacccaaagtccagtatggacaaaaccatgaagacatttggaagtagtatttctcattgacaagcaagtaaaaccaagtgcattgcaacagatggcatacaaatcaaatcctgatgcagcacggtatggggaactatttaaattaatctactagaagtctattgaacagttagaacataactttaatgaatatattatcatatccagttctgtatagtaaacctacatttttcatgtcctagctgacaacccaaactatcttagtacccttcaatattgctttgcaattgtggacacaatggattccattgaaagataaatattatttg

SEQ ID NO: 3606 - DNA, 458 bp, Homo sapiens
tttttttttttttttttttttaggaaacaatacaatttatattacagttttattattatttaaaaattttatattaacaaaatgagatgggatctgcctatgttgcccaggctggtcttcaactcctgggctcaatctcctcggcctccgaaagtgtgattacaggcgtgcgaccgcacccggcccatattacagtttcatagtgtttttgattactcgtggtaggagaaatgtgtcttctttgcacttggggtctcaacgtctcagtcctgccctatgccccgagaccccaagaggctttcccaaggtcaggcagggaatccgcagagaggcagggctggactccagcatcctgactccccagttcgtgctctgtgctgcagagacctgttgcgtaacactgagtaactgtggattgtctaaccttttatgaaatttccagctggtcttttgctacg

SEQ ID NO: 3607 - DNA, 328 bp, Homo sapiens
tatggacaaaaatacttagaataatttattctttgttaagcattagactgaagttatattgttttggtatattgagtttttatatcaatatagggtgctgcaaagctgtgtacaataaaggtcaagggtagtgatttgctgacaacaattaggaaaagagaactatagaatgcacaggaacattttcagaaatgggttttattatatttcataggcaccactcactttacttttggtgggttttaatacttgaatcaaaataaaataatacatgagttaagtattaaaccaacagattaaaaccccaggcccccgagcccctcatttt

SEQ ID NO: 3608 - DNA, 483 bp, Homo sapiens
tgacaagtgaaagggtttatacaagcaaaaagaatgtacactttctggcaagagaatacagaagagatttgaatgtcatgaagatattaaaaaaaaaagaatacagaggagataagagacttgagtaagaataggtcatgttttaataaaactaccaaaagaacaaaacagattcttcaacccaggaggacatgtgagtcacaataccctttaatccacaggttggctccttggtttctggaactttctgcctcctgtaaacgatgtgcgggtggtaccctccctcaaccagtggatgcttcttcacgggttcaatgaaaaagtctccatgtggtagttggaaaaatccagtcagtccatggcaggcactgagggctgccgtcccaactctggtgccctgctgtagaaccgtgccactgagatggcagaggggggcagaggaagccatcatcttaacatgggagaggttcccatatctcttct

SEQ ID NO: 3609 - DNA, 554 bp, Homo sapiens
ttttgtttttagcacaaatttattgagtattttgctgggcgctgtgaaagatgaatgacaatcactgagacattaatgtatcctctaagaatatataagcagaataatttttgttattccttgcagggtcacacatcttacttatccaaagtgtgaaaggaaaatatcttgggtccccaaaatcactaagctaaagggaaaagtcaagttgggaactgcttacggcatacatgcctcccattctattaaagtcattgctccgttcactgagataaatgcatatctgattgcctcctttggagagactaatcagaaacccagaagaatgcaaccatttgtctcttacctacctatgacccggaagccccctccccactttgagtcatctctggcttttccagactgaaccaatgtttatcttacatatgttgatcgatgtctcatgtcttcctacaatgcataaaaccaaactgttctgaccgctttgggcacatgtcatcaggaccacctgaggctgtgtcacgggtgcacatcctcaaccctggcaaaataaa

SEQ ID NO: 3610 - DNA, 280 bp, Homo sapiens
  misc_feature (203)..(203): n is a, c, g, or t
  misc_feature (255)..(255): n is a, c, g, or t
  misc_feature (260)..(260): n is a, c, g, or t
  misc_feature (267)..(267): n is a, c, g, or t
  misc_feature (277)..(277): n is a, c, g, or t
ggtcgattgtcctattctcagaatgaattatcttctatgggtaatgaagaactctttggcttagtcagaaggaattaacgaacctcggtaggaatgtatttccatcctcccaccctacagatataagaggttaaaataacagttcgcccaatttaagcccagtagtgtcagttttcctaatctcagtccaggtaggaattaantaagaaatatctcaagtgttgatgctatccaagcatgttggggtggaaaggnaattngtgcccncgaaaaaatnggg

SEQ ID NO: 3611 - DNA, 895 bp, Homo sapiens
aaagctgtatgagactatattattcaaggtccaattatgcatcaaacattgaatggcacagcaatggtttacatatgcaagtaaataggacatacaaacacttagattccacctctaccaaataccttgattaatgcacagaggagggggaatactgacacaggaaacctgcccagaaactagactggcagagatgtcaggttaacaaactgctaaaagttacatctccaaaaaggcacttatcattgttataaaagtgcttaaaatctaaacttgaaccttgtgcctggtttataaatttacaagaaactgcaaagaaccacagactagtttataatatcaagtttccatacaaaattgtccaagaatttatttgcaataccttacatgtgaactgaaataaactttgcaaactacaattatactaaagttttatactgaaaattcaaatcagcttactcataatctccagatagctcttccatcattattttaattaagtattacattgcccaccaacctttgaattatgatatgtgtaagctggacgcaccacttacccttcgggcagaagaaatcaggagaaatcagtctcaactgtgacaactaattgtaacataagcgcatacatgggatgagagacatcaaatctgcaataaattacctaatatttaccacatggtatttacaacactagtgcctgaaactattaaaaattcaactagtatgaatgctaatcatacccgttgagtttaacaaattagaaggtctctctgaaatcaatagatctagtagatactcctaatatggtaccatgctacggattaggtactccacccagaatagaatgttcataacgaattcagatagaaaaggggcagaccgcataagcatt

SEQ ID NO: 3612 - DNA, 436 bp, Homo sapiens
tttttttttttttttttactctagaaattgtgttttaatttccaggttctaagcaagctgttttgtcactataattgttaaagtttaacatatccattgtcaaaggtatgaccaaaatgaataaaaatatttaagcccaaaaagtttaagggaactctgagacataattgatgttcaagtaccatttttcaaatgttaagggctattggcatctgccaacattcaaaacaaacatatatatcttgagagtcatcaaaataaactttacttttttggtacttcccttgtaagatcccattttaaatgtaaggacattgaaataaaagccttcaatttaagatagtattgcaattcctttttagtcatgtaactagataattcttatatatattccatgtcttatgttggttcctacacattaatcctgcaagccttt

SEQ ID NO: 3613 - DNA, 3242 bp, Homo sapiens
atgcgtccaatgcgaatttttgtgaatgatgaccgccatgtgatggcaaagcattcttccgtttatccaacacaagaggagctggaggcagtccagaacatggtgtcccacacggagcgggcgctcaaagctgtgtccgactggatagacgagcaggaaaagggtagcagcgagcaggcagagtccgataacatggatgtgcccccagaggacgacagtaaagaaggggctggggaacagaagacggagcacatgaccagaaccctgcggggagtgatgcgggtgggcctggtggcaaagtgcctcctactcaagggggacttggatctggagctggtgctgctgtgtaaggagaagcccacaaccgccctcctggacaaggtggccgacaacctggccatccagcttgctgctgtaacagaagacaagtacgaaatactgcaatctgtcgacgatgctgcgattgtgataaaaaacacaaaagagcctccattgtccctgaccatccacctgacatcccctgttgtcagagaagaaatggagaaagtattagctggagaaacgctatcagtcaacgaccccccggacgttctggacaggcagaaatgccttgctgccttggcgtccctccgacacgccaagtggttccaggccagagccaacgggctgaagtcttgtgtcattgtgatccgggtcttgagggacctgtgcactcgcgtgcccacctggggtcccctccgaggctggcctctcgagctcctgtgtgagaaatccattggcacggccaacagaccgatgggtgctggcgaggccctgcggagagtgctggagtgcctggcgtcgggcatcgtgatgccagatggttctggcatttatgacccttgtgaaaaagaagccactgatgctattgggcatctagacagacagcaacgggaagatatcacacagagtgcgcagcacgcactgcggctcgctgccttcggccagctccataaagtcctaggcatggaccctctgccttccaagatgcccaagaaaccaaagaatgaaaacccagtggactacaccgttcagatcccaccaagcaccacctatgccattacgcccatgaaacgcccaatggaggaggacggggaggagaagtcgcccagcaaaaagaagaagaagattcagaagaaagaggagaaggcagagcccccccaggctatgaatgccctgatgcggttgaaccagctgaagccagggctgcagtacaagctggtgtcccagactgggcccgtccatgcccccatctttaccatgtctgtggaggttgatggcaattcattcgaggcctctgggccctccaaaaagacggccaagctgcacgtggccgttaaggtgttacaggacatgggcttgccgacgggtgctgaaggcagggactcgagcaagggggaggactcggctgaggagaccgaggcgaagccagcagtggtggcccctgccccagtggtagaagctgtctccacccctagtgcggcctttccctcagatgccactgccgagcaggggccgatcctgacaaagcacggcaagaacccagtcatggagctgaacgagaagaggcgtgggctcaagtacgagctcatctccgagaccgggggcagccacgacaagcgcttcgtcatggaggtcgaagtggatggacagaagttccaaggtgctggttccaacaaaaaggtggcgaaggcctacgctgctcttgctgccctagaaaagcttttccctgacacccctctcgcccttgatgccaacaaaaagaagagagccccagtacccgtcagagggggaccgaaatttgctgctaagccacataaccctggcttcggcatgggaggccccatgcacaacgaagtgcccccaccccccaaccttcgagggcggggaagaggcgggagcatccggggacgagggcgcgggcgaggatttggtggcgccaaccatggaggctacatgaatgccggtgctgggtatggaagctatgggtacggaggcaactctgcgacagcaggctacagtcagttctacagcaacggagggcattctgggaatgccagtggcggtggcggcgggggcggtggtggctcctccggctatggctcctactaccaaggtgacaactacaactcaccggtgcccccaaaacacgctgggaagaagcagccgcacgggggccagcagaagccctcctacggctcgggctaccagtcccaccagggccagcagcagtcctacaaccagagcccctacagcaactatggccctccacagggcaagcagaaaggctataaccatggacaaggcagctactcctactcgaactcctacaactctcccgggggcgggggcggatccgactacaactacgagagcaaattcaactacagtggtagtggaggccgaagcggcgggaacagctacggctcaggcggggcatcctacaacccagggtcacacgggggctacggcggaggttctgggggcggctcctcataccaaggcaaacaaggaggctactcacagtcgaactacaactccccggggtccggccagaactacagtggccctcccagctcctaccagtcctcacaaggcggctatggcagaaacgcagaccacagcatgaactaccagtacagataagcccccgcggggcggagatttctaccttctgcacttactccccatcagaagatcgagttttatgcatcacagttaacatgtcagctggccctccaggcccccgcccccatcccgtccacgttgctgtgtcgtgaggtgcagcgggtcaccctgtggcccgtcctgtgacccatatttagccgtgtttgggactccgtgtcttcaatggtttgttagttgccattacaactttgtctgggtagagtttttgagtttttgcagttcagtatccctctgtctattcacacttcgtgttagtggtaactcagtttgtctttaaatagttacagaagggatacgtcatttgttaatgcttttgtgaagtgagttaaacgagctttctgtattttaatgctttagtgtttcagtttttataagtgaagattttattttaaaaaccagtgggaaagagtggggggtttctttttatgtctgggtcattcaggcagtacatctgaattaagctgaatgtagacaaataaagaaaaacaaaactaaaaaaaaaaaaaaaaaaaaaa

SEQ ID NO: 3614 - protein, 894 aa, Homo sapiens [sequence omitted]

SEQ ID NO: 3615 - DNA, 363 bp, Homo sapiens
ttttaggaatgttcaaagcagctttattcataatagccaaatgcatacagctcaaaagattaaacagcaggtgaatggttaaacaaattacagtacacccatacaatgaaatactaatcagaaattaaaaagtagtgaactactgaattatgcaacaacatggatgaatttcagagacatgagagtacatactacatgattccaaagctacatttagatgctaaaagtcacaacagtggtggtcttgcagtgagtgaaggggagggactgactgaaaaaaaaggcatgacaaaactttctaaggtggcggaaatattctaaacaatgatctgggtggtgatgacacaggtgtaaatatttgga

SEQ ID NO: 3616 - DNA, 663 bp, Homo sapiens
gaggcgtcggctgtgtttctcaccgcggtcttttcctcccactcttggctggttggaccccgctatggaaaagttggcccctgagccagagctccagcagccttgttagggcgtggcctgaggcttggataagtgggaggaaaaagtcctggatttcgagtcagaacatctggattagaatcctacttctttcacttgataatcttgttacctgtggaaatcagaagagagaatatagtaaaaatacgcagtacagtcccagatgtaaaacgaagatcaggagcagatttgaagaattacaaagtgaattggtgccagtcagcatgtcagagacagaccacatagcctctacttcctctgataaaaatgttgggaaaacacctgaattaaaggaagactcatgcaacttgttttctggcaatgaaagcagcaaattagaaaatgagtccaaactactgtcattaaacactgataaaactttatgtcaacctaatgagcataataatcgaattgaagccccaggaaaattatattccagatcatggtggaggtgaggattcttgtgccaaaacagacacaggctcagaaaatctgaacaatagctaatttcctagtggaaatctgctaaccattttcaaaacactgaacacgaacgacagtacc

SEQ ID NO: 3617 - DNA, 381 bp, Homo sapiens
tttttttttttttttttcgggttcatccaattttattctttttcataaaagcaatgcagtaaagataaaactaaatgtggaccctgggaacaaggagtccagaggttgcccaaagagtcgcaaagtgcatcaggaaacctgaatgtgaagatcggtgaccgagagcctgatgccagcctcctcttgggtcttgactgaaatcttcccaggttgctattggattttgcatgtacgagcctccatcagaggatagacttaggcatatggtttgcccagtgaattgaagaatctccagagtttatgaattgaagagtgggatgaatacaatacacagagcaccgaagcaaacacatcagaatcgaggcaactccctgtttcgtt

SEQ ID NO: 3618 - DNA, 207 bp, Homo sapiens
  misc_feature (5)..(5): n is a, c, g, or t
  misc_feature (39)..(39): n is a, c, g, or t
gaccntagaggatccccatggttcggtgaagagagctgngttttgccgggatgctgcggtggagttttccaaccggggacttcccccgggcgggagaagtccacaccgggaccaccatcatggcagtggagtttgacggatgcgttgtgatgggttctgattcccgagtgtctgtaggcgaggcggtggtgaaccgagtgtttgaca

SEQ ID NO: 3619 - DNA, 1449 bp, Homo sapiens
  misc_feature (1316)..(1316): n is a, c, g, or t
  misc_feature (1360)..(1360): n is a, c, g, or t
  misc_feature (1366)..(1367): n is a, c, g, or t
  misc_feature (1369)..(1369): n is a, c, g, or t
agccgaaactgagaggggccggactcacagtgatgtgcacctcctcccgtccaggtggggcctgcctggggaaagcttgtggccggaagagaaaatgagcttcctaggacccctgactcacgacctcatcaacgttggtgctactgcttggtggagaatgtaaaccctttgtaaccccatcccatgcccctccgactccccaccccaggagggaacgggcaggccgggcggccttgcagatccacagggcaaggaaacaagaggggagcggccaagtgccccgaccaggaggccccctacttcagaggcaagggccatgtggtcctggccccccaccccatcccttcccacctaggagctccccctccacacagcctccatctccaggggaacttggtgctacacgctggtgctcttatcttcctggggggagggaggagggaagggtggcccctcggggaaccccctacctggggctcctctaaagatggtgcagacacttcctgggcagtcccagctccccctgcccaccaggacccaccgttggctgccatccagttggtacccaagcacctgaagcctcaaagctggattcgctctagcatccctcctctcctgggtccacttggccgtctcctccccaccgatcgctgttccccacatctggggcgcttttgggttggaaaaccaccccacactgggaatagccaccttgccccttgtagaatccatccgcgcatccgtccattcatccatcggtccgtccatccatgtccccagttgaccgcccggcaccattagctggctgggtgcacccaccatcaacctggttgacctgtcatggccgcctgtgccctgcctccacccccatcctacactcccccagggcgtgcggggctgtgcagactggggtgccaggcatctcctccccacccggggtgtccccacatgcagtactgtataccccccatccctccctcggtccactgaacttcagagcagttcccattcctgccccgcccatctttttgtgtctcgctgtgatagatcaataaatattttattttttgtcctggatatttggggattatttttgattgttgatattctcttttggttttattgttgtggttcattgaaaaaaaaagataatttttttttctgatccggggagctgtatccccagtagaaaaaacattttaatcactctaatataactctggatgaaacacacctttttttttaataagaaaagagaattaactgcttcagaaatgactaataaatgaaaaccctttaaaggaaactgtgtcttngcttccttggtatgatttaatctgccttcaactgttggcctggntggggnnangggctctgcttcagggaacctccaccacccaaattgtatttgagaggttgcccaaccaaaagcccctgctgcctggcttc

SEQ ID NO: 3620 - protein, 13 aa, Homo sapiens
GACLGKACGRKRK

SEQ ID NO: 3621 - DNA, 3171 bp, Homo sapiens
gaattcgcggccgcgtcgaccagatctgaggcgaggctaggtgagccgtgggaagaaaagagggagcagctagggcgcgggtctccctcctcccggagtttggaacggctgaagttcaccttccagcccctagcgccgttcgcgccgctaggcctggcttctgaggcggttgcggtgctcggtcgccgcctaggcggggcagggtgcgagcaggggcttcgggccacgcttctcttggcgacaggattttgctgtgaagtccgtccgggaaacggaggaaaaaaagagttgcgggaggctgtcggctaataacggttcttgatacatatttgccagacttcaagatttcagaaaaggggtgaaagagaagattgcaactttgagtcagacctgtaggcctgatagactgattaaaccacagaaggtgacctgctgagaaaagtggtacaaatactgggaaaaacctgctcttctgcgttaagtgggagacaatgtcacaagttaaaagctcttattcctatgatgccccctcggatttcatcaatttttcatccttggatgatgaaggagatactcaaaacatagattcatggtttgaggagaaggccaatttggagaataagttactggggaagaatggaactggagggctttttcagggcaaaactcctttgagaaaggctaatcttcagcaagctattgtcacacctttgaaaccagttgacaacacttactacaaagaggcagaaaaagaaaatcttgtggaacaatccattccgtcaaatgcttgttcttccctggaagttgaggcagccatatcaagaaaaactccagcccagcctcagagaagatctcttaggctttctgctcagaaggatttggaacagaaagaaaagcatcatgtaaaaatgaaagccaagagatgtgccactcctgtaatcatcgatgaaattctaccctctaagaaaatgaaagtttctaacaacaaaaagaagccagaggaagaaggcagtgctcatcaagatactgctgaaaagaatgcatcttccccagagaaagccaagggtagacatactgtgccttgtatgccacctgcaaagcagaagtttctaaaaagtactgaggagcaagagctggagaagagtatgaaaatgcagcaagaggtggtggagatgcggaaaaagaatgaagaattcaagaaacttgctctggctggaatagggcaacctgtgaagaaatcagtgagccaggtcaccaaatcagttgacttccacttccgcacagatgagcgaatcaaacaacatcctaagaaccaggaggaatataaggaagtgaactttacatctgaactacgaaagcatccttcatctcctgcccgagtgactaagggatgtaccattgttaagcctttcaacctgtcccaaggaaagaaaagaacatttgatgaaacagtttctacatatgtgccccttgcacagcaagttgaagacttccataaacgaacccctaacagatatcatttgaggagcaagaaggatgatattaacctgttaccctccaaatcttctgtgaccaagatttgcagagacccacagactcctgtactgcaaaccaaacaccgtgcacgggctgtgacctgcaaaagtacagcagagctggaggctgaggagctcgagaaattgcaacaatacaaattcaaagcacgtgaacttgatcccagaatacttgaaggtgggcccatcttgcccaagaaaccacctgtgaaaccacccaccgagcctattggctttgatttggaaattgagaaaagaatccaggagcgagaatcaaagaagaaaacagaggatgaacactttgaatttcattccagaccttgccctactaagattttggaagatgttgtgggtgttcctgaaaagaaggtacttccaatcaccgtccccaagtcaccagcctttgcattgaagaacagaattcgaatgcccaccaaagaagatgaggaagaggacgaaccggtagtgataaaagctcaacctgtgccacattatggggtgccttttaagccccaaatcccagaggcaagaactgtggaaatatgccctttctcctttgattctcgagacaaagaacgtcagttacagaaggagaagaaaataaaagaactgcagaaaggggaggtgcccaagttcaaggcacttcccttgcctcattttgacaccattaacctgccagagaagaaggtaaagaatgtgacccagattgaacctttctgcttggagactgacagaagaggtgctctgaaggcacagacttggaagcaccagctggaagaagaactgagacagcagaaagaagcagcttgtttcaaggctcgtccaaacaccgtcatctctcaggagccctttgttcccaagaaagagaagaaatcagttgctgagggcctttctggttctctagttcaggaaccttttcagctggctactgagaagagagccaaagagcggcaggagctggagaagagaatggctgaggtagaagcccagaaagcccagcagttggaggaggccagactacaggaggaagagcagaaaaaagaggagctggccaggctacggagagaactggtgcataaggcaaatccaatacgcaagtaccagggtctggagataaagtcaagtgaccagcctctgactgtgcctgtatctcccaaattctccactcgattccactgctaaactcagctgtgagctgcggataccgcccggcaatgggacctgctcttaacctcaaacctaggaccgtcttgctttgtcattgggcatggagagaacccatttctccagacttttacctacccgtgcctgagaaagcatacttgacaactgtggactccagttttgttgagaattgttttcttacattactaaggctaataatgagatgtaactcatgaatgtctcgattagactccatgtagttacttcctttaaaccatcagccggccttttatatgggtcttcactctgactagaatttagtctctgtgtcagcacagtgtaatctctattgctattgccccttacgactctcaccctctccccactttttttaaaaattttaaccagaaaataaagatagttaaatcctggaaaaaaaaaaaaaaaaaaaaaa

SEQ ID NO: 3622 - protein, 747 aa, Homo sapiens
MSQVKSSYSYDAPSDFINFSSLDDEGDTQNIDSWFEEKANLENKLLGKNGTGGLFQGKTPLRKANLQQAIVTPLKPVDNTYYKEAEKENLVEQSIPSNACSSLEVEAAISRKTPAQPQRRSLRLSAQKDLEQKEKHHVKMKAKRCATPVIIDEILPSKKMKVSNNKKKPEEEGSAHQDTAEKNASSPEKAKGRHTVPCMPPAKQKFLKSTEEQELEKSMKMQQEVVEMRKKNEEFKKLALAGIGQPVKKSVSQVTKSVDFHFRTDERIKQHPKNQEEYKEVNFTSELRKHPSSPARVTKGCTIVKPFNLSQGKKRTFDETVSTYVPLAQQVEDFHKRTPNRYHLRSKKDDINLLPSKSSVTKICRDPQTPVLQTKHRARAVTCKSTAELEAEELEKLQQYKFKARELDPRILEGGPILPKKPPVKPPTEPIGFDLEIEKRIQERESKKKTEDEHFEFHSRPCPTKILEDVVGVPEKKVLPITVPKSPAFALKNRIRMPTKEDEEEDEPVVIKAQPVPHYGVPFKPQIPEARTVEICPFSFDSRDKERQLQKEKKIKELQKGEVPKFKALPLPHFDTINLPEKKVKNVTQIEPFCLETDRRGALKAQTWKHQLEEELRQQKEAACFKARPNTVISQEPFVPKKEKKSVAEGLSGSLVQEPFQLATEKRAKERQELEKRMAEVEAQKAQQLEEARLQEEEQKKEELARLRRELVHKANPIRKYQGLEIKSSDQPLTVPVSPKFSTRFHC

SEQ ID NO: 3623 - DNA, 501 bp, Homo sapiens
  misc_feature (10)..(10): n is a, c, g, or t
gggactcctnaagacccacaagtgacttctgtctacactacagatgaactgaattgatcatctaaaatacgtttatagcgttcattgtgccagttgctcatggttctgctagttggcccaggactagttgtgatctgcagactgaagccagagtaagtaagagaattcaaggcactaagacaaccaggaacagttttaccaaggcaagtggaagctgctaggctcagtggttgcatgcctatagatggggtaaatcatcctggtgcaaatatggtattcacaccataaatgtgtagtgcaagtttcctctgtggccaatcacagggctgcaagctgaagccccagtttagcttattctccatacataacttcaaggggactttctggtgaacttttccaagaagctccaagcacagatggttcaaatttgcagtttggctagactttgtgactggatgtacattaaattaaaaaaaaaaaaaaaaaaaaaagcggccgctt

SEQ ID NO: 3624 - DNA, 484 bp, Homo sapiens
ttttttttacatgtggtagcgcatttaatattcacagcaacacaaatgggaagtaatattcttatcgccattttacaaataaaaagaccaaggcccaaaagggttgaatatcttgctcaaaatcacacacattttgccaccccccattccaagtcccataggcaactcagactcagcatgtccatgatgtaacttatcttcctctccaaaccatttcctcacttgtgccctactctcagtggggacatctccaatccccaggcccaagctggaaaccggaagccatttctgactcctccctctccctcacccactccatccaaatggaacccaagtcctgtacattgtacttctccggtattgatcaatccccgctctcgtctccacgcccacggtgctgacccattgttaggtgcccggctgctgctcctgggtcatcactttcgcaggcccatctccaccatttccagcatcctacacactg

SEQ ID NO: 3625 - DNA, 522 bp, Homo sapiens
  misc_feature (22)..(22): n is a, c, g, or t
  misc_feature (24)..(24): n is a, c, g, or t
  misc_feature (27)..(27): n is a, c, g, or t
  misc_feature (349)..(349): n is a, c, g, or t
  misc_feature (414)..(414): n is a, c, g, or t
  misc_feature (461)..(461): n is a, c, g, or t
  misc_feature (512)..(512): n is a, c, g, or t
ctgttaatggcgggcagtagcntnganggggattgcagataaccgcttcccgcacgggaaagtctaccctgcctgccactttctgctagccgtcagcgccggagctcgccagcatgtctgtggtaccgcccaatcgctcgcagaccggctggccccgggggtcactcagttcggcaacaagtacatccagcagacgaagcccctcaccctggagcgcaccatcaacctgtaccctcttaccaattatacttttggtacaaaaagagcccctctacgagaaggacaagctctgttgcagccaagatttcagcgcatgagggaagaattttgataaaattggaatgaggangactgtagaaggggttctgattgtacatgaggcaccggttaaccccatggtgttactgctgcagntggggaacaaattttcttccaaattaccttggttggttgaacttaancccaggagaagatgaagtttgaagggcttaaaacggcttaatgacagaggntactggggtt

SEQ ID NO: 3626 - DNA, 1413 bp, Homo sapiens
tcgcacctggaaccccaacgtccccgagagtccccgaatccccgctcccaggctacctaagaggatgagcggtgctccgacggccggggcagccctgatgctctgcgccgccaccgccgtgctactgagcgctcagggcggacccgtgcagtccaagtcgccgcgctttgcgtcctgggacgagatgaatgtcctggcgcacggactcctgcagctcggccaggggctgcgcgaacacgcggagcgcacccgcagtcagctgagcgcgctggagcggcgcctgagcgcgtgcgggtccgcctgtcagggaaccgaggggtccaccgacctcccgttagcccctgagagccgggtggaccctgaggtccttcacagcctgcagacacaactcaaggctcagaacagcaggatccagcaactcttccacaaggtggcccagcagcagcggcacctggagaagcagcacctgcgaattcagcatctgcaaagccagtttggcctcctggaccacaagcacctagaccatgaggtggccaagcctgcccgaagaaagaggctgcccgagatggcccagccagttgacccgcctcacaatgtcagccgcctgcaccggctgcccagggattgccaggagctgttccaggttggggagaggcagagtggactatttgaaatccagcctcaggggtctccgccatttttggtgaactgcaagatgacctcagatggaggctggacagtaattcagaggcgccacgatggctcagtggacttcaaccggccctgggaagcctacaaggcggggtttggggatccccacggcgagttctggctgggtctggagaaggtgcatagcatcatgggggaccgcaacagccgcctggccgtgcagctgcgggactgggatggcaacgccgagttgctgcagttctccgtgcacctgggtggcgaggacacggcctatagcctgcagttcactgcacccgtggccggccagctgggcgccaccaccgtcccacccagcggcctctccgtacccttctccacttgggaccaggatcacgacctccgcagggacaagaactgcgccaagagcctctctggaggctggtggtttggcacctgcagccattccaacctcaacggccagtacttccgctccatcccacagcagcggcagaagcttaagaagggaatcttctggaagacctggcggggccgctactactcgctgcaggccaccaccatgttgatccagcccatggcagcagaggcagcctcctagcgtcctggctgggcctggtcccaggcccacgaaagacggtgactcttggctctgcccgaggatgtggccgttccctgcctgggcaggggctccaaggaggggccatctggaaacttgtggacagagaa

SEQ ID NO: 3627 - protein, 406 aa, Homo sapiens [sequence omitted]

SEQ ID NO: 3628 - DNA, 236 bp, Homo sapiens
ggcacgagggtttttgaagatggcggccctcaaggctctggtgtccggctgtgggcggcttctccgtgggctactagcgggcccggcagcgaccagctggtctcggcttccagctcgcgggttcagggaagtggtggagacccaagaagggaagacaactataattgaaggccgtatcacagcgactcccaaggagagtccaaatcctcctaacccctctggccagtgccccatct

SEQ ID NO: 3629 - DNA, 442 bp, Homo sapiens
  misc_feature (203)..(203): n is a, c, g, or t
  misc_feature (229)..(229): n is a, c, g, or t
  misc_feature (347)..(348): n is a, c, g, or t
agttcctgtattggtgaggcaaggaggaggcggagtgactcggcggccattagctgtgtgtagttgcccgggactaggagcttaagtgaagaggtacgccttgttcggtggaaatcagccgtagccatgagtttctgccggggctagccctagagtacggagcaggcggacttttcggttccccgccccgccaggtgcgctancatcagtgccgtccgggcatccccgngtctcaagtaggcctcatctgccggcaagggcgccctaaacgcgggaggcgccatgtcgctggttgcttacgccagcagcgatgagagcgagccggatgaggctgagcccgagccggnnagaagaggaagcggttggttccaaaatctgggcccgctttagggggcttggttcgcttctctccctgcgcccaagggtccggccttgctgcctc

SEQ ID NO: 3630 - DNA, 372 bp, Homo sapiens
tttttttttgagacggagtctagctctgttgcccaagctgaagcgcagtggtgccatctcggctcacttgcaacctctgcctcccgggtttaagcgattttcctgcctcggcctcccgagtagctgggatgacagcaggcagagcacacagagacacctctgtatgtgggtgcccagagggatgtgcctgagaacagcaaggcagctctacgcctgtggactggcaaccaccagagagtgggaaaggccaagtgtgggcagaggtgggtgtacagcaccctttactggatatactggtggaaacagactgggcaggcctctgtgcacaactaggcagtcattaaatcataaagcatgcaagtgccctacgat

SEQ ID NO: 3631 - DNA, 282 bp, Homo sapiens
  misc_feature (8)..(8): n is a, c, g, or t
  misc_feature (25)..(25): n is a, c, g, or t
  misc_feature (33)..(33): n is a, c, g, or t
aacaggangcagaggcatcatgganggtccccngggatggctggtgctctctgtgctggccatatcgctggcctctatggtgaccgaggacttgtgccgagcaccagacgggaagaaaggggaggcaggaagacctggcagacgggggcggccaggcctcaagggggagcaaggggagccgggggcccctggcatccggacaggcatccaaggccttaaaggagaccagggggaacctgggccctctggaaaccccggcaaggtgggctacccagggcccag

SEQ ID NO: 3632 - DNA, 700 bp, Homo sapiens
aaattacggctaggtagcgaggcctgggtgtgcgctttttagctgctcactggccccgcttgtctggccgactcatccgcccgcgaccctaatcccctctgcctgccccaagatgctgaagccagccctggagccccgagggggcttctccttcgagaactgccaaagaaatgcatcattggaacgcgtcctcccggggctcaaggtccctcacgcacgcaagaccgggaccaccatcgcgggcctggtgttccaagacggggtcattctgggcgccgatacgcgagccactaacgattcggtcgtggcggacaagagctgcgagaagatccacttcatcgcccccaaaatctactgctgtggggctggagtagccgcggacgccgagatgaccacacggatggtggcgtccaagatggagctacacgcgctatctacgggccgcgagccccgcgtggccacggtcactcgcatcctgcgccagacgctcttcaggtaccagggccacgtgggtgcatcgctgatcgtgggcggcgtagacctgactggaccgcagctctacggtgtgcatccccatggctcctacagccgtctgcccttcacagccctgggctctggtcagggacgcggcccctgggcgggttgctaggaaagcaccggttccagcccgaaacatgacgcttggaggctggccccaggg

SEQ ID NO: 3633 - DNA, 454 bp, Homo sapiens
tttttttttttttttttaataaggataccaatctcatcatgaaggaccagccctcattacctaatctaaccttaattacttcccaaaagccccatctccaaaccctatcacattgggggttagggtttcgacatgtgaattttgggggaatacaaatattcagtctgcaccagcaacaatatttatttatgacaaaggaattttatcacaaacattaccagaggaaaacagtcagaaaaacattattattggggctctttcagcctgacctgaacaatcatatcatcaaaagaactccacttaaaacactcttgccaaatcataaaagattcattatcactaattatagtttttggtcattcctaaggaagcggatgtttccatgcaagatgataccaaatggtttctctcaaaatgcactactaaaacaagtttctagattgacattagaaga

SEQ ID NO: 3634 - DNA, 329 bp, Homo sapiens
ctgggatgtgacgggcaccagaatgctccctctccaaaggttctaaggaccaaagctgacagtttctttacttggtagctgacagcatctactcctgaagaccggaaatatggcttgtaccatccaaaaggcagaagcacttgacggggctcatttgatgcagatcctctggtatgatgaggaagagtctctctacccagctgtatggttgagagacaactgtccgtgctctgattgctacctgggattctgcaaaagcacggaaacttctagtgggaagctcttgaatgtgaacattggaattaaaggcttgataatttgacagaaaa

SEQ ID NO: 3635 - DNA, 444 bp, Homo sapiens
tttcacggtccaggttggatgcaattattttgatccagtctttacttaattttaaaaattacaaaacataaaaacaaacaaaattttccctaagtggttcaatgcagaacacttgggaagttaagcatatatatatatatatatatatatatatatatatatatatatatataatattttacaacgcaattacatattgacaaattcaatgaaaaagtagaccatctaaatattttaagagattaaacttcacattctctgcaactagaaaaacaataagctactgcatatcagtacatgacattcaaatatattttaaaatgtacttccccctcttaaaatggcagtgagtatacattagtgcaaccacaaagcacttgtaaacttttttctgttcaacatcatccatgtccattagaacaaattctgtttggctggctccaa

SEQ ID NO: 3636 - DNA, 590 bp, Homo sapiens
  misc_feature (468)..(468): n is a, c, g, or t
  misc_feature (524)..(524): n is a, c, g, or t
gcaagttgggcaggatatggcctacttccataggcttttcttttttcaggtttgatgtaagcatgggcttacatcccccaggtacatacttttacttattgtgggataacctggcactagtaggcaggtaaagtcacaaatttggtgtcttttcaccttttgactgttgacttaatagctcctctcactctgcctggagatacttcctgcctcagatgaggagccagaagaaacagagcccgacttgaatgaactcagctcagagttctaaggaccagcattctgggggccattttctctacaggcaaatggaattgcttttccataacatccaaattgtaatgtggttgctgttgaaggaggaggcagcagcgaggtcctgcggtacccatggggtgatgctacttctgcatgcatctacagggcatctgacacctaacatgagacgtggcatgtgagatgagactnggcatgtgagacatagggtcactagagacccttttgggtcagaggagagagactgnattggactaaacccgtcctctgtttcccacacgtttctcatatagccttcagtcaatggaggagtc

SEQ ID NO: 3637 - DNA, 399 bp, Homo sapiens
ttttttttttttcgattttttttttttagtttaataaagtttgaaaactttcaaagctcctgtacaattccattaataccagacttggcaaaacgctaattctgtttgaaaaggtgtttttttaaaagtagtatatttgaacaatgtctaagtatgtggggtggggagaatccatatccgaatatcttcataaagcaagttcttaaaatttgcaaagctattaggttagtgcaaaagtaatcatggtttttcttttgcaccaactaatatttaccactgaacacgctggcatttagatcccttccttctttcagcatgctagacagtaaagagaatgggcatgaggtggcaggacagaaggaaagagtgaagataatggagttaggtcagtgagggata

SEQ ID NO: 3638 - DNA, 813 bp, Homo sapiens
  misc_feature (618)..(618): n is a, c, g, or t
gcggccgccagcgcggtgtagggggcaggcgcggatcccgccaccgccgcgcgctcggcccgccgactcccggcgccgccgccgccactgccgtcgccgccgccgcctgccgggactggagcgcgccgtccgccgcggacaagaccctggcctcaggccggagcagccccatcatgccgagggagcgcagggagcgggatgcgaaggagcgggacaccatgaaggaggacggcggcgcggagttctcggctcgctccaggaagaggaaggcaaacgtgaccgttgatccagatgaagaaatggccaaaatcgacaggacggcgagggaccagtgtgggagccagccttgggacaataatgcagtctgtgcagacccctgctccctgatccccacacctgacaaagaagatgatgaccgggtttacccaaactcaacgtgcaagcctcggattattgcaccatccagaggctccccgctgcctgtactgagctgggcaaatagagaagaagtctggaaaatcatgttaaacaaggaaaagacatacttaagggatcagcactttcttgagcaacaccctcttctgcagccaaaaatgcgagcatttcttctggattggntaatgggaggtgtgtgaagtctataaacttcacagggagaccctttacttggcacagatttctttgaccggattatgcgacacaagaaaatggtgtaaaaactttttacaggctaatgggaattaatctttattaattgcaccaaactggaggaaacattccccaaagttggaccattggggtagtaacagatgg

SEQ ID NO: 3639 - DNA, 612 bp, Homo sapiens
ggcacgagggcgccgtgctgagctctggctgtcagtgtgttcgcccgcgtcccctccgcgctctccgcttgtggataactagctgctggttgatcgcactatgactctggaagaagtccgcggccaggacacagttccggaaagcacagccaggatgcagggtgccgggaaagcgctgcatgagttgctgctgtcggcgcagcgtcagggctgcctcactgccggcgtctacgagtcagccaaagtcttgaacgtggaccccgacaatgtgaccttctgtgtgctggctgcgggtgaggaggacgagggcgacatcgcgctgcagatccattttacgctgatccaggctttctgctgcgagaacgacatcgacatagtgcgcgtgggcgatgtgcagcggctggcggctatcgtgggcgccggcgaggaggcgggtgcgccgggcgacctgcactgcatcctcatttcgaaccccaacgaggacgcctggaaggatcccgccttggagaagctcagcctgttttgcgaggagagccgcagcgttaacgactgggtgcccagcatcaccctccccgagtgacagcccggcggggaccttggtctgaacgacgt

SEQ ID NO: 3640 - DNA, 341 bp, Homo sapiens
  misc_feature (31)..(31): n is a, c, g, or t
  misc_feature (244)..(244): n is a, c, g, or t
  misc_feature (324)..(324): n is a, c, g, or t
ccaactataatcattcggcagacagctgggnagctctccttctccatcaaggtagcagaggatgtggccatggccttctcagctgaacaggacctgcagctctgtgttggggggtgccctccaagtcagcgactctctcgatcagagcgcaatcgtcggggagctataaccattgatactgccagacggctgtgcaaggaagggcttccagtggaagatgcttacttccattcctgtgtctttnatgttttaatttctggtgatcccaactttaccgtggcagctcaggcagcactggaggatgcccgagccttcctgccaggnttagaggaagctgcatc

SEQ ID NO: 3641 - DNA, 368 bp, Homo sapiens
  misc_feature (348)..(348): n is a, c, g, or t
  misc_feature (359)..(359): n is a, c, g, or t
ttttttttttaacacctactatgtattattctggagactgggctaatggacatgaggactcaaggcggaacccaaagagatcacagctctggctgaagatgcaaagaaatgatttggtgattacacttttctttgttatctctagctacccttcattagcatgaatgattgagagattacgatacttaaaatgctggcatacaatatacagtcagctctcaatttccagtgtgcaacgaaataactgaggctctctaaggcttaccctaagtcccaggggatctgctaggcagctcagcacatccccagctcacaccccttcactgctcagcctgtgtgtctgcacanactgcagcccntcttgaggt

SEQ ID NO: 3642 - DNA, 657 bp, Homo sapiens
  misc_feature (576)..(576): n is a, c, g, or t
  misc_feature (609)..(614): n is a, c, g, or t
  misc_feature (616)..(618): n is a, c, g, or t
  misc_feature (622)..(623): n is a, c, g, or t
  misc_feature (627)..(628): n is a, c, g, or t
  misc_feature (634)..(634): n is a, c, g, or t
cttgaggagctgtacagccaggttgcagtccagccggtaccgctcattgagctcttccagcttgttgatggtgttcttggcatccagcagcttgttggtcagctccacaatctcccagtccagcgtcttcctatccatctcagccttcttgatcagtgtgtgcagcttgtcctccaactcctggttggtccgctgggaagccgtgtagctgttctgcagcctgcggaacttatccttaaatttgtccagctcctcgcggctctggcccagctccagctccaggcagtcctgcccaatttccagctcacgttccagggcctcagtgcgtctggtggcggaggccaggcgccggcgaagctcttcattctcctcctgtaagagcctggcagggtgttgtgggatcaagggcagaggggtatgagagatagaagggcatgccctggagctccagagtgggctcaggaaggaagggatgacatgaggacaggcaaacaggacagggaaactcctggagtcttagtctgagtctaaggcagcatatttcataggcctgctggccctgggaacacagcctgngttggagggtcaggggaggaaagagggattgtnnnnnntnnntttnntttnntttttnttttttttttttttttttttttt

SEQ ID NO: 3643 - DNA, 2010 bp, Homo sapiens
attcattccctgtcctcggatcacagtctcttctcactacagtgtcgccgcctctgcctgcgtagccccggccatggctctgtagcctcgacccctttgtgcccccggcccgtctccgcgctcaccacgcctgcgctctccgctcccaccttctttcttcagccgaggccgccgccgcctctccttgctgcagccatggagtcttccactttcgccttggtgcctgtcttcgcccacctgagcatcctccagagcctcgtgccagctgctggtgcagcctctcctgttgccatcagtgcccagcacctgtgctacagccatgtcactcctggcgaccctggggctggagctggacagggccctgctcccagctagtgggctgggatggctcgtagactatgggaaactccccccggcccctgcccccctggctccctatgaggtccttgggggagccctggagggcgggcttccagtggggggagagcccctggcaggtgatggcttctctgactggatgactgagcgagttgatttcacagctctcctccctctggagcctcccctaccccccggcaccctcccccaaccttccccaaccccacctgacctggaagctatggcctccctcctcaagaaggagctggaacagatggaagacttcttcctagatgccccgcccctcccaccaccctccccgccgccactaccaccaccaccactaccaccagccccctccctccccctgtccctcccctcctttgacctcccccagccccctgtcttggatactctggacttgctggccatctactgccgcaacgaggccgggcaggaggaagtggggatgccgcctctgcccccgccacagcagccccctcctccttctccacctcaaccttctcgcctggccccctacccacatcctgccaccacccgaggggaccgcaagcaaaagaagagagaccagaacaagtcggcggctctgaggtaccgccagcggaagcgggcagagggtgaggccctggagggcgagtgccaggggctggaggcacggaatcgcgagctgaaggaacgggcagagtccgtggagcgcgagatccagtacgtcaaggacctgctcatcgaggtttacaaggcccggagccagaggacccgtagctgctagaagggcaggggtgtggcttctgggggctggtcttcagctctggcgccttcatccccctgcctctaccttcattccaaacccctctcggccgggtgcagtggcttatgcttgtaatcccagcactttgggaggccaaggcaggaggatcgtttgaggccaggaggtcaataccagcctgggcaacatagtaagaccctgtctctattaaaaaaaaaaaatcaacccttcttccccaccaaaccacccaactcctctctactcttatccttttatcctctgtctctgcttatcacctctcttgcgtatttctggatctccttccctcctttctcgtccaaatcatgaaatgtttggccttagtcaatgtctatgcccgtcacataacagccgaggcaccgaggcccacagggaagcagctgggagcttggaaacctggtctcttgaatttcaaacctggtttcttacaggtggttgtctggggtgggtggagtggcgacaggatagagctgaaggactatgcaaatgaggaagtaagtcagggcgggctttgagaaggggacccatatcctacaggcaaaaagcaggctaggtgaccttgggacactacgctaagggagggaggctaaaggcggccaggtttgcagtgcgggaagatgagcaggccagtgggaggaggggcagggcagggctgtagttggtgactgggtgttcattttagctctaagaaaaaaaatcagtgtttcgtgaaggtgttggagaggggctgtgtctgggtgagggatggcggggtactgatttttttgggaggttatgagcaaaaataaaacgaaacatttcctctg

SEQ ID NO: 3644 - protein, 282 aa, Homo sapiens
MSLLATLGLELDRALLPASGLGWLVDYGKLPPAPAPLAPYEVLGGALEGGLPVGGEPLAGDGFSDWMTERVDFTALLPLEPPLPPGTLPQPSPTPPDLEAMASLLKKELEQMEDFFLDAPPLPPPSPPPLPPPPLPPAPSLPLSLPSFDLPQPPVLDTLDLLAIYCRNEAGQEEVGMPPLPPPQQPPPPSPPQPSRLAPYPHPATTRGDRKQKKRDQNKSAALRYRQRKRAEGEALEGECQGLEARNRELKERAESVEREIQYVKDLLIEVYKARSQRTRSC

SEQ ID NO: 3645 - DNA, 410 bp, Homo sapiens
tccttttttttttttttacttaatgtgcagttttcagttgcagttatctgtctgaagcttattaacccattctttagttttaaaacttattggtttcaacccagaaataagaaccaaagggaaagaaattccatcaaatcaaaccagtccccccaaatacaaccttcctttttgttttaagcaagaaatgaaaaaaaccaaaaacatgttaaatattttccttcttttactccgaagtgttattgaagttgcaaaattagcctcagttagactgagtaaggaaaacaaaaagctaaacaaaaggcagtatgtacctaaactgctcctcaaatcagtttgattgagttttccagcagcccctttaaaaggggctttactgacccattaaatttaatgtgaggctatgtttg

SEQ ID NO: 3646 - DNA, 259 bp, Homo sapiens
tttttttttttttttttcatcatctcaagaaatcaaaggcatgcacctggaaaaagaaaacacacttttgaagtcttctaatcactagggctctgtattttgttgcagtcctatagtgtgggtatttaaagaataaggccaggcaactctgtctctagtctttgttcattcatttgatgcgtccttgagcaccttactaagcaccagtcaatgttgtggacaatggggatatagcatgatgaagccagacctcgtgccg

SEQ ID NO: 3647 - DNA, 446 bp, Homo sapiens
cacgagggcaaatggaacattgaacattttggaagaggagaaccatattaaagatgctctgtctcgaattgtagtggaaatgatcaagcgagagtggccacagcattggcctgacatgctaatagaattggacactctttccaaacaaggggaaacacagacagaattggtgatgtttatccttttgcgactggcagaggatgtagtgacttttcagacacttccccctcaaagaagaagggacatccagcaaacattaacccagaacatggaaaggatcttcagttttctgcttaacacacttcaagaaaatgtaaacaagtatcagcaagtgaagacagatacttctcaggagtcaaaggcgcaagcaaactgtcgagtaggagttgcagcactgaatactctagcaggctatattgactgggtgtctatgagtcacatcactg

SEQ ID NO: 3648 - DNA, 661 bp, Homo sapiens
ttttacagtggtaaagcagcagtttttatttattacaaattctaaaaaagaatccaactttataagtaaaaaggaacactgatgatcacttaaaacatttaaatttaaaattactactaaaaaaaccctgtacattcacacaagtccaatgcctttgttggtttttacagacatagaatttctgtagggttttgggccctatcaacaatttttattaagtactgcaataacaaaatacagcaataaaacaactggacactcctaggggacaccaaagataaagggcccattaatcaggtgtaggccagagaaacccaacctgttggcaatatgacgctctttcccaactgggtcttggtgagacacgtggcacagcaaggctgtcagtgcatgtgcataaattgtagaccaggtcccactatgctacttcaggattcagccagcccttctatgagtcacagaggtcccttggtcgttattcatcttgatatactcatgggatgtttggaattaaggagcccaactaccttacttgcatttgaagtctttcacttcatatcctacccctcagtctaagagcccaccaacaagggtagctacacctagatgctcacatctataggctgcctgaatcctggaccagctcgggccctgatatgat

SEQ ID NO: 3649 - DNA, 281 bp, Homo sapiens
tagagtcatccccgcgccaaatgtgaacccgcctgtaggggccccagtgcctccaaaattaaacccgctcatggctccggactctggtggcggcagctactctgtctcccaaatgcaaatccgtcggtgtctgcagccttgggaagatttcacgcctgcgctctccgctcccaccttctttcttcagccgaggccgccgccgcctctccttgctgcagccatggagtgagtaaccgcttacctcttctccaactgcctttcccgccctttcacatttggcg

SEQ ID NO: 3650 - DNA, 334 bp, Homo sapiens
  misc_feature (287)..(287): n is a, c, g, or t
agcggggcattgtgggaagcgcccgcgctttcggcgggttccgttaaaatggcgccctggtggccggcggcgcccgcgccttagcctgtcaggagcagggagcttgcggggcgcaggaagggcgcgggccgcggtccctgcgcgtgcggcggcagtggcggctctgcccggaccaccgtgcacggctccgggcgaggatggcgaccccggaccagaagtcgccgaacgttctgctgcagaacctgtgctgcaggatcctgggcaggagcgaagctgatgtagcccancagtttccatttgcgttgtgcggggtgatgggcagcaaccttcgccc

SEQ ID NO: 3651 - DNA, 1122 bp, Homo sapiens
gctcctcgccccgcgcctgcccccaggatggtccgcgcgaggcaccagccgggtgggctttgcctcctgctgctgctgctctgccagttcatggaggaccgcagtgcccaggctgggaactgctggctccgtcaagcgaagaacggccgctgccaggtcctgtacaagaccgaactgagcaaggaggagtgctgcagcaccggccggctgagcacctcgtggaccgaggaggacgtgaatgacaacacactcttcaagtggatgattttcaacgggggcgcccccaactgcatcccctgtaaagaaacgtgtgagaacgtggactgtggacctgggaaaaaatgccgaatgaacaagaagaacaaaccccgctgcgtctgcgccccggattgttccaacatcacctggaagggtccagtctgcgggctggatgggaaaacctaccgcaatgaatgtgcactcctaaaggcaagatgtaaagagcagccagaactggaagtccagtaccaaggcagatgtaaaaagacttgtcgggatgttttctgtccaggcagctccacatgtgtggtggaccagaccaataatgcctactgtgtgacctgtaatcggatttgcccagagcctgcttcctctgagcaatatctctgtgggaatgatggagtcacctactccagtgcctgccacctgagaaaggctacctgcctgctgggcagatctattggattagcctatgagggaaagtgtatcaaagcaaagtcctgtgaagatatccagtgcactggtgggaaaaaatgtttatgggatttcaaggttgggagaggccggtgttccctctgtgatgagctgtgccctgacagtaagtcggatgagcctgtctgtgccagtgacaatgccacttatgccagcgagtgtgccatgaaggaagctgcctgctcctcaggtgtgctactggaagtaaagcactccggatcttgcaactccatttcggaagacaccgaggaagaggaggaagatgaagaccaggactacagctttcctatatcttctattctagagtggtaaactctctataagtgttcagtgttcacatagcctttgtgcaaaaaaaaaaaaaaaaaaaaa

SEQ ID NO: 3652 - protein, 344 aa, Homo sapiens
MVRARHQPGGLCLLLLLLCQFMEDRSAQAGNCWLRQAKNGRCQVLYKTELSKEECCSTGRLSTSWTEEDVNDNTLFKWMIFNGGAPNCIPCKETCENVDCGPGKKCRMNKKNKPRCVCAPDCSNITWKGPVCGLDGKTYRNECALLKARCKEQPELEVQYQGRCKKTCRDVFCPGSSTCVVDQTNNAYCVTCNRICPEPASSEQYLCGNDGVTYSSACHLRKATCLLGRSIGLAYEGKCIKAKSCEDIQCTGGKKCLWDFKVGRGRCSLCDELCPDSKSDEPVCASDNATYASECAMKEAACSSGVLLEVKHSGSCNSISEDTEEEEEDEDQDYSFPISSILEW

SEQ ID NO: 3653 - DNA, 517 bp, Homo sapiens
  misc_feature (125)..(125): n is a, c, g, or t
  misc_feature (214)..(214): n is a, c, g, or t
  misc_feature (224)..(225): n is a, c, g, or t
  misc_feature (228)..(228): n is a, c, g, or t
  misc_feature (230)..(230): n is a, c, g, or t
  misc_feature (245)..(245): n is a, c, g, or t
  misc_feature (255)..(255): n is a, c, g, or t
  misc_feature (297)..(297): n is a, c, g, or t
  misc_feature (313)..(313): n is a, c, g, or t
  misc_feature (320)..(320): n is a, c, g, or t
  misc_feature (435)..(435): n is a, c, g, or t
  misc_feature (481)..(481): n is a, c, g, or t
  misc_feature (490)..(490): n is a, c, g, or t
  misc_feature (504)..(504): n is a, c, g, or t
  misc_feature (510)..(510): n is a, c, g, or t
aagtttctcgggacgggcaggagggggtggggactgccatatatagatcccgggagcaggggagcgggctaagagtagaatcgtgtcgcggctcgagagcgagagtcacgtcccggcgctaccangcccagacccaggcccaccgtggtgcacgcaaaccacttcctggccatgcgctccctcctgcttctcagcgccttctgcctcctggagncggccctgcnntgngntgaagaaacctgcangccgcagcangctcctggcactgcggagaagttgagccccaaggcggccacntttgccgagcgcagcncggcctnggcctttcagcttgtaccaggccatggccaaggaccaggcagtggagaacatcctggtgtcacccgtggtggtggcctcgtcgctggggctcgtgtcgctgggcggcaaggcgancacggcgtccaggccaaggcagtgctgagcgccgagcagctgcgcnacgaagaangttgcacgccggcntgggcnaagcttg

SEQ ID NO: 3654 - DNA, 434 bp, Homo sapiens
tttttttttttttttttagggtaccaagtgtgtatttcaatttactgtatgcaatctaacaaaaatttggtcataatttaccagatatacataaatgatttaagtagtaaaagaaaattcagcttcaagagagtaagttcatatcttgaggaaaagtaaaagtacattaagaatgtaaagccaagtccagtttctatgcaataagtgaactgtagtctaataaagcagatttaggtgatttttagatatatatctttgttctttaatatatatttatatatagacagatctaccaattgtaaactagtttatttaaaggaaggggataaatgggatgaaagaaatctttatactatacttacatattcacaaagaacattttacgtttaaaatactttttcattcatagtatctttgcccaactaatttctacc

SEQ ID NO: 3655 - DNA, 144 bp, Homo sapiens
agttccttacaaactgccgacttggctcaacaaactgcattaccttatccatgactgcctacccgatcgcacacctaaaatgccaggcacacgtagcactggagcttgctgcatagacgcccaccggtgctgtgtggaagggag

SEQ ID NO: 3656 - DNA, 139 bp, Homo sapiens
cctcgacactgttggcctactgacttgcctggacgctgcgccacatcccaccggcccttacactgtggtgtccagcagcatccggcttcatggggggacttgaaccctgcagcaggctcctgctcctgcctctcctgct

SEQ ID NO: 3657 - DNA, 386 bp, Homo sapiens
  misc_feature (273)..(273): n is a, c, g, or t
  misc_feature (313)..(313): n is a, c, g, or t
  misc_feature (354)..(354): n is a, c, g, or t
  misc_feature (366)..(366): n is a, c, g, or t
tttttttttttttttctttttcttcttttaattttgttcaacattaaaggagggacttcataaacattgattgtcatttacagaaaacattcagaaatcatgtgtgcattatcccgggaatgctaacagtattgaactaataatttacaggacataaaataaggacaaaaacctattacattctaaagtaatataaaactcttttttaattgttagggagtgctgttttattctagtatatttatgattaaaaaaactcaatacttacttccnaaatgactcaggctgcagttttactcacatacacaggaanttaggggcttatatattaaacagggagagaggagatccagnaaattgtagggntttttaaaacctatatatgg

SEQ ID NO: 3658 - DNA, 403 bp, Homo sapiens
ctttcagctccaagaccaacacgctggtggtgaggcagcgctgcgggcggccaggaggtggggtgctgctgcggtatgggagccagcttgctcctgaaaccttctacagagaatgtgacatgcagctctttgggccctggggtgaaatcgtgagcccctcgctgagtccagccacgagtaatgcagggggctgccggctcttcattaatgtggctccgcacgcacggattgccatccatgccctggccaccaacatgggcgctgggaccgagggagccaatgccagctacatcttgatccgggacacccacagcttgaggaccacagcgttccatgggcagcaggtgctctactgggagtcagagagcagccaggctgagatggagttcagcgagggcttcct

SEQ ID NO: 3659 - DNA, 521 bp, Homo sapiens
  misc_feature (473)..(473): n is a, c, g, or t
tttttttttttttttttttcttcctaagtggcccacttatttaatgagtattggataaaaacaaaattctagtacaactgaaggctgtaaatcctgagagttggttataataggatctggcctggatttttaaatggcacaccattcaaaaagtggttgggaacataaaaggttctccacaaaagccttttgctgcagaaggtggcttggatggctaaagtagtatttactcttagcaattaaccaccaaagcatttagttatttgcatcccagcaaaacaacaatcccacactttactccatcacacctggaatccaagaggtctacaagtccaaagacaactgtgttatcagctttgcatgggaaagacaggaggtagctaaactgacctgtaggtgccctttcagtgtggctagggtcatctgagcagtcagggagtctctcattcatcaacagtttagcctcctttagnggtgattatttgacttatctgcaaaatggaagagccccagctacttgg

SEQ ID NO: 3660 - DNA, 817 bp, Homo sapiens
gaaggaggcccagacagtgagggcaggagggagagaagagacgcagaaggagagcgagcgagagagaaagggttctggattggaggggagagcaagggagggaggaaggcggtgagagaggcgggggcctcgggagggtgaaaggagggaggagaagggcggggcacggaggcccgagcgagggacaagactccgactccagctctgacttttttcgcggctctcggcttccactgcagccatgtcactcctcttgctggtggtctcagcccttcacatcctcattcttatactgcttttcgtggccactttggacaagtcctggtggactctccctgggaaagagtccctgaatctctggtacgactgcacgtggaacaacgacaccaaaacatgggcctgcagtaatgtcagcgagaatggctggctgaaggcggtgcaggtcctcatggtgctctccctcattctctgctgtctctccttcatcctgttcatgttccagctctacaccatgcgacgaggaggtctcttctatgccaccggcctctgccagctttgcaccagcgtggcggtgtttactggcgccttgatctatgccattcacgccgaggagatcctggagaagcacccgcgagggggcagcttcggatactgcttcgccctggcctgggtggccttccccctcgccctggtcagcggcatcatctacatccacctacggaagcgggagtgagcgccccgcctcgctcggctgcccccgccccttcccggcccccctcgccgcgcgtcctccaaaaaaataaaactttaacggcgg

SEQ ID NO: 3661 - protein, 163 aa, Homo sapiens
MSLLLLVVSALHILILILLFVATLDKSWWTLPGKESLNLWYDCTWNNDTKTWACSNVSENGWLKAVQVLMVLSLILCCLSFILFMFQLYTMRRGGLFYATGLCQLCTSVAVFTGALIYAIHAEEILEKHPRGGSFGYCFALAWVAFPLALVSGIIYIHLRKRE

SEQ ID NO: 3662 - DNA, 593 bp, Homo sapiens
tttttttttttttgaatagtttaatagttattatttaaataaggctttggcgtgcttttccacatttttaggtttttttctctatgtgtacaccttgcaagatgtatcattaactcatgaaaccaccagctcctcaggcaacgaaaagggaggtagaaagaacgccagaaaggtgggtctgtgtgttctggggtgcgttgggccgccccgaggaaggtgccaacgtccctggagagcagaattaccaggctgggaaagccatgcgggttcgagaacctgggccatgggcatgctgggcagggcaaaggggtttcccaagccgtctgccactgagaacactgttaattccggaggttccacagaggggaaaacggcccaagggtcccggaacaaggaaggttcttaggccggcacccaacaattgccctgggggtttctttaggtttcttggggacaccgaaacttttgagtcctgtttcaagggtggctacctggggaagcttgccaaaatcttagaaaattttggctgttttttacttggaatttctgtaagggttgtttaacccagggtaccttaaaaatccacaatgtgt

SEQ ID NO: 3663 - DNA, 445 bp, Homo sapiens
aatttgtggaactgcagcttttttattttctattgcatcaaatggcacttgtggtttttcaatgttcttatcttctgtgaaagaattccattccagtggatgtggctgtgtctttttattcatgaactgaaattgttcaaatacatttaaaagagaccagtattgggtcaggactgagccaggatttcccacaggatttgccacatcataaaattcatgcatcagtgactgaatcccaggagtagtagatgggaagagcagttggaattgtcccagacttccaagttcctttatgaaagtcataattgagttaatttcttctaaggacagacactgatttagttccttttgatagttttcacccttgaaaacatctgatctataaagtctctgaaatatctcagaaaatatggaaagtgatgattcattagggaagagaaaattg

SEQ ID NO: 3664 - DNA, 3010 bp, Homo sapiens
agtgcctaatgggtgttgttcctggctggacttgatgtccagggcctgaggggttttctcgccgagtctcctggggcggtccggaggctcgtgccctgttgtggggcccccatttgccgccgccatgcccacggccgccgcccccatcatcagctcggtccagaagctggttctgtatgagactagagctagatactttctagttgggagcaataatgcagaaacgaaatatcgtgtcttgaagattgatagaacagaaccaaaagatttggtcataattgatgacaggcatgtctatactcaacaagaagtaagggaacttcttggccgcttggatcttggaaatagaacaaagatgggacagaaaggatcctcgggcttatttcgagcggtttcagcttttggtgttgtgggttttgtcaggttcttagaaggctattatattgtgttaataactaaaaggaggaagatggcggatattggaggtcatgcaatctataaggtcgaagatacaaatatgatctatatacccaatgattctgtacgggttactcatcctgatgaagctaggtatctacgaatatttcaaaatgtggacctatctagcaatttttactttagttacagctatgatttgtcccactcacttcaatataatctcactgtcttgcgaatgcccctggagatgttaaagtcagaaatgacccagaatcgccaagagagctttgacatctttgaagatgaaggattaattacacaaggtggaagcggggtatttgggatctgtagtgagccttatatgaaatatgtatggaatggtgaacttctggatataattaaaagtactgtgcatcgtgactggcttttgtatattattcatgggttctgtgggcagtcaaagctgttgatctatggacgaccagtgtatgtcactctaatagctagaagatccagtaaatttgctggcacccgttttcttaaaagaggtgcaaactgtgagggtgatgttgcaaatgaagtggagactgaacaaatactctgcgatgcttctgtgatgtctttcactgcaggaagttattcttcatatgtacaagttagaggatctgtgcccttatactggtctcaggacatttcaactatgatgcctaaaccacctattacattggatcaggcagatccatttgcacatgtggctgcccttcactttgaccagatgttccagaggtttggctctcccatcatcatcttgaatttagtgaaggaacgagagaaaagaaagcatgaaagaattctgagtgaagaacttgttgctgctgtgacctatctcaaccaatttttgcctcctgagcacactattgtttatattccctgggacatggccaagtataccaaaagcaagctgtgtaatgttcttgatcgactaaatgtgattgcagaaagtgtggtgaagaaaacaggtttctttgtaaaccgccctgattcttactgtagcattttgcggccagatgaaaagtggaatgaactaggaggatgtgtgattcccactggtcgcctgcagactggcatccttcgaaccaactgtgtggactgtttagatcgcaccaacacagcacagtttatggtgggaaaatgtgctctggcctatcagctgtattcactgggactgattgacaaacctaatctacagtttgatacagatgcagttaggttatttgaggaactctatgaagatcatggtgataccctatcccttcagtatggtggttctcaacttgttcatcgtgtgaaaacctacagaaagatagcaccatggacccagcactccaaagacatcatgcaaaccctgtctagatattacagcaatgctttttcagatgccgatagacaagattccattaatctcttcctgggagttttccatcccactgaagggaaacctcatctctgggagctcccaacagatttttatttgcatcacaaaaataccatgagacttttgccaacaagaagaagttatacttactggtggacaccagaggtgataaagcatttaccattgccctatgatgaagttatctgtgctgtgaacttaaagaagttgatagtgaagaaattccacaaatatgaagaagagattgatatccacaatgagttctttcggccatatgagttgagcagctttgatgataccttttgcttggctatgacaagctcagcacgtgactttatgcctaagaccgttggaattgatccaagtccatttactgtgcgtaaaccagatgaaactggaaaatcagtattgggaaacaaaagcaatagagaagaagctgtattacagcggaaaacggcagccagcgccccgccgccccccagcgaggaggctgtgtccagcagctctgaggatgactctgggactgatcgggaagaagagggctctgtgtctcagcgctccactcccgtgaagatgactgatgcaggagacagtgccaaagtgaccgagaatgtggtccaacccatgaaggagctatatggaattaacctctcagatggcctctcagaagaagatttctccatttattcaagatttgttcagctggggcagagtcaacataaacaagacaagaatagccagcagccctgttctaggtgctcagatggagttataaaactaacacccatctcagctttctcgcaagataacatctatgaagttcagcccccaagagtagacagaaaatctacagagatcttccaagcccacatccaggccagccaaggtatcatgcagcccctaggaaaagaggactcctccatgtaccgagagtacatcaggaaccgctacctgtgaaaagagcgcaggtccacctggtggacacgtctgattagcttagaacctgtcttgtctcatcttcaaaaggtaacttattaaaagtcctttgcgtctgaagcctttctccttttctgtcatttgcaaattccaaattatagctaataaagatgactagataac

SEQ ID NO: 3665 - protein, 907 aa, Homo sapiens
MPTAAAPIISSVQKLVLYETRARYFLVGSNNAETKYRVLKIDRTEPKDLVIIDDRHVYTQQEVRELLGRLDLGNRTKMGQKGSSGLFRAVSAFGVVGFVRFLEGYYIVLITKRRKMADIGGHAIYKVEDTNMIYIPNDSVRVTHPDEARYLRIFQNVDLSSNFYFSYSYDLSHSLQYNLTVLRMPLEMLKSEMTQNRQESFDIFEDEGLITQGGSGVFGICSEPYMKYVWNGELLDIIKSTVHRDWLLYIIHGFCGQSKLLIYGRPVYVTLIARRSSKFAGTRFLKRGANCEGDVANEVETEQILCDASVMSFTAGSYSSYVQVRGSVPLYWSQDISTMMPKPPITLDQADPFAHVAALHFDQMFQRFGSPIIILNLVKEREKRKHERILSEELVAAVTYLNQFLPPEHTIVYIPWDMAKYTKSKLCNVLDRLNVIAESVVKKTGFFVNRPDSYCSILRPDEKWNELGGCVIPTGRLQTGILRTNCVDCLDRTNTAQFMVGKCALAYQLYSLGLIDKPNLQFDTDAVRLFEELYEDHGDTLSLQYGGSQLVHRVKTYRKIAPWTQHSKDIMQTLSRYYSNAFSDADRQDSINLFLGVFHPTEGKPHLWELPTDFYLHHKNTMRLLPTRRSYTYWWTPEVIKHLPLPYDEVICAVNLKKLIVKKFHKYEEEIDIHNEFFRPYELSSFDDTFCLAMTSSARDFMPKTVGIDPSPFTVRKPDETGKSVLGNKSNREEAVLQRKTAASAPPPPSEEAVSSSSEDDSGTDREEEGSVSQRSTPVKMTDAGDSAKVTENVVQPMKELYGINLSDGLSEEDFSIYSRFVQLGQSQHKQDKNSQQPCSRCSDGVIKLTPISAFSQDNIYEVQPPRVDRKSTEIFQAHIQASQGIMQPLGKEDSSMYREYIRNRYL

SEQ ID NO: 3666 - DNA, 439 bp, Homo sapiens
  misc_feature (311)..(311): n is a, c, g, or t
  misc_feature (419)..(419): n is a, c, g, or t
tttttttttaagttaaatatcaacctatagataaagaaatgatcttgacagtctgacctatgacttagtaaaactttggtgctgggctcatggggccagcgcctggcaccttgggagagtgtatcaacctgaaagacactacacagagtgctgagcctgaggagggaagcaggcagggtccactggcagagaggctgtgtgagagaagcagattatgctccttggtctattttgtttcctttgggatctgtgttttgggaaggtccctttcctgaggttggaggttacgatcaggaaggctagctggggcntgggcctccaagttgcccaattacttcttctcttcctctcttgggagggacaaaagtcaatgctgaggatttgggcctgccctcccgtctgtgtttaaaagggcagtngaggtgcaaaggttgacaga

SEQ ID NO: 3667 - DNA, 455 bp, Homo sapiens
tttgagatggagtcttgctgtgtcacccaggctagactgcagtggtgcaatctcagctcactgcaacctccgtctcctgggttccagcgattctcccgcctcagcctcccaagtagctaggaccacaggcgcccgccaccacgcccagctaatttttgcatttttagtagaaatgggatttcaccatgttggccaggctggtcgtgaactcctgacctcatgatccacttgccttggcctcccaaagcgatgggatcacaggcgtgagccaccgcacctggtccacttcagatatttagatacagacggcaaatttatttaaatgtctcaatacatttaaatgtagttacctaaatatatctaatatatttaaatgcagagagcaaatttgcgtttacaaatctgacatggaattcaactgtgctagccaagattcggtgtagcttaccagccag

SEQ ID NO: 3668 - DNA, 569 bp, Homo sapiens
cggcgggcgcagacagcggcgggcgcaggacgtgcactatggctcggggctcgctgcgccggttgctgcggctcctcgtgctggggctctggctggcgttgctgcgctccgtggccggggagcaatgcgccaggcaccgccccctgctcccgcggcagctcctgtgagcgcggacctggacaatgtgcatggactgctgcgtcttgcagggcgctgaccgcacagcgacttctgcctgggctgcgctgcaagcacctcctgcccccttccggctgctttggcccatccttgggggcgctctgagcctgaccttcgtgctggggctgctttctggcttttgggtctggagacgatgccgcaggagagagaagttcaccacccccatagaggagaccggcggagagggctgcccagctgtggcgctgatccagtgacaatgtgcccccttgccagccggggctcgcccactcatcattcattcatccaattctagagccagtctctgcctcccagacgcggcgggagccaagctcctccaaccacaagggtggttggggggcggtgaaata

SEQ ID NO: 3669 - DNA, 352 bp, Homo sapiens
atccaaaagaaagctatgtctggttaggtaaatcatacacctgtatccagagttttgttttgtttttttttttaggtttttctttttaatgaaggtcttacaactattttccttttattaccactacgtacttctaaatattaatgtttttacaaaagcactgtaatggtttttttgtttttaaagaaataaattttcagttacttcttttggatgtcccagatacactaatcgtttgcaagtaacaataatatggcattctcatttccagccttcacatctcaggagagtattaaagggtggtattggagcacaccctcaggacatgtttgttttcaaatttagattctct

SEQ ID NO: 3670 - DNA, 253 bp, Homo sapiens
gatccccgcttatccaccctgtagtccaaagtaccccgtcgaccccagcacggccgctccaccgcctcctactagacccagtcctagggactgcgcagtcgcagagctccgtccgagtaccggaagcctaggcgccagcacttccgggaagtgacttcgtctccgaagccgattggttgttgctttgctcccgctcgcgtcggtggcgtttttcctgcagcgcgtgcgtgctgcgctactgagcagcgccatg

SEQ ID NO: 3671 - DNA, 315 bp, Homo sapiens
tttttttttttttttttgaatgctttttaaaaatgcaacttgtttgcattttgtttgtccaaatttggtgactggtcacagatcacttggtgtccaactggctttttcatagcctttcagtagagaatagaaccccctcacattaagcacaataacatgacctctaaaatgtcaagttctgctgcagtggtgccatcattattgtcactgaggacttttcaaccaccatgtctttgttagttggaattctgaattttccagtgggatctatggcattaaaaccaaagaggaaacaggtcaggcactctccaggaa

SEQ ID NO: 3672 - DNA, 541 bp, Homo sapiens
  misc_feature (453)..(453): n is a, c, g, or t
  misc_feature (515)..(515): n is a, c, g, or t
  misc_feature (523)..(523): n is a, c, g, or t
  misc_feature (529)..(529): n is a, c, g, or t
atatttattgggcatcggtgatgtgtcaggcacagtccttggcacacagaatacagcagtgaattaaacaggcaaaaattcctcccctcctggagctcagtgtcaggaaagggggtgataaatgacaatcaaatcgacatggaggttgagcacctctgtactcagccctctgtctgtccttctgaggacgcaacaagcctggttccctagagctcactttgaccctcaatatgttcataatttccctgctgcttctcccatcgttagacatctgccagtaagcctgctgagagaagcctcagcccactcatacctagagacgctggctggggaaggtcagcacacccaagaaactttgggagtgtgtgtctgttttggtttgtgagaaaagtagctgcccctcattctgggccagttctttccagtagccatggggctggggtaacaaggaangcaaaactggcccatgcaaaggagaacacaggttcactttttcaaacacttgcatcattacncttaaaanttaggntgttatgcgttt

SEQ ID NO: 3673 - DNA, 507 bp, Homo sapiens
ggtgcggcaacgaccagagttcatatttaatagtccatgaggcacaagatatacaacacgcacttaatattcattaatcagtatatattcataaggtactaaatataccggagatattaaacgtgcacgggtcttaattctgccacccagtggagacactcaaaagtgatctcgccaaagaaatgcaaaacctgtacctgcccaccaggctattagcatgctactgctgtggtcaccattctttcactgcatcgccctgccctgcatcggaatatagcaccttgaacacgggatcaggtttactgaattctgtgacccacgctgggagctcaataaatgtttgctaaacggaaatgaacccaattcagaccgtgtggaaaccccagattatatcttttctccagacattcaatttctaagcagtatttttgaaaatgcgtgatggctaaattcgagttatcctttttgtatgtatgttaggcacacaaccggcgatgacatacaagg

SEQ ID NO: 3674 - DNA, 456 bp, Homo sapiens
ttttatgaagaaagaggtttaattgactcacagttctgcaggctgtacaggaagcatggctggggaggcctcaggaaactgacaatcatgcagaaggcaaaggggaagcaggcacgtctggccatggtggagcaggagagacagagagagtgaagcgggaggtgctgcacacttttcaacaagcagatcccacgagggctcactcactgtcacgagaacagcaagggggacgtcggcccccatgagccaatcacctcccaccagctccctccctcaacactgggaattacaatttgacatgagatttgggtggggatacagagctgaaccatatcaagggtagttcaactactgtcttaatgtgagtatttttatagatgacataattcagaatacttacaatggccctctgcagctttccagtacatccctgtttatcccattccatccaccgag

SEQ ID NO: 3675 - DNA, 833 bp, Homo sapiens
aaaccagcctcatgtgacaaagcgcaggacccctcactgccccaactgcttgctgttctctctttcttgggctctaaggacccaggagtctgggtgcacagcctccttctctctgagattcaagagtctgatcagcagcctcttcctcctccaggacccagaagccctgagcttatccccatggagctctgccggtccctggccctgctggggggctccctgggcctgatgttctgcctgattgctttgagcaccgatttctggtttgaggctgtgggtcccacccactcagctcactcgggcctctggccaacagggcatggggacatcatatcaggctacatccacgtgacgcagaccttcagcattatggctgttctgtgggccctggtgtccgtgagcttcctggtcctgtcctgcttcccctcactgttccccccaggccacggcccgcttgtctcaaccaccgcagcctttgctgcagccatctccatggtggtggccatggcggtgtacaccagcgagcggtgggaccagcctccacacccccagatccagaccttcttctcctggtccttctacctgggctgggtctcagctatcctcttgctctgtacaggtgccctgagcctgggtgctcactgtggcggtccccgtcctggctatgaaaccttgtgagcagaaggcaagagcggcaagatgagttttgagcgttgtattccaaaggcctcatctggagcctcgggaaagtctggtcctacatctgcccgcccttccagcccttccccagcccctcctcttgtttcttcattcattcaacaaaatttggctgg

SEQ ID NO: 3676 - protein, 165 aa, Homo sapiens
MELCRSLALLGGSLGLMFCLIALSTDFWFEAVGPTHSAHSGLWPTGHGDIISGYIHVTQTFSIMAVLWALVSVSFLVLSCFPSLFPPGHGPLVSTTAAFAAAISMVVAMAVYTSERWDQPPHPQIQTFFSWSFYLGWVSAILLLCTGALSLGAHCGGPRPGYETL

SEQ ID NO: 3677 - DNA, 524 bp, Homo sapiens
  misc_feature (389)..(389): n is a, c, g, or t
  misc_feature (450)..(450): n is a, c, g, or t
  misc_feature (474)..(474): n is a, c, g, or t
  misc_feature (506)..(506): n is a, c, g, or t
  misc_feature (520)..(520): n is a, c, g, or t
tttttttttttatggtggtgcatgaatgtcacaaacaaagctgactttatttttatttgaattggccaagtaaaatgttccatacaaggcaaacagttcaacatgaaatatttaaattaaaaataaattacttccatcctatataaatctctagctgccacatacaaatgaaagataccagttataaatgaaataagttaaaataaatggttgtaaggagctagggtgtgggtgggcatgtgcctggtcatcccaggctttcagggagactgaggtggggagggatgggatctcttgaacccggggagtttgaggaccagtctggggcaacacaggcaaaatcctgtcttaaaaacaaacgtaattgtagggatcctctgttacggccnggctagggttactgggttttgctccctaactttgttctggggcttcccacctctctatttngattgaggctttttgaacagtccntcggggttaggccccttttttaaaaggggcanttgtggcccggggnttcc

SEQ ID NO: 3678 - DNA, 411 bp, Homo sapiens
tgcttcccaggctgtctgcttacattttagcttgtcttacggttacatatggttttagtattttcatttaaaaaatctgggttggttccataaatttggaaaagtaaaattggacggttctggaaattttgcctgtttacacatctgtaaatgtagcttgcttgcattatttttttctagatctgaaatgcattgcatcaagcaagcatgttttgcaataaaagtggaaatccccctcctgctggataaactgggtgctttccacgcgacacaaagtcatatatcttgacacaatctctaggatgcattatataaatggaagaatggtgtggtgaggggatacatggtcagggagagtgggcagacctgacttttgagtcctggttctctatgggacaactgagtgactct

SEQ ID NO: 3679 - DNA, 663 bp, Homo sapiens
agccggaccggacttctggtgtgtggtcaggctggtcttgaagtcgacctcagtgatccactcgcctcagccgaagtgctgcgattacagacctgagccactgcgcccagccttgatcttgaggtaagagggtactgtacagcagttactctatcataacacctaaataatgcctaaagttaaagagttttgatgaagttcttggcagcagtgcttttccccttctgctttccaaaaggaggtaaaaagaagccagtcaatttcaaaaacccctatcctgcttttattttcagctaccttgaaagtgagctgaatcaccatggaaatgtgcaaatgtgaggtttgcatacttggttttaagccctgagtaccatatgctaatcaggcaatcaggattctgtgcctccctgcagtcagttgcatttctatttaaaagtgcattttggtttggaagcccctttctggagcctaactaccaaaaggcagcaactttttgtatcattacaaagaaagctgtgtaagtgcactcccaagcaaaggtgtggtaggagagtagcagccacagaggacccaagcccaagtcttggcctgagttaagttagtgctattgctcccattgacgtgctatgatgtgaagccgttctggtacaggttccttgctca

SEQ ID NO: 3680 - DNA, 2500 bp, Homo sapiens
ctttgcagctgagactgggtggagggagaggcgcggagacactggggctctgacgagctggctgaggccctctcagtaggggggtcacgcctcctggaactcagggaccccaagtttctgtgcattcagggcggggctggccccatgccctgtgcataggggcctggctgcatcccagtcgatcagccagaggcagcagcagtggactcatcaattgtggaggaagccctggggaccctggggaccttgccgactctattcccagccagctcctaggacaagcctcagagccaacacccgctcgaccctctcccggcccctccccttctttgtcttttgcagatgatcgccgggtgtcgatccttttccctccagtcagggccaggcgtggacgccgccggaccgctgagactcggggcacggtgaagcactggccggggtctggctgggtctggcgctcgggagccagatggaggtggcgataggggccatgggagccggcgccaagtagccggtggacccccgcgctcgcacctctcccggcgcccgggcgctccccaaggctgccatggaggtgcctaacgtcaaggacttccagtggaagcgcctggcgccactgcccagccgccgggtctactgctccctgctggagaccgggggccaggtctatgccatcgggggatgtgacgacaacggcgtccccatggactgcttcgaggtctactccccggaggccgaccagtggaccgccttgccccggctgcccacagcccgggcgggggtggccgtcaccgccctggggaagcggatcatggtgattgggggcgtgggcaccaatcagctgcccctgaaggtcgtggagatgtacaacatcgatgagggcaagtggaagaagaggagcatgctgcgtgaggccgccatgggcatttctgtcacggccaaagattaccgagtatatgcggcaggcgggatgggcctggacctacgtccacacaaccacctccaacactatgacatgctgaaggacatgtgggtgtccctagcacccatgcccaccccgagatatgctgccacctccttcctccgaggctccaagatctacgtgctggggggacgacagtccaagtacgcggtcaacgccttcgaggtctttgacatcgagactcgctcctggaccaagtttcccaacattccctataagcgggccttctccagctttgtgaccctggacaaccacttgtacagcctaggaggcctgcggcaaggtcgcctctaccggcagcccaagttcctgcggacgatggacgtgttcgacatggaacaggggggatggctgaagatggaacgatcgttcttcctcaagaagcggcgggcagattttgtggctggctctctgagtggacgggtcatagtggctgggggacttgggaatcaacccactgtcctggagacggcggaagcattccacccagggaagaacaaatgggagatcctccctgccatgcccacaccccgctgtgcctgctccagcatagtcgtcaagaactgcctcctcgccgtgggaggtgtcaaccagggtctgagtgacgcagtggaggccctgtgtgtctctgactcctagctgtctctgggctcagtacctttgccctggaccatatcacttcactcttaacatgaggaatgatcttgtccaagcagtcggggctacttccaagaatgtcagctcctgttagcaaccagtggagtctggccttggggctctaagttgacctctctatagctccaaatcctaccaatctcagaaaactgtaagaggcacagatgactccaccagctgcagagctgactctgaagagagtcttcacttactgcacaggcaaagaaaggcacaggaatatttcctacctctccctcctgtgagtcccacctccccccacccccatctccaggaggcaggtagagcagttctgaccgagaggatagactgctgttgctgtctttccccagctctgaactagttttaaggtagcttaggatgaaaaatggagaatgattgggggttccaaaccactttcttctcccttggcttatatctcttcaccatttggtggtcaactgtgggcctaccctggacctcatctactcagcgagaattggacatgaagctagaggcagctgccttggaagggaagtcaggctcacttggacagcccaggccatggcaggaagaatcccttcctcttggggtccttgatgggcatgtgtgatggggaaggagcagtctcccagccctgggtctgctccccacatctctcctaattccacttcaccttttgccaccccctccccaccagaggcctagcccttttgtcaccgaaggcccccagagtgtttctgtgtgaaaccctctcatttacactgtggcatcaaaatccacaaaagatggattaattgcactctggttaatagcagcagcacaatgattaaaatctatattcct

SEQ ID NO: 3681 - protein, 350 aa, Homo sapiens
MEVPNVKDFQWKRLAPLPSRRVYCSLLETGGQVYAIGGCDDNGVPMDCFEVYSPEADQWTALPRLPTARAGVAVTALGKRIMVIGGVGTNQLPLKVVEMYNIDEGKWKKRSMLREAAMGISVTAKDYRVYAAGGMGLDLRPHNHLQHYDMLKDMWVSLAPMPTPRYAATSFLRGSKIYVLGGRQSKYAVNAFEVFDIETRSWTKFPNIPYKRAFSSFVTLDNHLYSLGGLRQGRLYRQPKFLRTMDVFDMEQGGWLKMERSFFLKKRRADFVAGSLSGRVIVAGGLGNQPTVLETAEAFHPGKNKWEILPAMPTPRCACSSIVVKNCLLAVGGVNQGLSDAVEALCVSDS

SEQ ID NO: 3682 - DNA, 4617 bp, Homo sapiens
gggcattcctttagcatcattcatctttggtttcttcaagttgccactgaaaagctagacctttgcctattatctgctaatctacccagtctcacattctattgactcattgttcaaagggggggcaggaggagctaatttcctttgcacatttgtattttatttcaaaataaagtattctcttctaacaataacgtatctcaagtgtgtattcagacaaaatttataaaacatctttttattattatattttgatcctgtgaggaaagaataggtgttttcttattttctgccatgtattaagcttttagatatttgccagatatccagtatctggaaaaaactcatttatgtagtacccatgttttgagtacctaccctgtgacatggactgtaataggtgcaggcagggcaagaacccactcttgaactttttagttaggcctacccaacagaaattactctgaccttataccttttagtacttacgtaacattctcatcctttactgacagtgccctgtatgcttccgtccatcattctgagattcaccagaataattactttgaggcatctccgttaagaatttgattatttgacttacctcttatccttaaggaacacatggaaggtcgtttgctttttcttataagtttggatgaaggggaagataaacattctatatcgtgtatgtactctaataccagcaacttctgggtactagaactacaggggaaagtaagacagagtaccctcgtggagtttccattttagtgggacagacaataaacacaataattgtagcttatatattctatcaaggaaataaacatagtatagtggtaaaaaaaaaacacaaaaaataattttagggtaggggagtatatgagacagggtggtcataggctcctctgaggaggtattatttaagctgacacttgaaggatgaggggaacagcttgtgaagaactaggggtaaagcatttcagacagaataccaagtgcaaaggtcctgagacaggagaaagctcggcatgctctaggagctaaaagaaggccagtgcaggccaaaacgtagctcgcagggtgaagagtggtttgaggcaaggttgggggatggtagctatgagaccaccacgctctgtagtccatagtgaagagttggaattatatatttctgtataaaggaaaactgtggaaaggtctagcaggggagtaatatgatctgattaacactttaaagctgattttggctaccttgtggagattgaatgctggtggaaagtgaatttaagaatagaagctggaagaggcaattgtcctggaaagatgttggagatttggtctagagcagtggttctcaacctcagctgtggttgcctgaggagctttttaattgttttttcttttttcttttttttttttgtaagagactggggtctcagtatgttgccaagtttgtcttgaactctagagcttaaaagattcttctgcctcaacctctcaaatagctaggactgcaggtaccataccaccttgtctaacaaaaaatcttaatgcctaagcttcaccccaggccatttaaatcggactttcttaaggttggcccaggaataagaccttttaaagtttcataggcaattccaatgtgcggtcaagactgaagattgttggtgtagaggtatggcaggggagctgtgtggggtagattaacctgaaatatattctgcaggttcaacagacaggagttgctaatacgttgaatttcagtgggaagtggtgagaaaaaggactcagttttttggctttcataaatgaattgatcgtgtcatttaccaagacaggaaagactgaacattgagaaagaaaatcaagagttctgttttgagtatgttgagtttgagatgccaataagtcattcaagtggagaatgactccattcaagtggagaatccagctatgattgagcctggagctcagagaagagatccctgttagagatgaaaatgtgagttgatggcataaagtgggacttaaagttaagaaccgattgagttcatgttgggagagcataaataaagagaaagagcctttggctgaggcttgaggaactccaggggaggattatgataagggagaaagaacctgaaaaagagactacaaacagccagtgaggtaggatattgtggtgttcctgaagccaaaggagaggtagtgtctctagaagaaagctgcagctagctgggttgaaaatgacagctgtcaagtacagtgaggtcagagaggtattgaatttagcaagattaatgctgttgatgaccttgataatttgaagtggtggaggtagaagtcagagtggagtaagctgaggaaaaagaatgacagagaaaacatttaagaggaagagtaaatgggagatgaggaaaatatatatagccaacttttttgagatttgggggttttgtttgttgtgaatgtagcaggaaaaaaaatggagctaataggcagaagataaggtagaaccaagaatatgtgggttatttttgtgtgttttggttttgttttttaagctattgatgagaatatttcagtagagagattaggaacggtgtgaagttcttgagaaggtaaaaggggataagattcctatcacaaatggggtggctttgaagagagcaggaattcttccattttagaaacgatgtatgtaggtgcagatagatttggggagaaaatgaaaagaaggaagaaggagcctgagtcttggagtgagcaaatggacaagaatgatgtcaggataaactcagtaggccattcttttgaccatatatgattctgccctgatctggtttatatctgattttgactcattttcctctctcttccttacttgatttcagatgttctctgttttggaggggatatcctaaatatcacaggtatttttttagtttttctgaatacttaaaagactgagtgaggaggactatatttaggtggaattcagcatattggtttattcagcattgtttgattaataggtactggaccctggggatacaaagatgaggaagacatagtctgtgcctcaaaggatcccccagtctaatggaaaagctttgcccaaattaaactctcacatgctttgcatttttgtttagattgaaggacagcaaaataagtgccaataaagcgttcttgagaaaactaatgagaaatttggtcattaatagcagaagctaagcatgagatggggaggagttaagcatgtcctatctggagaactcaggatcactaacagctgtatgccccggagttggcctgtcttcttatttaaacataataaaaccagccatcaaattagatatgaacttgaacccacattttatgaatcttttgctagtatctctcctcctctgttagtatactggtggaaggaagattgctaaaaatatccttaggatcatttaaacttctacctagttacgtttttactgaatgattttgaggatctgaagcagtattttaacctagcataatgtatacagccaagaaaccttgcctgataacttacttgatatccacactgggtcaagttgatcttctgcattactgggactttgccctggaccaagtaagtctagatatttggtccccatcagcctatcctgtgtgtctgcagggaacatgctcctggcactctggagagtagaacaaaatcaactgagtgacatcattaccttggtggcaaaatgcagtctggagatacaggagaaatttgggatctatcataccagggaaggccaggacctgcagttaaagataggtagtacctcctaaaagagtgatccagttgggcaagggggaacccactataaaaacctcaaaagataaatgataaactgggaaaaaatgtttgcaattcatatagacaaagggtgaattgctctactagggaaagagcacttagaaatcaagaaaacaatagtactcttaagagaaaaattggacaaaggacatgagtaaattgtatatagacaaggaaatgcatgtcttttaacacgtaaaaagatgatcaacattcataataagaaaaatgccaattggaagtacactgactacctgtcttacctatagataggcaaaacttcagatgctgacaatgtactctttggtgagtctgaggaatgagctttttcttactgtgagtgaacaacggtataaggtgatttggcaatctttatttatttttattgtctattgtatttttttatgtcaacaaaaactaaaccatataaaaatatatattaaaaagtcttgttttcacttatataccatctatactatttactcttacaagtgcatttattccttaacctagcaatccttctggacatctataggtatacgttcacacacctgaaatgttgcatgtgcaaggttattgattgtaatatggtttgtaattttaaaacattgaaaactatttataggagactggttaagtaaataatatgtatacttaataagattacctgcaacttaaaaaaaataagatgtcttgatatggcagtatctccaagatacagttaagtgaaaaaaaaaaaaaaaagaaaa

SEQ ID NO: 3683 - DNA, 400 bp, Homo sapiens
tttttgaaggaaatgaaaacaattgcaaaggtatttattgagaaatagtaaagatatacatatttttacaagcttttaatattaatttacatttcttttaaattatgtaggccccaataatctatactttactaatacataacagaaacccttgacattgtgagatgtccataatgctaccgtagttgggagtcaaagtgcaactttggctcatgatgcttaagtttgttttcaaaagaaatactaaatgccatattcactgagaatgtaggcttgtcataaacaaatgtgctttaaaaaaaacaacttcatataggagcatgctgttgacactattctgaatcttagctcattgcggactaaggagaaaacatttttagagacagttattacctacttg

SEQ ID NO: 3684 - DNA, 387 bp, Homo sapiens
tgcggacggtgtccttgtctgtatatacattttatatatgtctttcatgtcattatttcatttgatcctcacaacaaccctgtgaggtaggccggggggaaaatgttagattcactttatagatgacgaagttaaggttcagagaggttaagtgactttctcagttaccatatacctagtacgaagcagacagaataagaaccactaacttttgtggttgggggcccttttctctaaaccacatagcttctgagagtataatgtaacccaaaacatttttaccgcttcatcctcatttccttattgttaattcaacttttttttttttttaaaacggagtctcgctctgtcacccaggctggagtgcagtggtgtgatcccggctca

SEQ ID NO: 3685 - DNA, 354 bp, Homo sapiens
ttttttttttttttttttttttagcggtatgattttattatttttcataaacccatttcacatatcaagcaatgcccaaggaaaagaaaactactatacatttattatttcacgtggttttgaaacttgaacaaatctcatttgaaaataaagaaaaatgcaatttttgcagagtagatggggaccacactgattccatttttaaaaaaggatttcctgtaaaaacagaaattggcaatttactctaagaaaacacagcagaagctgggaagaaacttgaggatgcctaaatttccactgtggaacaacttttgctgcccagtggggagagaataaaaaaaaaaaagaacacct

SEQ ID NO: 3686 - DNA, 421 bp, Homo sapiens
ttttttttttttttttttttttttttttttagagatggaatcgcaagaattcccaggccctttttttatttacagggataccaaaccatccacttgcaaattctttggtctcccatcagctggaattaagtaggtactgggtatctttgagatcatgtatttgtctccactttgggggatacaagaaaggaaggcacgaacagctgaaaaagaagggtttcacaccgctccagctggaatccagcaggaacctctgagcatgccacagctgaacacttaaaagaggaaagaaggacagctgctcttcatttattttgaaagcaaattcatttgaaagtgcataaatggtcatcataagtcaaacgtatcaattagaccttcaacctaggaaacaaaattttttttttctatttaataatac

SEQ ID NO: 3687 - DNA, 417 bp, Homo sapiens
  misc_feature (2)..(2): n is a, c, g, or t
  misc_feature (14)..(14): n is a, c, g, or t
  misc_feature (20)..(20): n is a, c, g, or t
anttcggcacagcngcgacnttgacactatggcttccagcactgtcccggtgagcgctgctggctcggctaatgaaactcccgaaataccggacaacgtgggagattggcttcggggcgtctaccgctttgccactgataggaatgacttccggagacattgatactaaatttgggactctttgctgcgggagtttggctggccaggaacttgagtgacattgacctcatggcacctcagccaggggtgtagccaagtagacaaatggaatcctgtgctgaacccgaatcttccaaaaaacagcctacaatctgtgaccaccacaagatgtgccctgatggcagctgaagtttgattcagatgggcacttttcttccccttccctgcctagtttccttttggttccttggagtccac

SEQ ID NO: 3688 - DNA, 1908 bp, Homo sapiens
cctgtcctcccgcgggtccgagggcgctggaaacccagcggcggcgaagcggagaggagccccgcgcgtctccgcccgcacggctccaggtctggggtctgcgctggagccgcgcggggagaggccgtctctgcgaccgccgcgcccgctcccgaccgtccgggtccgcggccagcccggccaccagccatgggctctggcccgctctcgctgcccctggcgctgtcgccgccgcggctgctgctgctgctgctgtctctgctgccagtggccagggcctcagaggctgagcaccgtctatttgagcggctgtttgaagattacaatgagatcatccggcctgtagccaacgtgtctgacccagtcatcatccatttcgaggtgtccatgtctcagctggtgaaggtggatgaagtaaaccagatcatggagaccaacctgtggctcaagcaaatctggaatgactacaagctgaagtggaacccctctgactatggtggggcagagttcatgcgtgtccctgcacagaagatctggaagccagacattgtgctgtataacaatgctgttggggatttccaggtggacgacaagaccaaagccttactcaagtacactggggaggtgacttggatacctccggccatctttaagagctcctgtaaaatcgacgtgacctacttcccgtttgattaccaaaactgtaccatgaagttcggttcctggtcctacgataaggcgaaaatcgatctggtcctgatcggctcttccatgaacctcaaggactattgggagagcggcgagtgggccatcatcaaagccccaggctacaaacacgacatcaagtacaactgctgcgaggagatctaccccgacatcacatactcgctgtacatccggcgcctgcccttgttctacaccatcaacctcatcatcccctgcctgctcatctccttcctcactgtgctcgtcttctacctgccctccgactgcggtgagaaggtgaccctgtgcatttctgtcctcctctccctgacggtgtttctcctggtgatcactgagaccatcccttccacctcgctggtcatccccctgattggagagtacctcctgttcaccatgatttttgtaaccttgtccatcgtcatcaccgtcttcgtgctcaacgtgcactacagaaccccgacgacacacacaatgccctcatgggtgaagactgtattcttgaacctgctccccagggtcatgttcatgaccaggccaacaagcaacgagggcaacgctcagaagccgaggcccctctacggtgccgagctctcaaatctgaattgcttcagccgcgcagagtccaaaggctgcaaggagggctacccctgccaggacgggatgtgtggttactgccaccaccgcaggataaaaatctccaatttcagtgctaacctcacgagaagctctagttctgaatctgttgatgctgtgctgtccctctctgctttgtcaccagaaatcaaagaagccatccaaagtgtcaagtatattgctgaaaatatgaaagcacaaaatgaagccaaagagattcaagatgattggaagtatgttgccatggtgattgatcgtatttttctgtgggttttcaccctggtgtgcattctagggacagcaggattgtttctgcaacccctgatggccagggaagatgcataagcactaagctgtgtgcctgcctgggagacttccttgtgtcagggcaggaggaggctgcttcctagtaagaacgtactttctgttatcaagctaccagctttgtttttggcatttcgaggtttacttattttccacttatcttggaatcatgcaaaaaaaaaatgtcaagagtatttattaccgataaatgaacatttaactagc

SEQ ID NO: 3689 - protein, 504 aa, Homo sapiens
MGSGPLSLPLALSPPRLLLLLLSLLPVARASEAEHRLFERLFEDYNEIIRPVANVSDPVIIHFEVSMSQLVKVDEVNQIMETNLWLKQIWNDYKLKWNPSDYGGAEFMRVPAQKIWKPDIVLYNNAVGDFQVDDKTKALLKYTGEVTWIPPAIFKSSCKIDVTYFPFDYQNCTMKFGSWSYDKAKIDLVLIGSSMNLKDYWESGEWAIIKAPGYKHDIKYNCCEEIYPDITYSLYIRRLPLFYTINLIIPCLLISFLTVLVFYLPSDCGEKVTLCISVLLSLTVFLLVITETIPSTSLVIPLIGEYLLFTMIFVTLSIVITVFVLNVHYRTPTTHTMPSWVKTVFLNLLPRVMFMTRPTSNEGNAQKPRPLYGAELSNLNCFSRAESKGCKEGYPCQDGMCGYCHHRRIKISNFSANLTRSSSSESVDAVLSLSALSPEIKEAIQSVKYIAENMKAQNEAKEIQDDWKYVAMVIDRIFLWVFTLVCILGTAGLFLQPLMAREDA

SEQ ID NO: 3690 - DNA, 347 bp, Homo sapiens
ttttggtgtcttataagttttaattgctcaaagaaactatggtccatgggaaagggaaggagtggagctgagttaatgaatgattcaaactagttttccaaggggccctgcaagggaaagaaagttgactaacatatgtgctgggtagccatgcccagagagagcaaaccctttcatgggtgaaacactcttcaggtttcaggtcattttagggacttgctggtgaatggctagccacaaaggtaacatttatcaagttactcaggttaagttcatcattaaatttcctattttctttctcctggaatctcgtgggttttgtttaatgttggagacagatggtgctg

SEQ ID NO: 3691 - DNA, 1903 bp, Homo sapiens
aataaaattaaggaaatcaaagaaaatgattttaaaggactcacttcactttatggtctgatcctgaacaacaacaagctaacgaagattcacccaaaagcctttctaaccacaaagaagttgcgaaggctgtatctgtcccacaatcaactaagtgaaataccacttaatcttcccaaatcattagcagaactcagaattcatgaaaataaagttaagaaaatacaaaaggacacattcaaaggaatgaatgctttacacgttttggaaatgagtgcaaaccctcttgataataatgggatagagccaggggcatttgaaggggtgacggtgttccatatcagaattgcagaagcaaaactgacctcagttcctaaaggcttaccaccaactttattggagcttcacttagattataataaaatttcaacagtggaacttgaggattttaaacgatacaaagaactacaaaggctgggcctaggaaacaacaaaatcacagatatcgaaaatgggagtcttgctaacataccacgtgtgagagaaatacatttggaaaacaataaactaaaaaaaatcccttcaggattaccagagttgaaatacctccagataatcttccttcattctaattcaattgcaagagtgggagtaaatgacttctgtccaacagtgccaaagatgaagaaatctttatacagtgcaataagtttattcaacaacccggtgaaatactgggaaatgcaacctgcaacatttcgttgtgttttgagcagaatgagtgttcagcttgggaactttggaatgtaataattagtaattggtaatgtccatttaatataagattcaaaaatccctacatttggaatacttgaactctattaataatggtagtattatatatacaagcaaatatctattctcaagtggtaagtccactgacttattttatgacaagaaatttcaacggaattttgccaaactattgatacataagggttgagagaaacaagcatctattgcagtttctttttgcgtacaaatgatcttacataaatctcatgcttgaccattcctttcttcataacaaaaaagtaagatattcggtatttaacactttgttatcaagcacattttaaaaagagctgtactgtaaatggaatgcttgacttagcaaaatttgtgctctttcatttgctgttagaaaaacagaattaacaaagacagtaatgtgaagagtgcattacactattcttattctttagtagcttgggtagtactgtaatatttttaatcatcttaaagtatgatttgatataatcttattgaaattaccttatcatgtcttagagcccgtctttatgtttaaaactaatttcttaaaataaagccttcagtaaatgttcattaccaacttgataaatgctactcataagagctggtttggggctatagcatatgcttttttttttttaattattacctgatttaaaaatctctgtaaaaacgtgtagtgtttcataaaatctgtaactcgcattttaatgatccgctattataagcttttaatagcatgaaaattgttaggctatataacattgccacttcaactctaaggaatatttttgagatatccctttggaagaccttgcttggaagagcctggacactaacaattctacaccaaattgtctcttcaaatacgtatggactggataactctgagaaacacatctagtataactgaataagcagagcatcaaattaaacagacagaaaccgaaagctctatataaatgctcagagttctttatgtatttcttattggcattcaacatatgtaaaatcagaaaacagggaaattttcattaaaaatattggtttgaaaaaaaaaaaaaaaaaa

SEQ ID NO: 3692 - protein, 187 aa, Homo sapiens
MNALHVLEMSANPLDNNGIEPGAFEGVTVFHIRIAEAKLTSVPKGLPPTLLELHLDYNKISTVELEDFKRYKELQRLGLGNNKITDIENGSLANIPRVREIHLENNKLKKIPSGLPELKYLQIIFLHSNSIARVGVNDFCPTVPKMKKSLYSAISLFNNPVKYWEMQPATFRCVLSRMSVQLGNFGM

SEQ ID NO: 3693 - DNA, 421 bp, Homo sapiens
  misc_feature (18)..(18): n is a, c, g, or t
  misc_feature (32)..(32): n is a, c, g, or t
  misc_feature (173)..(173): n is a, c, g, or t
  misc_feature (218)..(218): n is a, c, g, or t
  misc_feature (338)..(338): n is a, c, g, or t
  misc_feature (372)..(372): n is a, c, g, or t
  misc_feature (397)..(397): n is a, c, g, or t
  misc_feature (411)..(411): n is a, c, g, or t
tttgaaggtatggggcanaaatttattcttgngcacaaaccaaagtattgtgactcacacccaacaagcaaaggaaattatcactttccagattacacagcaaacgtagctggtggtggtcttggtgagaagggagtccatactaagattggagatcaggacctgaagctganaagaagcaatagctggggttttgagggatggggtgggactgaaangaggttttggctctgggtatttccctactctttcccaggcagtcatggcaagctgcagaagacacactgaagaacagactcaaggaaaatcacacagacaccaaccgttctttcaacacncagcacacaccctcacacctcccttccaccatcnttcccttccattctaacattcttcnccctcaaatttttntccaatcccc

SEQ ID NO: 3694 - DNA, 429 bp, Homo sapiens
gcggccgccaacatgcggctctcagcggatgggtggaacggcgtcggcgcgacgttgtgggccgcctgctcctaggggccgtggcgctgaggccggcggaggcggtgtccgagcccacgacggtggcgtttgacgtgcggcccggcggcgtcgtgcattccttctcccataacgtgggcccgggggacaaatatacgtgtatgttcacttacgcctctcaaggagggaccaatgagcaatggcagatgagtctggggaccagcgaagaccaccagcacttcacctgcaccatctggaggccccaggggaagtcctatctgtacttcacacagttcaaggcagaggtgcggggcgctgagattgagtacgccatggcctactctaaagccgcatttgaaagggaaagtgatgtccctctgaaaactgagg

SEQ ID NO: 3695 - DNA, 333 bp, Homo sapiens
  misc_feature (142)..(142): n is a, c, g, or t
accgcctggtgcacttcgagcctcacatgcgaccgagacgtcctcatcaaatagcagacttgttccgacccaaggaccagattgcttactcagacaccagcccattcttgatcctttctgaggcgtcgctggcggatctcanctccaggttagagaagaaagttaaagcaaccaacttcaggcccaatattgtaatttcaggatgcgatgtctatgcagaggattcttgggatgagcttcttattggtgacgtggaactgaaaagggtgatggcttgttccagatgcattttaaccacagtggacccagacaccggtgtcatgagcaggaagg

SEQ ID NO: 3696 - DNA, 654 bp, Homo sapiens
ggacagggaaagaggagaaactcctgtaggagaagggttttctccattgcttccagttcagactatcagggaggaagaaatccaggcctggggaggaaatgccacacttagcgagacccatcaaagtggagagccctcccttgtgcagagtggccctccccggccccatctttcaaagaggaatcatcatcactcctgggaggattcgtcccaatctcccaccccaagacccaagaagtcctacagtgggcttaggtccccaacccggtgtgtctcggaaatgcttgtgattcaacacagggagaggagggagaggagccggtctcggaggaaacagcatctactgcctccctgtgtggatgagccggagctgctcttctcagaggggcccagtacttcccgctgggccgcagagctcccgttcccagcagactcctctgagcctgcctcccagctcagctactcccaggaagtgggaggaccttttaagacacccatgaaggaaacgctgccatctcctccacccgagcaaatctgtgcctccccagaaccccgtgaatcctggaggctcacgcccccagccaaagtagggggactggatttcagaccagtacaaacctcccaggtgcctctgaccccttgctgacccccctg

SEQ ID NO: 3697 - DNA, 688 bp, Homo sapiens
actacggctaggtcgaggctgggtttagggagggagagaggcgcgcgggtgaaaggcgcattgatgcagcctgcggcggcctcggagcgcggcggagccagacgctgaccacgttcctctcctcggtctcctccgcctccagctccgcgctgcccggcagccgggagccatgcgaccccagggccccgccgcctccccgcagcggctccgcggcctcctgctgctcctgctgctgcagctgcccgcgccgtcgagcgcctctgagatccccaaggggaagcaaaaggcgcagctccggcagagggaggtggtggacctgtataatggaatgtgcttacaagggccagcaggagtgcctggtcgagacgggagccctggggccaatggcattccgggtacacctgggatcccaggtcgggatggattcaaaggagaaaagggggaatgtctgagggaaagctttgaggagtcctggacacccaactacaagcagtgttcatggagttcattgaattatggcatagatcttgggaaaattgcggagtgtacatttacaaagatgcgttcaaatagtgctctaagagtttgttcagtggctcacttcggctaaaatgcagaaatgcatgctgtcagcgttggtatttcacattcaatggagctgaatgttcaggacctcttcccattgaag

SEQ ID NO: 3698 - DNA, 697 bp, Homo sapiens
agccggcggtccttgcgctccccaacatgcggcgccgtggggcgcggggggctgcctgtctgtggcacatgtccctggtgctcttctgtttctcagtcttcgctgcgaccctcgtctggtgccacactggggcgggctacgatgctgctcatccatgaacgttcctcagcctgtacaggctgaccagatcgacatgcacctgcaaattcgtgtgtgcagcttgttctgcctgaggatgtgtgggccagtacgtgtgacttgcccaatgggcttcgcggtgagcgagctgctgcaaggtgcgcctcgtgcctgctgcagatccagctcactaccctgggaaatcttacaccttcaaggcactgtgtatatctgctgtgatatgcaggaaatggttcagaccagccatcaagtatttatggggatattattagcgtgggcacagagattgttgcacggggcccggattcaagtgaattcctgtcattgtaacagaacaatacccgtaaaggtcttgggagcacggttcaatgacattgatttaacatggtgtaaaacgtgtgtacttccacaagatccaagtttcaattggtataaccagacgtagaagcggcataagcagagattcccggagtcaggagtgttgtatcatttggagtagaactcatgtgtgcgttcaaaaactggcctggagctagtt

SEQ ID NO: 3699 - DNA, 750 bp, Homo sapiens
aaggctaggtgcgaggctgggtgttggcgtgttttgggccggttctggagtggctggcggcggggcctgggtgtcgcccagtgcccgaggacgcaggctttggcaccgaagcccggcatcagaggcaaccccgcggctcctgccaacggtcggggcccctcggggaccagcccttcgcggggctgctgccaaaaaacctcagtcgggaggagctggttgatgcgctgcgggcagccgtggtggaccggaaaggacctctagtgacgttgaacaagccacagggtctaccagtgacaggaaaaccaggagagctgacgttgttctcagtgctgccagagctgagccagtccctagggctcagggagcaggagcttcaggttgtccgagcatctgggaaagaaagctctgggcttgtactcctctccagctgtccccagacagctagtcgcctccagaagtacttcacccatgcacggagagcccaaaggcccacagccacctactgtgctgtcactgatgggatcccagctgcttctgaggggaagatccaggctgccctgaaactggaacacattgatggggtcaatctcacagttccagtgaaggccccatcccgaaaggacatcctggaaggtgtcaagaagactctcaagtcactttcgtgtgggtagccaacagctctggctgtgccctgggtccagctgccagcactgacagtgttctccagtcaactacaggtgcccatggacc

SEQ ID NO: 3700 - DNA, 276 bp, Homo sapiens
cgtctctagatctcctttgatttctttcttccctggctctctgcatggcttcaaacttatcctttacatcacccttgccaagttttggtacataggtttttgggacaggtttagatgaagaaagcagaatctcagccttttgggaaatatcattcatgtttgctctatgtggtcttgggctgattatgaagctctgtatatatttgcaccctgcaggagccggtgaccggcgaaggtacttctttccgcgtggagggactgtgcgcgtcccgcctg

SEQ ID NO: 3701 - DNA, 2354 bp, Homo sapiens
cgcggccgcgtcggacctgtggtcccgggtttctgcagagtctacttcagaagcggaggcactgggagtccggtttgggattgccaggctgtggttgtgagtctgagcttgtgagcggctgtggcgccccaactcttcgccagcatatcatcccggcaggcgataaactacattcagttgagtctgcaagactgggaggaactggggtgataagaaatctattcactgtcaaggtttattgaagtcaaaatgtccaaaaaaatcagtggcggttctgtggtagagatgcaaggagatgaaatgacacgaatcatttgggaattgattaaagagaaactcatttttccctacgtggaattggatctacatagctatgatttaggcatagagaatcgtgatgccaccaacgaccaagtcaccaaggatgctgcagaagctataaagaagcataatgttggcgtcaaatgtgccactatcactcctgatgagaagagggttgaggagttcaagttgaaacaaatgtggaaatcaccaaatggcaccatacgaaatattctgggtggcacggtcttcagagaagccattatctgcaaaaatatcccccggcttgtgagtggatgggtaaaacctatcatcataggtcgtcatgcttatggggatcaatacagagcaactgattttgttgttcctgggcctggaaaagtagagataacctacacaccaagtgacggaacccaaaaggtgacatacctggtacataactttgaagaaggtggtggtgttgccatggggatgtataatcaagataagtcaattgaagattttgcacacagttccttccagatggctctgtctaagggttggcctttgtatctgagcaccaaaaacactattctgaagatatatgatgggcgttttaaagacatctttcaggagatatatgacaagcagtacaagtcccagtttgaagctcaaaagatctggtatgagcataggctcatcgacgacatggtggcccaagctatgaaatcagagggaggcttcatctgggcctgtaaaaactatgatggtgacgtgcagtcggactctgtggcccaagggtatggctctctcggcatgatgaccagcgtgctggtttgtccagatggcaagacagtagaagcagaggctgcccacgggactgtaacccgtcactaccgcatgtaccagaaaggacaggagacgtccaccaacctcattgcttccatttttgcctggaccagagggttagcccacagagcaaagcttgataacaataaagagcttgccttctttgcaaatgctttggaagaagtctctattgagacaattgaggctggcttcatgaccaaggacttggctgcttgcattagaggtttacccaatgtgcaacgttctgactacttgaatacatttgagttcatggataaacttggagaaaacttgaagatcaaactagctcaggccaaactttaagttcatacctgagctaagaaggataattgtcttttggtaactaggtctacaggtttacatttttctgtgttacactcaaggataaaggcaaaatcaattttgtaatttgtttagaagccagagtttatcttttctataagtttacagcctttttcttatatatacagttattgccacctttgtgaacatggcaagggacttttttacaatttttattttattttctagtaccagcctaggaattcggttagtactcatttgtattcactgtcactttttctcatgttctaattataaatgaccaaaatcaagattgctcaaaagggtaaatgatagccacagtattgctccctaaaatatgcataaagtagaaattcactgccttcccctcctgtccatgaccttgggcacagggaagttctggtgtcatagatatcccgttttgtgaggtagagctgtgcattaaacttgcacatgactggaacgaagtatgagtgcaactcaaatgtgttgaagatactgcagtcatttttgtaaagaccttgctgaatgtttccaatagactaaatactgtttaggccgcaggagagtttggaatccggaataaatactacctggagtcttgtcctctccatttttctctttctcctcctggcctggcctgaatattatactactctaaatagcatatttcatccaagtgcaataatgtaagctgaatcttttttggacttctgctggcctgttttatttcttttatataaatgtgatttctcagaaattgatattaaacactatcttatcttctcctgaactgttgattttaattaaaattaagtgctaattaccaaaaaaaaaaa

SEQ ID NO: 3702 - protein, 414 aa, Homo sapiens [sequence omitted]

SEQ ID NO: 3703 - DNA, 861 bp, Homo sapiens
aaaaggccggcggaacagccagaggagcagagaggcaaagaaacattgtgaaatctccaactcttaaccttcaacatgaaagtctctgcagtgcttctgtgcctgctgctcatgacagcagctttcaacccccagggacttgctcagccagatgcactcaacgtcccatctacttgctgcttcacatttagcagtaagaagatctccttgcagaggctgaagagctatgtgatcaccaccagcaggtgtccccagaaggctgtcatcttcagaaccaaactgggcaaggagatctgtgctgacccaaaggagaagtgggtccagaattatatgaaacacctgggccggaaagctcacaccctgaagacttgaactctgctacccctactgaaatcaagctggagtacgtgaaatgacttttccattctcctctggcctcctcttctatgctttggaatacttctaccataattttcaaataggatgcattcggttttgtgattcaaaatgtactatgtgttaagtaatattggctattatttgacttgttgctggtttggagtttatttgagtattgctgatcttttctaaagcaaggccttgagcaagtaggttgctgtctctaagcccccttcccttccactatgagctgctggcagtgggtttgtattcggttcccaggggttgagagcatgcctgtgggagtcatggacatgaagggatgctgcaatgtaggaaggagagctctttgtgaatgtgaggtgttgctaaatatgttattgtggaaagatgaatgcaatagtaggactgctgacattttgcagaaaatacattttatttaaaatctcctaaaaaaaaaaa

SEQ ID NO: 3704 - protein, 98 aa, Homo sapiens
MKVSAVLLCLLLMTAAFNPQGLAQPDALNVPSTCCFTFSSKKISLQRLKSYVITTSRCPQKAVIFRTKLGKEICADPKEKWVQNYMKHLGRKAHTLKT

SEQ ID NO: 3705 - DNA, 2128 bp, Homo sapiens
caagacttctctgcattttctgccaaaatctgtgtcagatttaagacacatgcttctgcaagcttccatgaaggttgtgcaaaaaagtttcaatccagagttgggttccagctttctgtagctgtaagcattggtggccacaccacctccttacaaagcaactagaacctgcggcatacattggagagatttttttaattttctggacatgaagtaaatttagagtgctttctaatttcaggtagaagacatgtccaccttctgattatttttggagaacattttgatttttttcatctctctctccccacccctaagattgtgcaaaaaaagcgtaccttgcctaattgaaataatttcattggattttgatcagaactgattatttggttttctgtgtgaagttttgaggtttcaaactttccttctggagaatgccttttgaaacaattttctctagctgcctgatgtcaactgcttagtaatcagtggatattgaaatattcaaaatgtacagagagtgggtagtggtgaatgttttcatgatgttgtacgtccagctggtgcagggctccagtaatgaacatggaccagtgaagcgatcatctcagtccacattggaacgatctgaacagcagatcagggctgcttctagtttggaggaactacttcgaattactcactctgaggactggaagctgtggagatgcaggctgaggctcaaaagttttaccagtatggactctcgctcagcatcccatcggtccactaggtttgcggcaactttctatgacattgaaacactaaaagttatagatgaagaatggcaaagaactcagtgcagccctagagaaacgtgcgtggaggtggccagtgagctggggaagagtaccaacacattcttcaagcccccttgtgtgaacgtgttccgatgtggtggctgttgcaatgaagagagccttatctgtatgaacaccagcacctcgtacatttccaaacagctctttgagatatcagtgcctttgacatcagtacctgaattagtgcctgttaaagttgccaatcatacaggttgtaagtgcttgccaacagccccccgccatccatactcaattatcagaagatccatccagatccctgaagaagatcgctgttcccattccaagaaactctgtcctattgacatgctatgggatagcaacaaatgtaaatgtgttttgcaggaggaaaatccacttgctggaacagaagaccactctcatctccaggaaccagctctctgtgggccacacatgatgtttgacgaagatcgttgcgagtgtgtctgtaaaacaccatgtcccaaagatctaatccagcaccccaaaaactgcagttgctttgagtgcaaagaaagtctggagacctgctgccagaagcacaagctatttcacccagacacctgcagctgtgaggacagatgcccctttcataccagaccatgtgcaagtggcaaaacagcatgtgcaaagcattgccgctttccaaaggagaaaagggctgcccaggggccccacagccgaaagaatccttgattcagcgttccaagttccccatccctgtcatttttaacagcatgctgctttgccaagttgctgtcactgtttttttcccaggtgttaaaaaaaaaatccattttacacagcaccacagtgaatccagaccaaccttccattcacaccagctaaggagtccctggttcattgatggatgtcttctagctgcagatgcctctgcgcaccaaggaatggagaggaggggacccatgtaatccttttgtttagttttgtttttgttttttggtgaatgagaaaggtgtgctggtcatggaatggcaggtgtcatatgactgattactcagagcagatgaggaaaactgtagtctctgagtcctttgctaatcgcaactcttgtgaattattctgattcttttttatgcagaatttgattcgtatgatcagtactgactttctgattactgtccagcttatagtcttccagtttaatgaactaccatctgatgtttcatatttaagtgtatttaaagaaaataaacaccattattcaagccaaaaaaaaaaaaaaaaaa

SEQ ID NO: 3706 - protein, 354 aa, Homo sapiens
MYREWVVVNVFMMLYVQLVQGSSNEHGPVKRSSQSTLERSEQQIRAASSLEELLRITHSEDWKLWRCRLRLKSFTSMDSRSASHRSTRFAATFYDIETLKVIDEEWQRTQCSPRETCVEVASELGKSTNTFFKPPCVNVFRCGGCCNEESLICMNTSTSYISKQLFEISVPLTSVPELVPVKVANHTGCKCLPTAPRHPYSIIRRSIQIPEEDRCSHSKKLCPIDMLWDSNKCKCVLQEENPLAGTEDHSHLQEPALCGPHMMFDEDRCECVCKTPCPKDLIQHPKNCSCFECKESLETCCQKHKLFHPDTCSCEDRCPFHTRPCASGKTACAKHCRFPKEKRAAQGPHSRKNP

SEQ ID NO: 3707 - DNA, 499 bp, Homo sapiens
  misc_feature (362)..(362): n is a, c, g, or t
  misc_feature (386)..(386): n is a, c, g, or t
  misc_feature (396)..(396): n is a, c, g, or t
  misc_feature (426)..(426): n is a, c, g, or t
  misc_feature (446)..(446): n is a, c, g, or t
  misc_feature (459)..(459): n is a, c, g, or t
  misc_feature (469)..(469): n is a, c, g, or t
  misc_feature (488)..(488): n is a, c, g, or t
tctcatctaattaaacccattggtttttatgggagggctgcattaagagcacccaaccaccacatgtaagttgataattaccagcatggcaggtgattttatctgctgaccaagcgcatagttttgttttgttttcagaatgttctagggaacatttgagattttatgtgaaataaaattttaagtgccaaagccaaaaaaatacttaactcttttcaaaggccctctttcatccttgccttcgtcaactttcctttgcacacaggaagcaaaatctacttcaagacatttattttagaggaatccattaagaaaggattgttttacttaaatgaaatgctgtcttaattttttgctggtgncctttggacaccctccttaagccntttaacaatncttcctttttaacccaagcccattatggcnaaggtttttccaaggaaggnggggggaaggggnaagggggggncccgattggaaagtttgancgggggaaaaa

SEQ ID NO: 3708 - DNA, 466 bp, Homo sapiens
  misc_feature (431)..(431): n is a, c, g, or t
taagagacagagtctcgctcctagagccctgcctggagtacagtgagactgtctcaaacaaaacaaaacaaaaaaaaactaggtaaaaatctggtcacttaatggctgcgtaacctggaacaagtgattccagctccttctagctctagaactatgctcctggatctcactgcgactctgatcagggtaggaagagtagaacatggtagattctgcatgccaccagcactcagtctttgggctatgagaaggatactccccctagagcagtggactgaattgttaactgagctagagcttccccaaccccccaaggaagacactgcagtggcagtgtaggcctggaaatctgggacaggaaatcataaataccagttactgtgttggacaggtcaaatgattgctgacaaggtaaaaacctcccctccctngtgccacatcccgattcttgctcctggggtacagc

SEQ ID NO: 3709 - DNA, 438 bp, Homo sapiens
aagtacatcagagagctactaaggcagcacaaaattaagagtgaagataccagagacaaacagaagaggtaaatgtcacatttggtaccttacttccactcagggcaaataagaggctgggaagctgagaaactgagtagagttgccagcagtgctaggaggctgaggggtccataaatattaataatcaggaccaatgagggaccctggtacacaccacaagctttcttttgtgacctcactgagaggagaaccagaaatagactggtcatcacaaacactgaagcccaatttccctccagctcagccccagatagggtctgggcaaactacctcagggtatggacaaatcacatcaaatcacatgaattaaaaaaaaaaaatcctctttgggttatgataatatgattcagagctacaaattgtctttgcaattct

SEQ ID NO: 3710 - DNA, 270 bp, Homo sapiens
cggccgccgcgcttccgactctcccaggccgcaccgcgcgccgcgacggctacagcccagccatgtgcgtgcgacggggaggccgcaccaaggccgcgggggcggggggcgcacccacgccctgggggcctcacgaacgacccttgagaggactcgcatccacaagaccgcgcccgaaaatcatcaaactgatatatttgtgacaagaaagtgcttaattccattcagcaagattgtttctgtgcatcagtaaactcatgcctcgtgccg

SEQ ID NO: 3711 - DNA, 471 bp, Homo sapiens
  misc_feature (59)..(59): n is a, c, g, or t
  misc_feature (90)..(90): n is a, c, g, or t
  misc_feature (94)..(94): n is a, c, g, or t
  misc_feature (187)..(187): n is a, c, g, or t
  misc_feature (208)..(208): n is a, c, g, or t
  misc_feature (223)..(223): n is a, c, g, or t
  misc_feature (253)..(253): n is a, c, g, or t
ggaaaggaaagctgtgggaccatcctggcaaccccggtgtttggctgggttctagcgtncagtctgtgtggccggtgggggacctgcggnggangtgggagggccagtctgcacccaagaggtggaagaggacgggctttaggctggaacgccttagaggagccatttttccaggtggggccccagnagaggctccgacaggagctgngccatagtcgcgcancggggaggtggagcgcgtcccagacccgancccccgacctcagccaaacccattccttctgtccttggaggccagaggggactctgagcatcggaaaggatgcctggtttgcttttatgtgaaccgacagagctttacaacatcctgaatcaggccacaaaactctccagattaacagaccccaactatctctgtttattggatgtcccgttccaaatgggagtatgacgaaagccatgtgatcactg

SEQ ID NO: 3712 - DNA, 629 bp, Homo sapiens
cacgttagaaagcctgacatggcctgactcgggacagctcagagcagggcagaactggggacactctgggccggccttctgcctgcatggacgctctgaagccaccctgtctctggaggaaccacgagcgagggaagaaggacagggactcgtgtggcaggaagaactcagagccgggaagcccccattcactagaagcactgagagatgcggccccctcgcagggtctgaatttcctgctgctgttcacaaagatgctttttatctttaactttttgttttccccacttccgaccccggcgttgatctgcatcctgacatttggagctgccatcttcttgtggctgatcaccagacctcaacccgtcttacctcttcttgacctgaacaatcagtctgtgggaattgagggaggagcacggaagggggtttcccagaagaacaatgacctaacaagttgctgcttctcagatgccaagactatgtattgaggttttccaaagaggactcgctgtgtctgacaatgggccctgcttgggatatgaaaaccaaacagcctacagatggctatcttacaaacaggtgtctgatagagcagagtacctgggtgccggctcttgcttacgggt

SEQ ID NO: 3713 - DNA, 181 bp, Homo sapiens
aggcccacggttagacaccaggcagaactgcccaggagagacacagggacaatcagaccagcgtcctcgaggttagcctgaggcgggtgggcacggccgaccatccacccggtggttcctgtttgtcccaccacttaactgggagacactgttttattaaaacacaccgtggcttccttca

SEQ ID NO: 3714 - DNA, 412 bp, Homo sapiens
  misc_feature (375)..(375): n is a, c, g, or t
ttgatgtacttacatttgtgcatcacaatcaagaggttcccagcttggtggaactttcaaagatgaggcagaaaactaaacaggcaattacaatcttacttttcacgctgacaagtggtacggtggctagcccaaactcccctccctgtcccagctacctcccttatagaccattcacgatcacttaggccaggctgccatgtgacctaagagaagacagggagaacacagcatttcttactcctactaacttgcaacatcattctctcaagttgctctcattgggagggctcccaactgcttcaagctggcccagtggatatttgtatttctaaagtgggggcagggcatgggccatttcccaaaaaaaggganacacatttcaggactttgtggcctttttgtttacccc

SEQ ID NO: 3715 - DNA, 1472 bp, Homo sapiens
ccggagcggggatcaccttaacttgactgtggtcccccagccctccaagaaatgcccataaaccaaggaggagagggtaaaaaatagaagaatacatggaattggggagaagaatgggaaaaaagatgggagtgactgcataatgtcagcattttgtgcttttggctcagcatttggattggatggaggattttcatcctgaaaccagccctccgtcgccaccgaccatggaataattgtcttccacgaaactcttccctggtgccaaaaagggttttatgtatatatttgagagctccacatccctggatctgaatcctccacttcccactggaaccatgcccctcccagtcccgtttctcccctctaggggatggaggctgagagaccccaggaagaagaggatggtgagcagggcccccctcaggatgaggaaggctggccccctccaaactccaccactcggccttggcgatctgctcctccatcccctcctcctccagggacccgccacacagccctgggaccccgctcggcctccctgctctccctgcagactgaactccttctggacctggtggctgaagcccagtcccgccgcctggaggagcagagggccaccttctacaccccccaaaacccctcaagcctagcccctgccccactccgtcctctcgaggacagagaacagctttacagcactatcctcagtcaccagtgccagcggatggaagcccagcggtcagagcctcccctccctccaggggggcaagagctcctggagttgctgctgagagttcagggtgggggtcgaatggaggagcaaaggtcccggccccccacacacacctgctgagacttgagccccaaccagcccttccttgccactggtctcaaagctgggcagcccattgcatgccctcaactcttgcttggcaggggtaccagagactgaaagacacggcacaaatctcaatattcatctcccacatcaccttccctgggaactggacagggtgaaagtcctcaaactctgggaacaggcgagatggaacagggatttaactccccgcccacaggtccatgggagcttgaggcagtaagggggatcccaggcacccatctcaaggagtggctgggagtcttttccctaacttgtggggacaccaccagttgtcaagctactaggcagtagggtctgagggctcaggcctccacctgagaggttataacctgagagacagctctacccttcctcccagtaagaagggaaggtgggtgggcacctgagagattaagactattctcccagtcccactaccagcacccccgatccctgagactgaggggtttacgggctgtgaatggaccttcagccctgcccaccctccctccccactgctgctgagtctgtctgatgttttggttgtgtgaataaatataattcccctctggaaaaaaaaaaaaaaaaa

SEQ ID NO: 3716 - protein, 124 aa, Homo sapiens
MYIFESSTSLDLNPPLPTGTMPLPVPFLPSRGWRLRDPRKKRMVSRAPLRMRKAGPLQTPPLGLGDLLLHPLLLQGPATQPWDPARPPCSPCRLNSFWTWWLKPSPAAWRSRGPPSTPPKTPQA

SEQ ID NO: 3717 - DNA, 547 bp, Homo sapiens
  misc_feature (5)..(5): n is a, c, g, or t
  misc_feature (7)..(7): n is a, c, g, or t
  misc_feature (9)..(9): n is a, c, g, or t
  misc_feature (12)..(12): n is a, c, g, or t
  misc_feature (501)..(501): n is a, c, g, or t
  misc_feature (512)..(512): n is a, c, g, or t
  misc_feature (546)..(546): n is a, c, g, or t
ccctngncnatntttcccacgtggtgaatgccctggagttgtgagggtgtgagggtcgcgttcctgctgtctggactttttctgtcccactgagacgcagctgtgtgaaatatgatttggcgaggaagatcaacatataggcctaggcgaaggagaagtgtaccacctcctgagctgattgggcctatgctggagcccggtgatgaggagcctcagcaagaggaaccaccaactgaaagtcgggatcctgcacctggtcaggagagagaagaagatcagggtgcagctgagactcaagtgcctgacctggaagctgatctccaggagctgtctcagtcaaagactgggggtgaatgtggaaatggtcctgatgaccaggggaagattctgccaaaatcagaacaatttaaaatgccagaaggaggtgacaggcaaccacaggtttaaatgaagacaagctgaaacaacacaaaactgtttttatctaagatatttgacttnaaaatatcganattaacttttgcagctttctcccaaaaaaaaaant

SEQ ID NO: 3718 - DNA, 2597 bp, Homo sapiens
gagcagcgcgcgcaagcaggccaggggaaggtgggcgcaggtgaggggccgaggtgtgcgcaggactttagccggttgagaaggatcaagcaggcatttggagcacaggtgtctagaaacttttaaggggccggttcaagaaggaaaagttcccttctgctgtgaaactatttggcaagaggctggagggcccaatggctgcaaaattgcaacccaacattcccaaagccaagagtctagatggcgtcaccaatgacagaaccgcatctcaagggcagtggggccgtgcctgggaggtggactggttttcactggcgagcgtcatcttcctactgctgttcgcccccttcatcgtctactacttcatcatggcttgtgaccagtacagctgcgccctgaccggccctgtggtggacatcgtcaccggacatgctcggctctcggacatctgggccaagactccacctataacgaggaaagccgcccagctctataccttgtgggtcaccttccaggtgcttctgtacacgtctctccctgacttctgccataagtttctacccggctacgtaggaggcatccaggagggggccgtgactcctgcaggggttgtgaacaagtatcagatcaacggcctgcaagcctggctcctcacgcacctgctctggtttgcaaacgctcatctcctgtcctggttctcgcccaccatcatcttcgacaactggatcccactgctgtggtgcgccaacatccttggctatgccgtctccaccttcgccatggtcaagggctacttcttccccaccagcgccagagactgcaaattcacaggcaatttcttttacaactacatgatgggcatcgagtttaaccctcggatcgggaagtggtttgacttcaagctgttcttcaatgggcgccccgggatcgtcgcctggaccctcatcaacctgtccttcgcagcgaagcagcgggagctccacagccatgtgaccaatgccatggtcctggtcaacgtcctgcaggccatctacgtgattgacttcttctggaacgaaacctggtacctgaagaccattgacatctgccatgaccacttcgggtggtacctgggctggggcgactgtgtctggctgccttatctttacacgctgcagggtctgtacttggtgtaccaccccgtgcagctgtccaccccgcacgccgtgggcgtcctgctgctgggcctggtgggctactacatcttccgggtggccaaccaccagaaggacctgttccgccgcacggatgggcgctgcctcatctggggcaggaagcccaaggtcatcgagtgctcctacacatccgccgacgggcagaggcaccacagcaagctgctggtgtcgggcttctggggcgtggcccgccacttcaactacgtcggcgacctgatgggcagcctggcctactgcctggcctgtggcggtggccacctgctgccctacttctacatcatctacatggccatcctgctgacccaccgctgcctccgggacgagcaccgctgcgccagcaagtacggccgggactgggagcgctacaccgccgcagtgccttaccgcctgctgcctggaatcttctaagggcacgccctagggagaagccctgtggggctgtcaagagcgtgttctgccaggtccatgggggctggcatcccagctccaactcgaggagcctcagtttcctcatctgtaaactggagagagcccagcacttggcaggtgtccagtacctaatcacgctctgttccttgcttttgccttcaagggaattccgagtgtccagcactgccgtattgccagcacagacggattttctctaatcagtgtccctgggcaggaggatgacccagtcacctttactagtcctttggagacaatttacctgtattaggagcccaggccacgctacactctgcccacactggtgagcaggaggtcttcccacgccctgtcattaggctgcatttactcttgctaaataaaagtgggagtggggcgtgcgcgttatccatgtattgcctttcagctctagatccccctcccctgcctgctctgcagtcgtgggtggggcccgtgcgccgtttctccttggtagcgtgcacggtgttgaactgggacactggggagaaaggggctttcatgtcgtttccttcctgctcctgctgcacagctgccaggagtgctctgcctggagtctgcagacctcagagaggtcccagcactggctgtggctttcaggtgtaggcaggtgggctctgcttcccgattccctgtgagcgcccaccctctcgaaagaattttctgtcttgccctgtgactgtgcagactctggctcgagcaacccggggaacttcaccctcaggggcctctccacaccttctccagcgaggaggtctcagtcccagcctcgggagggcacctccttttctgtgctttcttccctgaggcattcttcctcatccctagggtgttgtgtagaactctttttaaactctatgctccgagtagagttcatctttatattaaacttcccctgttcaaaaaaaaaaaaaaaaa

SEQ ID NO: 3719 - protein, 475 aa, Homo sapiens
MAAKLQPNIPKAKSLDGVTNDRTASQGQWGRAWEVDWFSLASVIFLLLFAPFIVYYFIMACDQYSCALTGPVVDIVTGHARLSDIWAKTPPITRKAAQLYTLWVTFQVLLYTSLPDFCHKFLPGYVGGIQEGAVTPAGVVNKYQINGLQAWLLTHLLWFANAHLLSWFSPTIIFDNWIPLLWCANILGYAVSTFAMVKGYFFPTSARDCKFTGNFFYNYMMGIEFNPRIGKWFDFKLFFNGRPGIVAWTLINLSFAAKQRELHSHVTNAMVLVNVLQAIYVIDFFWNETWYLKTIDICHDHFGWYLGWGDCVWLPYLYTLQGLYLVYHPVQLSTPHAVGVLLLGLVGYYIFRVANHQKDLFRRTDGRCLIWGRKPKVIECSYTSADGQRHHSKLLVSGFWGVARHFNYVGDLMGSLAYCLACGGGHLLPYFYIIYMAILLTHRCLRDEHRCASKYGRDWERYTAAVPYRLLPGIF

SEQ ID NO: 3720 - DNA, 440 bp, Homo sapiens
  misc_feature (321)..(321): n is a, c, g, or t
  misc_feature (412)..(412): n is a, c, g, or t
  misc_feature (417)..(417): n is a, c, g, or t
tttgagaagcttaagaagattctgtggttctcacagagttagactttattagataaggggtttcggctaccctcaaagctctcaggactggggctagggtttaaggaaggcttatttaaatatgggaaataaaatacaaaagggccacacccgatgcaaaagactttgctggctttctggtcagacaagcctagagatgtgtattttcttagggcagtaaaacaaaacgttttcacaaggaggctaaatttctatcctgaagttcataaacatgtggcgctcggttaatggtaaaaatagacaatgtgtgaggcgggaccntcctcctcatcctcccaagctcctctcctacccacctcccttccctccaaggaaacgcaaagttgccccgaggaggtgggcctggctccanatcgnccccaggggtcaaggtatgtttc

SEQ ID NO: 3721 - DNA, 434 bp, Homo sapiens
tcttttttcttttcttttttttttttggtgtgtctggtgtgatttctgttggaattctacaagagaatttggcagcaaaccacttattttctcatgcccttcattccctcgtccctccttaagtcactttcccttcgtcccctacagccttacagggcttgacccagcattctgcatgtagaagacactcaatggacaataacagcagcatagacttccttagtgcttcctgcgagccagtgctagttgtatgcacttaacagattttaactcacgcaattctcacactgacccgatgaggtatatcatcatccagttttacagatgggaaattgaggcataaagggggccctcacgaatgaatgaattcaccagttccacttttggtgtctctagaactgcaagctaacaaaccacataaacaacactgggct

SEQ ID NO: 3722 - DNA, 2586 bp, Homo sapiens
gtaagtccagagagtttagtgtccacacctagactggaattgaaagacaccagcagaagtgatgaaagtccaaaaccaggaaaattccaaagaactcgtgtccctcgagctgaatctggtgatagccttggttctgaagatcgtgatcttctttacagcattgatgcatatagatctcaaagattcaaagaaacagaacgtccatcaataaagcaggtgattgttcggaaggaagatgttacttcaaaactggatgaaaaaaataatgcctttccttgtcaagttaatatcaaacagaaaatgcaggaactcaataacgaaataaatatgcaacagacagtgatctatcaagctagccaggctcttaactgctgtgttgatgaagaacatggaaaagggtccctagaagaagctgaagcagaaagacttcttctaattgcaactgggaagagaacacttttgattgatgaattgaataaattgaagaacgaaggacctcagaggaagaataaggctagtccccaaagtgaatttatgccatccaaaggatcagttactttgtcagaaatccgcttgcctctaaaagcagattttgtctgcagtacggttcagaaaccagatgcagcaaattactattacttaattatactaaaagcaggagctgaaaatatggtagccacaccattagcaagtacttcaaactctcttaacggtgatgctctgacattcactactacatttactctgcaagatgtatccaatgactttgaaataaatattgaagtttacagcttggtgcaaaagaaagatccctcaggccttgataagaagaaaaaaacatccaagtccaaggctattactccaaagcgactcctcacatctataaccacaaaaagcaacattcattcttcagtcatggccagtccaggaggtcttagtgctgtgcgaaccagcaacttcgcccttgttggatcttacacattatcattgtcttcagtaggaaatactaagtttgttctggacaaggtcccctttttatcttctttggaaggtcatatttatttaaaaataaaatgtcaagtgaattccagtgttgaagaaagaggttttctaaccatatttgaagatgttagtggttttggtgcctggcatcgaagatggtgtgttctttctggaaactgtatatcttattggacttatccagatgatgagaaacgcaagaatcccataggaaggataaatctggctaattgtaccagtcgtcagatagaaccagccaacagagaattttgtgcaagacgcaacacttttgaattaattactgtccgaccacaaagagaagatgaccgagagactcttgtcagccaatgcagggacacactctgtgttaccaagaactggctgtctgcagatactaaagaagagcgggatctctggatgcaaaaactcaatcaagttcttgttgatattcgcctctggcaacctgatgcttgctacaaacctattggaaagccttaaaccgggaaatttccatgctatctagaggtttttgatgtcatcttaagaaacacacttaagagcatcagatttactgattgcattttatgctttaagtacgaaagggtttgtgccaatattcactacgtattatgcagtatttatatcttttgtatgtaaaactttaactgatttctgtcattcgtcaatgagtagaagtaaatacattatagttgattttgctaaatcttaatttaaaagcctcattttcctagaaatctaattattcagttattcatgacaatatttttttaaaagtaagaaattctgagttgtcttcttggagctgtaggtcttgaagcagcaacgtctttcaggggttggagacagaaacccattctccaatctcagtagttttttcgaaaggctgtgatcatttattgatcgtgatatgacttgttactagggtactgaaaaaaatgtctaaggcctttacagaaacatttttagtaatgaggatgagaactttttcaaatagcaaatatatattggcttaaagcatgaggctgtcttcagaaaagtgatgtggacataggaggcaatgtgtgagacttgggggttcaatattttatatagaagagttaataagcacatggtttacatttactcagctactatatatgcagtgtggtgcacattttcacagaattctggcttcattaagatcattatttttgctgcgtagcttacagacttagcatattagttttttctactcctacaagtgtaaattgaaaaatctttatattaaaaaagtaaactgttatgaagctgctatgtactaataatactttgcttgccaaagtgtttgggttttgttgttgtttgtttgtttgtttgtttttggttcatgaacaacagtgtctagaaacccattttgaaagtggaaaattattaagtcacctatcacctttaaacgcctttttttaaaattataaaatattgtaaagcagggtctcaacttttaaatacactttgaacttcttctctgaattattaaagttctttatgacctcatttataagcact

SEQ ID NO: 3723 - protein, 405 aa, Homo sapiens
MQELNNEINMQQTVIYQASQALNCCVDEEHGKGSLEEAEAERLLLIATGKRTLLIDELNKLKNEGPQRKNKASPQSEFMPSKGSVTLSEIRLPLKADFVCSTVQKPDAANYYYLIILKAGAENMVATPLASTSNSLNGDALTFTTTFTLQDVSNDFEINIEVYSLVQKKDPSGLDKKKKTSKSKAITPKRLLTSITTKSNIHSSVMASPGGLSAVRTSNFALVGSYTLSLSSVGNTKFVLDKVPFLSSLEGHIYLKIKCQVNSSVEERGFLTIFEDVSGFGAWHRRWCVLSGNCISYWTYPDDEKRKNPIGRINLANCTSRQIEPANREFCARRNTFELITVRPQREDDRETLVSQCRDTLCVTKNWLSADTKEERDLWMQKLNQVLVDIRLWQPDACYKPIGKP

SEQ ID NO: 3724 - DNA, 3496 bp, Homo sapiens
cdsagcggccggggccacgatggagcgcgacggctgcgcggggggcgggagccgcggcggcgagggcgggcgcgctccccgggagggcccggcggggaacggccgcgatcggggccgcagccacgctgccgaggcgcccggggacccgcaggcggccgcgtccttgctggcccctatggacgtgggggaggagccgctggagaaggcggcgcgcgcccgcactgccaaggaccccaacacctataaagtactctcgctggtattgtcagtatgtgtgttaacaacaatacttggttgtatatttgggttgaaaccaagctgtgccaaagaagttaaaagttgcaaaggtcgctgtttcgagagaacatttgggaactgtcgctgtgatgctgcctgtgttgagcttggaaactgctgtttagattaccaggagacgtgcatagaaccagaacatatatggacttgcaacaaattcaggtgtggtgagaaaaggttgaccagaagcctctgtgcctgttcagatgactgcaaggacaagggcgactgctgcatcaactacagttctgtgtgtcaaggtgagaaaagttgggtagaagaaccatgtgagagcattaatgagccacagtgcccagcagggtttgaaacgcctcctaccctcttattttctttggatggattcagggcagaatatttacacacttggggtggacttcttcctgttattagcaaactaaaaaaatgtggaacatatactaaaaacatgagaccggtatatccaacaaaaactttccccaatcactacagcattgtcaccggattgtatccagaatctcatggcataatcgacaataaaatgtatgatcccaaaatgaatgcttccttttcacttaaaagtaaagagaaatttaatcctgagtggtacaaaggagaaccaatttgggtcacagctaagtatcaaggcctcaagtctggcacatttttctggccaggatcagatgtggaaattaacggaattttcccagacatctataaaatgtataatggttcagtaccatttgaagaaaggattttagctgttcttcagtggctacagcttcctaaagatgaaagaccacacttttacactctgtatttagaagaaccagattcttcaggtcattcatatggaccagtcagcagtgaagtcatcaaagccttgcagagggttgatggtatggttggtatgctgatggatggtctgaaagagctgaacttgcacagatgcctgaacctcatccttatttcagatcatggcatggaacaaggcagttgtaagaaatacatatatctgaataaatatttgggggatgttaaaaatattaaagttatctatggacctgcagctcgattgagaccctctgatgtcccagataaatactattcatttaactatgaaggcattgcccgaaatctttcttgccgggaaccaaaccagcacttcaaaccttacctgaaacatttcttacctaagcgtttgcactttgctaagagtgatagaattgagcccttgacattctatttggaccctcagtggcaacttgcattgaatccctcagaaaggaaatattgtggaagtggatttcatggctctgacaatgtattttcaaatatgcaagccctctttgttggctatggacctggattcaagcatggcattgaggctgacacctttgaaaacattgaagtctataacttaatgtgtgatttactgaatttgacaccggctcctaataacggaactcatggaagtcttaaccaccttctaaagaatcctgtttatacgccaaagcatcccaaagaagtgcaccccctggtacagtgccccttcacaagaaaccccagagataaccttggctgctcatgtaacccttcgattttgccgattgaggattttcaaacacagttcaatctgactgtggcagaagagaagattattaagcatgaaactttaccctatggaagacctagagttctccagaaggaaaacaccatctgtcttctttcccagcaccagtttatgagtggatacagccaagacatcttaatgcccctttggacatcctataccgtggacagaaatgacagtttctctacggaagacttctccaactgtctgtaccaggactttagaattcctcttagtcctgtccataaatgttcattttataaaaataacaccaaagtgagttacgggttcctctccccaccacaactaaataaaaattcaagtggaatatattctgaagctttgcttactacaaatatagtgccaatgtaccagagttttcaagttatatggcgctactttcatgacaccctactgcgaaagtatgctgaagaaagaaatggtgtcaatgtcgtcagtggtcctgtgtttgactttgattatgatggacgttgtgattccttagagaatctgaggcaaaaaagaagagtcatccgtaaccaagaaattttgattccaactcacttctttattgtgctaacaagctgtaaagatacatctcagacgcctttgcactgtgaaaacctagacaccttagctttcattttgcctcacaggactgataacagcgagagctgtgtgcatgggaagcatgactcctcatgggttgaagaattgttaatgttacacagagcacggatcacagatgttgagcacatcactggactcagcttctatcaacaaagaaaagagccagtttcagacattttaaagttgaaaacacatttgccaacctttagccaagaagactgatatgttttttatccccaaacaccatgaatctttttgagagaaccttatattttatatagtcctctagctacactattgcattgttcagaaactgtcgaccagagttagaacggagccctcggtgatgcggacatctcagggaaacttgcgtactcagcacagcagtggagagtgttcctgttgaatcttgcacatatttgaatgtgtaagcattgtatacattgatcaagttcgggggaataaagacagaccacacctaaaactgcctttctgcttctcttaaaggagaagtagctgtgaacattgtctggataccagatatttgaatctttcttactattggtaataaaccttgatggcattgggcaaacagtagacttatagtagggttggggtagcccatgttatgtgactatctttatgagaattttaaagtggttctggatatcttttaacttggagtttcatttcttttcattgtaatcaaaaaaaaaattaacagaagccaaaatacttctgagaccttgtttcaatctttgctgtatatcccctcaaaatccaagttattaatcttatgtgttttctttttaattttttgattggatttctttagatttaatggttcaaatgagttcaactttgagggacgatctttgaatatacttacctattataaaatcttactttgtatttgtattt

SEQ ID NO: 3725 - protein, 873 aa, Homo sapiens
MDVGEEPLEKAARARTAKDPNTYKVLSLVLSVCVLTTILGCIFGLKPSCAKEVKSCKGRCFERTFGNCRCDAACVELGNCCLDYQETCIEPEHIWTCNKFRCGEKRLTRSLCACSDDCKDKGDCCINYSSVCQGEKSWVEEPCESINEPQCPAGFETPPTLLFSLDGFRAEYLHTWGGLLPVISKLKKCGTYTKNMRPVYPTKTFPNHYSIVTGLYPESHGIIDNKMYDPKMNASFSLKSKEKFNPEWYKGEPIWVTAKYQGLKSGTFFWPGSDVEINGIFPDIYKMYNGSVPFEERILAVLQWLQLPKDERPHFYTLYLEEPDSSGHSYGPVSSEVIKALQRVDGMVGMLMDGLKELNLHRCLNLILISDHGMEQGSCKKYIYLNKYLGDVKNIKVIYGPAARLRPSDVPDKYYSFNYEGIARNLSCREPNQHFKPYLKHFLPKRLHFAKSDRIEPLTFYLDPQWQLALNPSERKYCGSGFHGSDNVFSNMQALFVGYGPGFKHGIEADTFENIEVYNLMCDLLNLTPAPNNGTHGSLNHLLKNPVYTPKHPKEVHPLVQCPFTRNPRDNLGCSCNPSILPIEDFQTQFNLTVAEEKIIKHETLPYGRPRVLQKENTICLLSQHQFMSGYSQDILMPLWTSYTVDRNDSFSTEDFSNCLYQDFRIPLSPVHKCSFYKNNTKVSYGFLSPPQLNKNSSGIYSEALLTTNIVPMYQSFQVIWRYFHDTLLRKYAEERNGVNVVSGPVFDFDYDGRCDSLENLRQKRRVIRNQEILIPTHFFIVLTSCKDTSQTPLHCENLDTLAFILPHRTDNSESCVHGKHDSSWVEELLMLHRARITDVEHITGLSFYQQRKEPVSDILKLKTHLPTFSQED

SEQ ID NO: 3726 - DNA, 5223 bp, Homo sapiens
gcagccgcagctcgggggcggtgcctgccttgcagcctcccctcggcgatcgcgcagccccatctttgtccggcctccgcgctttgttctcggcgcccgggccttggccagcctggccagccgccgagcagcccccacgccgcgctggcgtcgtcctcgcctccctcgccgccgccccccgcgcgcggccgggccttgccccccatggtgtcccggccagagcccgagggcgaggccatggacgccgagctggcggtagcgccgccgggctgctcgcacctgggcagcttcaaggtggacaactggaagcagaacctgcgggccatctaccagtgcttcgtgtggagcggcacggctgaggcccgcaagcgcaaggccaagtcctgtatctgccatgtctgtggcgtccacctcaacaggctgcattcctgcctctactgtgtcttcttcggctgtttcacaaagaagcatattcacgagcatgcgaaggcgaagcggcacaacctggccattgatctgatgtatggaggcatctactgttttctgtgccaggactacatctatgacaaagacatggaaataatcgccaaggaggagcagcgaaaagcttggaaaatgcaaggcgttggagagaagttttcaacttgggaaccaaccaaacgggagcttgaactgctgaagcacaacccgaaaaggagaaagatcacctcgaactgcaccataggtctgcgtgggctgatcaaccttgggaacacatgcttcatgaactgcatcgtgcaggccctgacccacacgccacttctgcgggacttcttcctgtctgacaggcaccgctgtgagatgcagagccccagctcctgtctggtctgtgagatgtcctcactgtttcaggagttttactctggacaccggtcccctcacatcccgtataagttgctgcacctggtgtggacccacgcgaggcacctagcaggctacgagcagcaggacgcccacgagttcctcatcgcggccctggacgtgctccaccgacactgcaaaggtgatgacaatgggaagaaggccaacaaccccaaccactgcaactgcatcatagaccagatcttcacaggcgggttgcagtcagacgtcacctgccaagtctgccatggagtctccaccaccatcgaccccttctgggacatcagcttggatctccccggctcttccaccccattctggcccctgagcccagggagcgagggcaacgtggtaaacggggaaagccacgtgtcgggaaccaccacgctcacggactgcctgcgacgattcaccagaccagagcacttgggcagcagcgccaagatcaagtgcagcggttgccatagctaccaggagtccacaaagcagctcactatgaagaaactgcccatcgtagcctgttttcatctcaaacgatttgaacactcagccaagctgcggcggaagatcaccacgtatgtgtccttccccctggagctggacatgacccctttcatggcctccagcaaagagagcaggatgaatggacagtaccagcagcccacggacagtctcaacaatgacaacaagtattccctgtttgctgttgttaaccatcaagggaccttggagagtggccactacaccagctttatccggcagcacaaagaccagtggttcaagtgtgacgatgccatcatcaccaaggccagcatcaaggacgtcctggacagcgaagggtacttgctgttctatcacaaacagttcctggaatacgagtagccttatctgcagctggtcagaaaaacaaaggcaatgcattggcaagcctcacaaagtgatcctccctggccccccccctcccccaagcctcccaccgcctccccggcctggtgacaccacctcccatgcagatgtggcccctctgcacctgggacccatcgggtcgggatggaccacacggacggggaggctcctggagctgctttgaagatggatgagatgaggggtgtgctctgggtgggaggagcagcgtacacccgtcaccagaacatctcttgtgtcatgacatgggggtgcaacgggggcctcacagcacagagtgaccgctgcctggcgttccccagcactcggtgtggaaaggcccctacctgctgtaagattatgggtccatgaaagcagtaagctggacacagaggtgtagtgtgcgggacagagggccttgcagatgcctttctgttggtgttttagtgttaaaatacggagagtatggaactcttcacctccattttctcagcggctgtgaagcagcctcctagcttcggaagtacggacactacgtcgcgttttcaagcgtgtctgttctgcaggtaacagcatcaagctgcacgtggaagcatctcgcggttttctagaaacaggcattttcttatccctctcccgctcctttttccacaaaggtgaatttcataaatgtaatactagtaaagtgaatgaattactgagtttatacagaaatttaggtaacttctcctttagtctcaagagcgagtcttgctttttaatgggtgccgtttatgttgctgcccgccctgtgtgcctggctcctctgggtgccttggtgtctgctggtggctggcagtgggcgcagcggaggagagttgtgctgcagctcatacggtgtgtctgtcatctcagtctggagtaaatgcagtgtctgccggtgtctgatgggttctgtccctcgtattttctttgccttctatcccattgcctggctaccgctgcctggcagccaagggtgttggtcgcgaagctggagtggcctctggtggagcctgcatcttgtctcgtctgcctctgctttacatttggtgtactttcgggcgtggtggcagtaaaatgacaccgtgattgagcttgtcagcagagctgaaagagaaagtagaaggatgtgcattgtttcttgtaagatatcttgcatgtatctgtgtattcaaattcaaacagagatggtttgtccatttgtccactgagaaattataaactagggacaagggggaggaaaagtactgaaatacagtttatgaagcaagtgtgtctcgggctgtgcttgtcccaggagccccagcagcatctgaactgaggcttcttcagtcctgcaggaacaggatcatctgtctcagcggtgggcagatgttttcatagacagccagggagtaaacactgttggctctgtgggctgtatggtctctgccataaatagtacagagatgtggctgtgtctagtacaacttttagacacagaaatctgaatgacatatattgttctgtgtcaagaaacttagattttttttttaactatttaaaaacgtgaaacctattcttagctcacaggccatggagaagctggtggggaccagacccagctccttagctggctgggctggggagggggcagtgacagtggcagctgctactcactgctcagtgtggaaaacacaggacttggcaatcacagcccgcagaaccatcatgtgtggcagaagcctgagggatgcggtttcttgcccacgtgctctgttcattttctgttgtttttctgcacttaaagaattcacatggaagcatgttttataaaatgaattaccagagaaacagagatgggccgagattctcagaaatggtcccatgtgaccaagttctgctgtttgggtgacagtgctttgaagatctcctttgaggatgtgcagtctttttttttttttttttttttttgagatggagtttgttgcccaggctggagtgagtggcacagtctcggctcactgcaacctccacctcctgggttcaagcagttctcgtgccgcagcctcccaagtagctgggactacaggcatgcgccaccacgccaggctaatttttgtatttttagtagagatggggtttcaccatgtctcaaactcctgacctcaggcgatccacccacctcagcgtcccaaagtgctgggattataggcgtgagccaccgcacctggcctatgagtggtcttttaattaggaacaaatctaatggaaaggagagttgactgaagttggcccacaggattgtgagctgggcagtgccttcatgaaggcttgccaccttgggacgccccagtttactggggtgtcttgcggagtgcagaaggctttctggcagctgcctgggtttggccagaccctgcctcccctcccgccggccaacccctagtccccttcctgtctccacttgcattcaggggtggctgctgttctgagaacattagaactgggaagagagatggagtcacatggatttttggtgggcattattctaaactttcgtatccaagttagtcccccttattccactgtggcattgccgttctaagcagttacctgatgcctgctgctgaagagctgctcacaggaggcggcggcggccctggcactgccccttgcattaggtcttgtgtttgatgtgttcttgtgaatttactttgtcagaacaaaatatttacgcgttgggttcaggaatttcttttagctccccatctggctgtgaaattcaggaaacctcccgttgcctagtaatcaccccatgtaggtgtacattgtgacaaagtgcatctgaccactaaggggcccccttggtgaccccagcacattcacagcagtgttaaaatggcctgcattttggagatgctggctggcctttcagtgcctcccaggaagacacatggcctttccctcttcagatgcctgaagggagtgctttgaggcaggtgatgtgctgggagtgtgggcggcctccctctggccccggggccctctgtggaccttggctccctccgtggacctgggcttcgtggtgagcactgcagcctccctgggcattccctccagcgccagcaccactgcaacatatagacctgagtgctattgtattttggcttggtgtgtatgctcttcattgtgtaaaattgctgttcttttgacaatttaagtgattgttttgtttactgtaagtttgaaaataaaaatgaagaaaaaaattccaatgactgtgctgtggttggagactttatttaccaagatgtttactcttcctttccccttccattttgaggagctgtgtcactcctcctcccccccagtgctttgtagtctctcctatgtcataataaagctacattttctctg

SEQ ID NO: 3727 - protein, 593 aa, Homo sapiens
AAAARGRCLPCSLPSAIAQPHLCPASALCSRRPGLGQPGQPPSSPHAALASSSPPSPPPPARGRALPPMVSRPEPEGEAMDAELAVAPPGCSHLGSFKVDNWKQNLRAIYQCFVWSGTAEARKRKAKSCICHVCGVHLNRLHSCLYCVFFGCFTKKHIHEHAKAKRHNLAIDLMYGGIYCFLCQDYIYDKDMEIIAKEEQRKAWKMQGVGEKFSTWEPTKRELELLKHNPKRRKITSNCTIGLRGLINLGNTCFMNCIVQALTHTPLLRDFFLSDRHRCEMQSPSSCLVCEMSSLFQEFYSGHRSPHIPYKLLHLVWTHARHLAGYEQQDAHEFLIAALDVLHRHCKGDDNGKKANNPNHCNCIIDQIFTGGLQSDVTCQVCHGVSTTIDPFWDISLDLPGSSTPFWPLSPGSEGNVVNGESHVSGTTTLTDCLRRFTRPEHLGSSAKIKCSGCHSYQESTKQLTMKKLPIVACFHLKRFEHSAKLRRKITTYVSFPLELDMTPFMASSKESRMNGQYQQPTDSLNNDNKYSLFAVVNHQGTLESGHYTSFIRQHKDQWFKCDDAIITKASIKDVLDSEGYLLFYHKQFLEYE

SEQ ID NO: 3728 - DNA, 635 bp, Homo sapiens
cacttttgttccttctgtctgctttctgatgctaatattatttgaacatagatttttctcagtaatgatttctagttggcttttcctttccttttgtcattactcagggaatgataaagatattgttgatttgagacagtgcagtgtagtgttatagacacacctgggttcaggtcctactctcttatttactagctggttggccatggtcaagttacctaatttccctaagcatcagtttccctatctgtacaaattattgagtaataatagtatctcttataggattggtataaagacttaaaaagttaatgtcatgtaaaatgctttagcataatacctgactcagagtaaaggcttaataaaccctagctgatcttactgtcagaatcaataatattactatttgtaatataattaccagacttaacaaatgggagaagtattaaccatctgcaggaataagtaccagagcctgcatcaaaatagtttatattcaacatgaagtctttaaattggcaaaagcactcaggttaatatatacctgttaagaaattttaagaaacaagcatggttttttagctgatactctgggaaaccaaattaagcagatattgtgcagtatggatatcaaa

SEQ ID NO: 3729 - DNA, 6043 bp, Homo sapiens
  misc_feature (4)..(4): n is a, c, g, or t
  misc_feature (42)..(43): n is a, c, g, or t
  misc_feature (65)..(65): n is a, c, g, or t
  misc_feature (230)..(230): n is a, c, g, or t
  misc_feature (5303)..(5303): n is a, c, g, or t
  misc_feature (5313)..(5313): n is a, c, g, or t
  misc_feature (5332)..(5332): n is a, c, g, or t
tgangagragtcgtgactgccggccgccgggaccgaagcggnngtcggcggggggctgctgggangcgcggcggtgtgcgcgggaactctgcgccgtggcgttccgctccatgactgtcgcgcggccgcgccggcggtgagggagccggagttcgcgccgccctctcacccctcccttcccccaccccacccccgggcgcctggcgctcgctccgggccgcggggcctantgctgcgccgcggggccggccccagcagccgccagtcccaccgccgccgccgcgatggcgccgctcctgggccgcaagcccttcccgctggtgaagccgttgcccggagaggagccgctcttcaccatcccgcacactcaggaggccttccgcacccgggaagagtatgaagcccgcttggaaaggtacagtgagcgcatttggacgtgcaagagtactggaagcagtcagctaacacacaaggaagcctgggaggaagaacaggaagttgctgagcttttgaaggaggagtttcctgcctggtatgagaagcttgttctggaaatggttcaccataacacagcctccttagagaagttagtagatactgcttggttggagatcatgaccaaatatgctgtgggagaagagtgtgacttcgaggttgggaaggagaaaatgctcaaggtgaagattgtggagattcatcctttggagaaagtggatgaagaggccactgagaagaaatctgatggtgcctgtgattctccatcaagtgacaaagagaactccagtcagattgctcaggaccatcagaagaaggagacagttgtgaaagaggatgaaggaaggagagagagtattaatgacagagcacgtagatcgccacgaaaacttcctacttcattaaaaaaaggagaaaggaaatgggctcctccaaaatttctgcctcacaaatatgatgtgaaactacaaaatgaagataagatcatcagtaacgtgccagcagacagcttgattcgtacagagcgcccaccaaataaggagatagttcgatactttatacggcataatgcattacgagctggtactggtgaaaatgcaccttgggtcgtagaagatgaattggtgaagaaatactctctgcccagcaagttcagtgactttttacttgatccatacaagtatatgactctcaacccttctactaagaggaagaatactggatccccagacaggaagccctcaaagaaatccaagacagacaactcttctcttagttcaccactaaatcctaagttatggtgtcacgtacacttgaagaagtcattgagtggctcgccactcaaagtgaagaactcaaagaattccaaatctcctgaagaacatctagaagaaatgatgaagatgatgtcgcccaataagctgcacactaactttcacattcctaaaaaaggcccacctgccaagaaaccagggaagcacagtgacaagcctttgaaggcaaagggcagaagcaaaggcatcctgaatggacagaaatccacagggaattccaaatctcccaaaaaaggactgaagactcctaaaaccaaaatgaagcagatgactttgttggatatggccaaaggcacgcagaagatgacacgagccccacggaattctgggggtacacctaggacctctagtaaacctcataaacatctgcctcctgcagccctacacctcattgcatactacaaagaaaacaaagacagggaggacaagaggagcgccctgtcctgtgttatctccaaaacagctcgtcttctctctagtgaagatagagctcgtctcccagaagaattgcgaagtcttgttcaaaaacgctatgaacttctagagcacaaaaagaggtgggcttctatgtctgaagaacaacggaaagaatatttgaaaaagaaacgggaggagctgaaaaagaagttgaaggaaaaagccaaagaacgaagagagaaagaaatgcttgagagattagaaaaacagaagcggtatgaggaccaagagttaactggcaaaaaccttccagcattcagattggtggatacccctgaagggctgcccaacacgctgtttggggatgtggccatggtggtggaattcttgagctgttattctgggctacttttaccagatgctcagtatcctattactgctgtgtcccttatggaagccttgagtgcagataagggtggctttttataccttaacagggtgttggtcatcctcttacagaccctcctacaagatgagatagcagaagactatggtgaattgggaatgaagctgtcggaaatccccttgactctgcattctgtttcagagctggtgcggctctgcttgcgcagatctgatgttcaggaggaaagcgagggctcagacacagatgacaataaagattcagctgcatttgaggataatgaggtacaagatgagttcctagaaaagctggagacctctgaattttttgagctgacgtcagaggagaagctacagatcttgacagcactgtgccaccggatcctcatgacatactcagtgcaagaccacatggagaccagacagcagatgtctgcagagttgtggaaggaacggcttgctgtgttgaaggaagaaaatgataagaagagagcagagaaacagaaacggaaagaaatggaagccaaaaataaagaaaatggaaaagttgagaatgggttaggcaaaactgataggaaaaaagaaattgtgaagtttgagccccaagtagatacagaagctgaagacatgattagtgctgtgaagagcagaaggttgcttgccattcaagctaagaaggaacgggaaatccaggaaagagaaatgaaagtgaaactggaacgccaagctgaagaagaacgaatacggaagcacaaagcagctgctgagaaagctttccaggaagggattgccaaggccaaactagtcatgcgcaggactcctattggcacagatcgaaaccataatagatactggctcttctcagatgaagttccaggattattcattgaaaaaggctgggtacatgacagcattgactaccgattcaaccatcactgcaaagaccacacagtctctggtgatgaggattactgtcctcgcagtaagaaagcaaacttaggtaaaaatgcaagcatgaacacacaacatggaacagcaacagaagttgctgtagagacaaccacacccaaacaaggacagaacctatggtttttatgtgatagtcaaaaggagctggatgagttgctaaactgtcttcaccctcagggaataagagaaagtcaacttaaagagagactagagaagaggtaccaggacattattcactctattcatctagcacggaagccaaatttgggtctaaaatcttgtgatggcaaccaggagcttttaaacttccttcgtagtgatctcattgaagttgcaacaaggttacaaaaaggaggacttggatatgtggaagaaacatcagaatttgaagcccgggtcatttcattagagaaattgaaggattttggtgagtgtgtgattgcccttcaggccagtgtcataaagaaatttctccaaggcttcatggctcccaagcaaaagagaagaaaactccaaagtgaagattcagcaaaaactgaggaagtggatgaagagaagaaaatggtagaggaagcaaaggttgcatctgcactggagaaatggaagacagcaatccgggaagctcagactttctccaggatgcacgtgctgcttgggatgcttgatgcctgtatcaagtgggatatgtccgcagaaaatgctaggtgcaaagtttgtcgaaagaaaggtgaggatgacaaattgatcttatgtgatgagtgtaataaagccttccacctgttttgtctgaggccggccctctatgaagtaccagatggtgagtggcagtgcccagcttgccagcccgctactgccaggcgcaactcccgtggcaggaactatactgaagagtctgcttctgaggacagtgaagatgatgagagtgatgaagaggaggaggaggaagaagaggaggaggaggaagaagattatgaggtggctggtttgcgattgagacctcgaaagaccatccggggcaagcacagcgtcatcccccctgcagcaaggtcaggccggcgcccgggtaagaagccacactctaccaggaggtctcagcccaaggcaccacctgtggatgatgctgaggtggatgagctggtgcttcagaccaagcggagctcccggaggcaaagcctggagctgcagaagtgtgaagagatcctccacaagatcgtgaagtaccgcttcagctggcccttcagggagcctgtgaccagagatgaggccgaggactactatgatgtgatcacgcaccccatggactttcagacagtgcagaacaaatgttcctgtgggagctaccgctctgtgcaggagtttcttactgacatgaagcaagtgtttaccaatgctgaggtttacaactgccgtggcagccatgtgctaagctgcatggtgaagacagaacagtgtctagtggctctgttgcataaacaccttcctggccacccatatgtccgcaggaagcgcaagaagtttcctgataggcttgctgaagatgaaggggacagtgagccagaggccgttggacagtccaggggacgaagacagaagaagtagagaggcagggccgtggtgacagtatcagtgagtgccatacagaattgtgtattcaccagcatcataaaacagttgtggtcttttgagttgatcttggcagagtaaagggacgtgtcctggagccattcctgaatctccccttctttgtgacagctcctcccacccccccaaaaaataaaaaaaccacaaaaaacaaaaaaacaaaactaaggcacttcacttagagactggagtcctgcttataatcatgcatataacctttactttgatggatctggccagaggggtgttggagcccagcccacccacataccagtcaagctcttaggggagcagaagaaaagcaggaagaatttaaatgtttaattttttttttaaattgacttttctagttattaaaagttgcttgtttcagcagtgatattgtataaagaacatcttgtaagatactcctgacatcttgctttagcacatgtacagtacagtttctatgataatgtgtttgctctaacttccctggcttctccttcagcccatccactctcctctagagcagttgggttggangctcattgangcaagcagcaacattgganggggagcagggcagtgctgtgtctgctgcctcccatgcccgttctgacctcagccttggaactcctcaagaacctgaagattccagtggtcagtgtcggtggggggtgggaggagagagcggcagagaagctctgagagccccttcccccacaacaaatctagctctagttgttatatttaggcaaaactttgtagtcttctttcccttttatgatggattttgataaaagtacaaaacagggtttttcttttttatcacctttgaatttggaaattttgagcacccaagctcttctgtacctatttaaagtccaccaaggggactgcagctcctagaacatgagaatcaagcctcttaattttaaactgcggaatgtggcctctgcttcctccgtcctcctgcccaaggacgacgaggattgctccagggctgctgggtagtttaccgtcccttctataggcatggagttggcactgacatcacagcttcataaccccaccaccgccagcttcccctgcctcctacatccagtctgttcttgttcatagtgagaatcctgtgttcccacttcagtgacacctgaattgtttgttgttgttttttttttttattgtcttcaaagaggaagggccccattaaagggtgaacttgtaataaattggaatttcaaataaacctcatgtacttgtgtttataaagaagaaaccaa

SEQ ID NO: 3730 - protein, 1483 aa, Homo sapiens
MAPLLGRKPFPLVKPLPGEEPLFTIPHTQEAFRTREEYEARLERYSERIWTCKSTGSSQLTHKEAWEEEQEVAELLKEEFPAWYEKLVLEMVHHNTASLEKLVDTAWLEIMTKYAVGEECDFEVGKEKMLKVKIVEIHPLEKVDEEATEKKSDGACDSPSSDKENSSQIAQDHQKKETVVKEDEGRRESINDRARRSPRKLPTSLKKGERKWAPPKFLPHKYDVKLQNEDKIISNVPADSLIRTERPPNKEIVRYFIRHNALRAGTGENAPWVVEDELVKKYSLPSKFSDFLLDPYKYMTLNPSTKRKNTGSPDRKPSKKSKTDNSSLSSPLNPKLWCHVHLKKSLSGSPLKVKNSKNSKSPEEHLEEMMKMMSPNKLHTNFHIPKKGPPAKKPGKHSDKPLKAKGRSKGILNGQKSTGNSKSPKKGLKTPKTKMKQMTLLDMAKGTQKMTRAPRNSGGTPRTSSKPHKHLPPAALHLIAYYKENKDREDKRSALSCVISKTARLLSSEDRARLPEELRSLVQKRYELLEHKKRWASMSEEQRKEYLKKKREELKKKLKEKAKERREKEMLERLEKQKRYEDQELTGKNLPAFRLVDTPEGLPNTLFGDVAMVVEFLSCYSGLLLPDAQYPITAVSLMEALSADKGGFLYLNRVLVILLQTLLQDEIAEDYGELGMKLSEIPLTLHSVSELVRLCLRRSDVQEESEGSDTDDNKDSAAFEDNEVQDEFLEKLETSEFFELTSEEKLQILTALCHRILMTYSVQDHMETRQQMSAELWKERLAVLKEENDKKRAEKQKRKEMEAKNKENGKVENGLGKTDRKKEIVKFEPQVDTEAEDMISAVKSRRLLAIQAKKEREIQEREMKVKLERQAEEERIRKHKAAAEKAFQEGIAKAKLVMRRTPIGTDRNHNRYWLFSDEVPGLFIEKGWVHDSIDYRFNHHCKDHTVSGDEDYCPRSKKANLGKNASMNTQHGTATEVAVETTTPKQGQNLWFLCDSQKELDELLNCLHPQGIRESQLKERLEKRYQDIIHSIHLARKPNLGLKSCDGNQELLNFLRSDLIEVATRLQKGGLGYVEETSEFEARVISLEKLKDFGECVIALQASVIKKFLQGFMAPKQKRRKLQSEDSAKTEEVDEEKKMVEEAKVASALEKWKTAIREAQTFSRMHVLLGMLDACIKWDMSAENARCKVCRKKGEDDKLILCDECNKAFHLFCLRPALYEVPDGEWQCPACQPATARRNSRGRNYTEESASEDSEDDESDEEEEEEEEEEEEEDYEVAGLRLRPRKTIRGKHSVIPPAARSGRRPGKKPHSTRRSQPKAPPVDDAEVDELVLQTKRSSRRQSLELQKCEEILHKIVKYRFSWPFREPVTRDEAEDYYDVITHPMDFQTVQNKCSCGSYRSVQEFLTDMKQVFTNAEVYNCRGSHVLSCMVKTEQCLVALLHKHLPGHPYVRRKRKKFPDRLAEDEGDSEPEAVGQSRGRRQKK

SEQ ID NO: 3731 - DNA, 629 bp, Homo sapiens
ccggaacattggttacgctactatgtaaataaatctcaaaaattgtactagtgaaagaagccagacacaaaaggtctcatacaattcgatttatataaaatagcaagaatagataaaaccatagagacagaaagcagatgggtggttgctgggggctggaggaaggaaggaatggagagtatctgcttaatgggatggggtttccttttagaggagaacattttttttggaactttaaataaaggtggtggttatgcaacattgttaacaatactaagtggcactgaacttctcactttaaaatagttaattttatgttatgtgacgtttacctcaataaaaaaattcttaaaaaaaaaaactcagtgatatccaaccattaaaaaatataagttacatagctcgtatataatcaacttacttattactgcactatgaggggcacccagatatgtaagacagagtcccaacctttggttgtcggaggactatctaaggatacagagattaatacaaataaaagaactaccacgaaagaagtgccctccaagtacaaagagagttcaaatatgtacatctggttgcggagaagggaaaacttctcaagaagaattggagtgagctttagg

SEQ ID NO: 3732 - DNA, 256 bp, Homo sapiens
gttgctaggaaggtttgacagatgtccgcctggccagatccttattttttcaattgcaatacagcagtatgcaaggcacttactgcatgccaaagcttatgccgagagctggctgccagcagctcctcctgcctcgaggcctttgtccatgtcatcatttcccctttggctgtaacagctgcagttctctcataattttaggtttcatcttaaatgtcacttcttcagaggcttcttgacagcacaagtcagggcc

SEQ ID NO: 3733 - DNA, 249 bp, Homo sapiens
ggcacgagggcacgggaaacgcgggcgtaggtgaccggcggctttctcagttttggtggagacgggcgcatgtgggcgctttgctcgctgctgcggtccgcggccggacgcaccatgtcgcagggacgcaccatatcgcaggcacccgcccgccgcgagcggccgcgcaaggacccgctgcggcacctgcgcacgcgagagaagcgcggaccgtcggggtgctccggcggaccaaacaccgtgtactct

SEQ ID NO: 3734 - DNA, 419 bp, Homo sapiens
  misc_feature (148)..(148): n is a, c, g, or t
  misc_feature (221)..(221): n is a, c, g, or t
  misc_feature (224)..(224): n is a, c, g, or t
  misc_feature (255)..(255): n is a, c, g, or t
  misc_feature (265)..(267): n is a, c, g, or t
  misc_feature (395)..(395): n is a, c, g, or t
  misc_feature (411)..(411): n is a, c, g, or t
gttctgaatcgctgtgtgtcacccgggcgctgccaggaagggagggctggggtgatgaccatggtaacacccgggtgggagttcgtgacatctccggcgcggagggactcgatgtctatggcaatggtcgcctggtggaagggaacanactagatcccttcgctcgggacgctcacattccaggcccttgtcctgcaggctgccgcgggggacacgcagangangaggccggggaatggccgcggtgtggcagcnactcttaccnnnggacgcgaggtgaggcgtggggtcaaagcccatgggagcagaacttactgtggtgcatgcgcaatggcgataagtgaggctgggcggagaacttgccttatgcggctgcgtgggcatgccggagtgancatgcgcagtagcttnggcgggca

SEQ ID NO: 3735 - DNA, 654 bp, Homo sapiens
  misc_feature (552)..(552): n is a, c, g, or t
  misc_feature (609)..(609): n is a, c, g, or t
ccagcctggatgaaagagcgagaccctgtctcaaaaaaaaaaaaaaaaaaaaaatgccgggtgcggtggctcgtgcctgcaatccccgcactttaggtggcagaggcaggcagataacctgaggttgggagttcaagaccaccctgaccaacatggagaaaccccatctctactaaaaatacaaaattagttgggtgtggtggtgcatgcctgtaatcccagctactcgggagcctgaggcaggagaatcgcttgaacccaggaggcggaggttgcagtgaaccgagatcgcaccattgcactccagcctgggcaacaaaaacaaaactgtctcaaaaaaaaaaaaaaaaaaaactcgaggtcgacggtatcgataagcttgatatcgaattcggcacgagcattagccttctttaattcttttgccattacatacatgtttcggctacagactgaacacgaactaaagtccctaaggaggaaaaaaccttacatattcctgagatgtgattctttaatacttcttttgcaaagctaattatcaaatgattngattaaacctagacgcattaggaaatgcaagttttacctaaaactttgcagaaattnaacacattttcatttacttactaacgaacagacctgattttaata

SEQ ID NO: 3736 - DNA, 424 bp, Homo sapiens
aggtcaaatgttattttttttttttagaaaaagagactattcatttatctgagagtgactaatgaacaaacaggaaagaaatgttccgattaagtaaaaggggaattgtaagaaagaataaagttgctttttgctttcacagaactagatacaaaatattaactgtttgaaaggtaagagcaataactaaactgaggtgtaaacaagatagatcttaaatacaaatgaactaatatgttatattgtgttcccagggttggggaatagggagtacctattctatagtcctattaagtctttcttaagtatcattgttaaaaactaagaataacttaaagaatattaacaaagtgcatgacatgaaacaacagtggaaagattaaaacaacattgaaaaataatgacaaaaaagatgagaagagtg

SEQ ID NO: 3737 - DNA, 490 bp, Homo sapiens
  misc_feature (126)..(126): n is a, c, g, or t
cttgaaccggggaggtggaggttgcagtgagctgagatcacgccattgtactccagcctgggcgacagagcaagactccatttcaaaaaaaaaaaaaaaaaaaaaaatccactcatataaaaggtnagctcagctcactgggttccatttctcagtggcttctccatcctcatttgcaaacctcagagggataaggcagttgaacctgatgagcaagaattataacagcaaggaaacattaatgcttagaattctgagatccagcacaactcagtctgtgggagctcagctcgctgcccagggataggtatgacctatgtctgccttaggctgctgggagatgccattctccagtttcagaagcaggcagggcaaaggtcaagactgtggtattggggtcttttggctctgaaggatcctgggaaccacttgattttgggtttattccctccagggttttaaagaggaacaagaggtgctagctcttacc

SEQ ID NO: 3738 - DNA, 11580 bp, Homo sapiens
cacgcgtgggctcggcgggggcccgctcccaggcccgctcccgagcccgttccgctcccgtccgccttcttctcgccttctctccgcgtggctcctccgtcccggcgtctccaaaactgaatgagcgagcggcgcgtagggcgscggcggcggcggcggcggcggcggcggcggcatggagcgcagtggctgggcccggcagactttcctcctagcgctgttgctgggggcgacgctgagggcgcgcgcggcggctggctattacccccgcttttcgcccttctttttcctgtgcacccaccacggggagctggaaggggatggggagcagggcgaggtgctcatttccctgcatattgcgggcaaccccacctactacgttccgggacaagaataccatgtgacaatttcaacaagcaccttttttgacggcttgctggtgacaggactatacacatctacaagtgttcaggcatcacagagcattggaggttccagtgctttcggatttgggatcatgtctgaccaccagtttggtaaccagtttatgtgcagtgtggtagcctctcacgtgagtcacctgcccacaaccaacctcagtttcatctggattgctccacctgcgggcacaggctgtgtgaatttcatggctacagcaacacaccggggccaggttattttcaaagatgctttagcccagcagttgtgtgaacaaggagctccaacagatgtcactgtgcacccacatctagctgaaatacatagtgacagcattatcctgagagatgactttgactcctaccaccaactgcaattaaatccaaatatatgggttgaatgtaacaactgtgagactggagaacagtgtggcgcgattatgcatggcaatgccgtcaccttctgtgaaccatatggcccacgagaactgattaccacaggccttaatacaacaacagcttctgtcctccaattttccattgggtcaggttcatgtcgctttagttattcagaccccagcatcatcgtgttatatgccaagaataactctgcggactggattcagctagagaaaattagagccccttccaatgtcagcacaatcatccatatcctctaccttcctgaggacgccaaaggggagaatgtccaatttcagtggaagcaggaaaatcttcgtgtaggtgaagtgtatgaagcctgctgggccttagataacatcttgatcatcaattcagctcacagacaagtcgttttagaagatagtctcgacccagtggacacaggcaactggcttttcttcccaggagctacagttaagcatagctgtcagtcagatgggaactccatttatttccatggaaatgaaggcagcgagttcaattttgccaccaccagggatgtagatctttccacagaagatattcaagagcaatggtcagaagaatttgagagccagcctacaggatgggatgtcttgggagctgtcattggtacagaatgtggaacgatagaatcaggcttatcaatggtcttcctcaaagatggagagaggaaattatgcactccatccatggacactaccggttatgggaacctgaggttttactttgtgatgggaggaatttgtgaccctggaaattctcatgaaaatgacataatcctgtatgcaaaaattgaaggaagaaaagagcatataacactggataccctttcctattcctcatataaggttccgtctttggtttctgtggtcatcaatcctgaacttcagactcctgctaccaaattttgtctcaggcaaaagaaccatcaaggacataataggaatgtctgggctgtagactttttccatgtcttgcctgttctcccttctacaatgtctcacatgatacagttttccatcaatctgggatgtggaacgcatcagcctggtaacagtgtcagcttggaattttctaccaaccatgggcgctcctggtccctccttcacactgaatgcttacctgagatctgtgctggaccccacctcccccacagcactgtctactcctctgaaaactacagtgggtggaaccgaataacaattccccttcctaacgcagcactaacccggaacaccaggattcgctggagacaaacaggaccaatccttggaaacatgtgggcaattgataatgtttatattggcccgtcatgtctcaaattctgttctggcagaggacagtgcactagacatggttgcaagtgtgaccctggattttctggcccagcttgtgagatggcatcccagacattcccaatgtttatttctgaaagctttggcagttccaggctctcctcttaccataacttttactctatccgtggtgctgaagtcagctttggttgtggtgtcttggccagtggtaaggccctggttttcaacaaagaagggcggcgtcagctaattacatctttccttgacagctcacaatccaggtttctccagttcacactgagactggggagcaaatctgttctgagcacgtgcagagcccctgatcagcctggtgaaggagttttgctgcattattcttatgataatgggataacttggaaactcctggagcattattcatatctcagctatcatgagcccagaataatctccgtagaactaccaggtgatgcaaagcagtttggaattcagttcagatggtggcaaccgtatcattcttcccagagagaagatgtatgggctattgatgagattatcatgacatctgtgcttttcaacagcattagtcttgactttaccaatcttgtggaggtcactcagtctctgggattctaccttggaaatgttcagccatactgtggccacgactggaccctttgttttacaggagattctaaacttgcctcaagtatgcgctatgtggaaacacaatcaatgcagataggagcatcctatatgattcagttcagtttggtgatgggatgtggccagaaatacaccccacacatggacaaccaggtgaagctggagtactcaaccaaccacggccttacctggcacctcgtccaagaagaatgccttccaagtatgccaagttgtcaggaatttacatcagcaagtatttaccatgccagtgagtttacacagtggaggagagtcatagtgcttcttccccagaaaacttggtccagtgctacccgtttccgctggagccagagctattacacagctcaagacgagtgggctttggacagcatttacattgggcagcagtgccccaacatgtgcagtgggcatggctcatgcgatcatggcatatgcaggtgtgaccaggggtaccaaggcactgaatgccacccagaagctgcccttccgtccacaattatgtcagattttgagaaccagaatggctgggagtctgactggcaagaagttattgggggagaaattgtaaaaccagaacaagggtgtggtgtcatctcttctggatcatctctgtacttcagcaaggctgggaaaagacagctggtgagttgggacctggatacttcttgggtggactttgtccagttctacatccagataggcggagagagtgcttcatgcaacaagcctgacagcagagaggagggcgtcctccttcagtacagcaacaatgggggcatccagtggcacctgctagcagagatgtacttttcagacttcagcaaacccagatttgtctatctggagcttccagctgctgccaagaccccttgcaccaggttccgctggtggcagcccgtgttctcaggggaggactatgaccagtgggcagtcgatgacatcatcattctgtccgagaagcagaagcagatcatcccagttatcaatccaactttacctcagaacttttatgagaagccagcttttgattaccctatgaatcagatgagtgtgtggttgatgttggctaatgaaggaatggttaaaaatgaaaccttctgtgctgccacaccatcagcaatgatatttggaaaatcagatggagatcgatttgcagtaactcgagatttgaccctgaaacctggatatgtgctacagttcaagctaaacataggttgtgccaatcaattcagcagtactgctccagttcttcttcagtactctcatgatgctggtatgtcctggtttctggtgaaagaaggctgttacccggcttctgcaggcaaaggatgcgaaggaaactccagagaactaagtgagcccaccatgtatcacacaggggactttgaagaatggacaagaatcaccattgttattccaaggtctcttgcatccagcaagaccagattccgatggatccaggagagcagctcacagaaaaacgtgcctccatttggtttagatggagtgtacatatccgagccttgtcccagttactgcagtggccatggggactgcatttcaggagtgtgtttctgtgacctgggatatactgctgcacaaggaacctgtgtgtcaaatgtccccaatcacaatgagatgttcgataggtttgaggggaagctcagccctctgtggtacaagataacaggtgcccaggttggaactggctgtggaacacttaacgatggcaaatctctctacttcaatggccctgggaaaagggaagcccggacggtccctctggacaccaggaatatcagacttgttcaattttatatacaaattggaagcaaaacttcaggcattacctgcatcaaaccaagaactagaaatgaagggcttattgttcagtattcaaatgacaatgggatactctggcatttgcttcgagagttggacttcatgtccttcctggaaccacagatcatttccattgacctgccacaggacgcgaagacacctgcaacggcatttcgatggtggcaaccgcaacatgggaagcattcagcccagtgggctttggatgatgttcttataggaatgaatgacagctctcaaactggatttcaagacaaatttgatggctctatagatttgcaagccaactggtatcgaatccaaggaggtcaagttgatattgactgtctctctatggatactgctctgatattcactgaaaacataggaaaacctcgttatgctgagacctgggattttcatgtgtcagcatctacctttttgcagtttgaaatgagcatgggctgtagcaagcccttcagcaactcccacagtgtacagctccagtattctctgaacaatggcaaggactggcatcttgtcaccgaagagtgtgttcctccaaccattggctgtctgcattacacggaaagttcaatttacacctcggaaagattccagaattggaagcggatcactgtctaccttccactctccaccatttctcccaggacccggttcagatggattcaggccaactacactgtgggggctgattcctgggcgattgataatgttgtactggcctcagggtgcccttggatgtgctcaggacgagggatttgtgatgctggacgctgtgtgtgtgaccggggctttggtggaccctattgtgttcctgttgttcctctgccctcgattcttaaagacgatttcaatgggaatttacatcctgacctttggcctgaagtgtatggtgcagagagggggaatctgaatggtgaaaccatcaaatctggaacatctctaatttttaaaggggaaggactaaggatgcttatttcaagagatctagattgtacaaatacaatgtatgtccagttttcacttagatttatagcaaaaagtaccccagagagatctcactctattctgttacaattctccatcagtggaggaatcacttggcacctgatggatgaattttactttcctcaaacaacgaatatacttttcatcaatgttcccttgccatacactgcccaaaccaatgctacaagattcagactctggcaaccttataataacggtaagaaagaagaaatctggattgttgatgacttcattatcgatggaaataatgtaaacaaccctgtgatgctcttggatacatttgattttgggcccagagaagacaattggtttttctatcctggtggtaacatcggtctttattgtccatattcttcaaagggggcacctgaagaagattcagctatggtgtttgtttcaaatgaagttggtgagcattccattaccacccgtgacctaaatgtgaatgagaacaccatcatacaatttgagatcaacgttggctgttcgactgatagctcatccgcggatccagtgagactggaattttcaagggacttcggggcgacctggcaccttctgctgcccctctgctaccacagcagcagccacgtcagctctttatgctccaccgagcaccaccccagcagcacctactacgcaggaaccatgcagggctggaggagggaggtcgtgcactttgggaagctgcacctttgtggatctgtccgtttcagatggtaccagggattttaccctgccggctctcagccagtgacatgggccattgataatgtctacatcggtccccagtgtgaggagatgtgtaatggacaggggagctgtatcaatggaaccaaatgtatatgtgaccctggctactcaggtccaacctgtaaaataagcaccaaaaatcctgattttctcaaagatgatttcgaaggtcagctagaatctgatagattcttattaatgagtggtgggaaaccatctcgaaagtgtggaatcctttctagtggaaacaacctctttttcaatgaagatggcttgcgcatgttgatgacacgagacctggatttatcacatgctagatttgtgcagttcttcatgagactgggatgtggtaaaggcgttcctgaccccaggagtcaacccgtgctcctacagtattctctcaacggtggcctctcgtggagtcttcttcaggagttccttttcagcaattccagcaatgtgggcaggtacattgccctggagatacccttgaaagcccgttctggttctactcgccttcgctggtggcaaccgtctgagaatgggcacttctacagcccctgggttatcgatcagattcttattggaggaaatatttctggtaatacggtcttggaagatgatttcacaacccttgatagtaggaaatggctgcttcacccaggaggcaccaagatgcccgtgtgtggctctactggtgatgccctggtcttcattgaaaaggccagcacccgttacgtggtcagcacagacgttgccgtgaatgaggattccttcctacagatagacttcgctgcctcctgctcagtcacagactcttgttatgcgattgaattggaatactcagtagatcttggattgtcatggcacccattggtaagggactgtctgcctaccaatgtggaatgcagtcgctatcatctgcaacggatcctggtgtcagacactttcaacaagtggactagaatcactctgcctctccctccttataccaggtcccaagccactcgtttccgttggcatcaaccagctccttttgacaagcagcagacatgggcaatagataatgtctatatcggggatggctgcatagacatgtgcagtggccatgggagatgcatccagggaaactgcgtctgtgatgaacagtggggtggcctgtactgtgatgaccccgagacctctcttccaacccaactcaaagacaacttcaatcgagctccatccagtcagaactggctgactgtgaacggagggaaattgagtacagtgtgtggagccgtggcgtcgggaatggctctccatttcagtgggggttgtagtcgattattagtcactgtggatctaaacctcactaatgctgagttcatccaattttacttcatgtatgggtgcctgattacaccaaacaaccgtaaccaaggtgttctcttggaatattctgtcaatggaggcattacctggaacctgctcatggagattttctatgaccagtacagtaagcccggatttgtgaatatccttctccctcctgatgctaaagagattgccactcgcttccgctggtggcagccaagacatgacggcctggatcagaacgactgggccattgacaatgtcctcatctcaggctctgctgaccaaaggaccgttatgctggacaccttcagcagcgccccagtaccccagcacgagcgctcccctgcagatgccggccctgtcgggaggatcgcctttgacatgtttatggaagacaaaacttcagtgaatgagcactggctattccatgatgattgtacagtagaaagattctgtgactcccctgatggtgtgatgctctgtggcagtcatgatggacgggaggtgtatgcagtgacccatgacctgactcccactgaaggctggattatgcaattcaagatctcagttggatgtaaggtgtctgaaaaaattgcccagaatcaaattcatgtgcagtattctactgacttcggtgtgagttggaattatctggtccctcagtgcttgcctgctgacccaaaatgctctggaagtgtttctcagccatctgtattctttccaactaaagggtggaaaaggatcacctacccacttcctgaaagcttagtgggaaatccggtaaggtttaggttctatcagaagtactcagacatgcagtgggcaatcgataatttctacctgggccctggatgcttggacaactgcaggggccatggagattgcttaagggaacagtgcatctgtgatccgggatactcagggccaaactgctacttgacccacactctgaagactttcctgaaggaacgctttgacagtgaagaaatcaaacctgacttatggatgtccttagaaggtggaagtacttgcactgagtgtggaattcttgccgaggacactgcactctattttgggggatccactgtgagacaagcggttacacaagatttggatcttcgaggtgcaaagttcctgcaatactgggggcgcatcggtagtgagaacaacatgacctcttgccatcgtcccatctgccggaaggaaggcgtgctgttggactactctaccgatggaggaattacctggactttgctccatgagatggattaccagaaatacatttctgttagacacgactacatacttcttcctgaagatgccctcaccaacacaactcgacttcgctggtggcagccttttgtgatcagcaatggaattgtggtctctggggtggagcgtgctcagtgggcactggacaacattttgattggtggagcagaaatcaatcccagccaattggtggacacttttgatgatgaaggcacttcccatgaagaaaactggagtttttaccctaatgctgtaaggacagcaggattttgtggcaatccatcctttcacctctattggccaaataaaaagaaggacaagactcacaatgctctctcctcccgagaactcattatacagccaggatacatgatgcagtttaaaattgtggtgggttgtgaagccacttcttgtggtgaccttcattccgtaatgctggaatacactaaggatgcaagatcggattcctggcagctcgtacagacccagtgccttccttcctcttctaacagcattggctgctcccctttccagttccatgaagccaccatctacaactctgtcaacagctcaagctggaaaagaatcaccatccagctgcctgaccatgtctcctctagtgcaacacagttccgctggatccagaagggagaagaaactgagaagcaaagctgggcaattgaccacgtgtacattggagaggcttgccccaagctctgcagcgggcacggatactgcacgaccggtgccatctgcatctgcgacgagagcttccaaggtgatgactgctctgttttcagtcacgaccttcccagttatattaaagataattttgagtccgcaagagtcaccgaggcaaactgggagaccattcaaggtggagtcataggaagtggctgtgggcagctggccccctacgcccatggagactcactgtactttaatggctgtcagatcaggcaagcagctaccaagcctctggatctcactcgagcaagcaaaatcatgtttgttttgcaaattgggagcatgtcgcagacggacagctgcaacagtgacctgagtggcccccacgctgtggacaaggcggtgctgctgcaatacagcgtcaacaacgggatcacctggcatgtcatcgcccagcaccagccaaaggacttcacacaagctcagagagtgtcttacaatgtccccctggaggcacggatgaaaggagtcttactgcgctggtggcaaccacgccacaatggaacaggtcatgatcaatgggctttggaccatgtggaggtcgtcctagtaagcactcgcaaacaaaattacatgatgaatttttcacgacaacatgggctcagacatttctacaacagaagacgaaggtcacttaggcgatacccatgaagaatcaaaaagtttattttttttcttccaacatgtgatgtgttgctctccattcttttaaatctcgcactacatctgatatcaggaaatatctgtgaaggacttggtgattacctgaaagcccttctcaagaccgagtgtacaccactttcccacactgtgaactaatgacaagtgacttatttgctcataagtaaatgtcttcatgttgatgtgtccgtgaaagttgtgatctgttgtaatatcagttacagtggcagtattgacaataagaaacagtttaacagaaaaatgaaatttaagcacaaaaaatttaagagattttatgtttaaaatggcatttagcacagtatttaacattcttggtcacaaagctatttaagtggactgtatttcagctatgtctcatgttttatatgattaaattatcattgtttgtcctttatgtattctcttctacaatacaacacattgaaactgtatttacttgttatgttgtaatattttgctgctgaatttggggctacttatattctgcagaaaattaattgaaatacctattcaagaagatagttgtaaagatattgtatctcctttaatatactccttaaaaatgtatgttggtttagcgttgttttgtggataagaaaaatgcttgaccctgaaatattttctactttaaattgtggatgaagaccctatctcccacaaataagttcccatttccttgtctaaagatctttttttaagtgttctgtggctgatttactaacagtaactgccattttttgtctgtgataacagagtgatttgtaaaacagtggttgttttttcattgtgttttcttcgtggattgttttttctgcgggtcatattcataccttctgatgaagttgtacaacaccagcaacattataatggccctgtagctctgaatgctatttgtgtaactgaaaggttgcactctagggtgaaccaagctataaaagcccatgcttaaataaaaattatgtccaaaagcc

SEQ ID NO: 3739 - protein, 3460 aa, Homo sapiens [sequence omitted]

SEQ ID NO: 3740 - DNA, 696 bp, Homo sapiens
cacacacacatgctatgatgcggaaatccccttatgacttgctactttttgattttgtgatattttgtactttttagttgttcagcaactgtcttatttaatggggagattttaagtaacataactagtggctctcagttaaaatgtgaggaagaactacagctcttaaatgtagcaatggcactgttgcaaactcagtgcaaacgcctagattgctttcttcttaacctatttatttctttggtaaatttttctgatatggtcctttatagagtgtctcaaggtgcagaggtcagactaagaaatattccaaatgtcttttataagatagatgcacttatgcactaaattatcttgggatagttcccaaaagattgctgaaaaagtagattgagtattaaaacttgaaaatatatgatggctcgtgggatgtcctactatcactgaacaaactaaaggtgcactgctttgggatttaatttccacggttgcttgatcattatatcattggaacaactgatacttcactactttaataaagaattaacagagattgaactctcagaggtgggtaatttggttaaaaatacatgttcatgggtttaccactaactcctgagaaatgttaaaggttcacacgggtgtccttttctcaaagtttgtaaaaatgctcataagcaatacccgccattcata

SEQ ID NO: 3741 - DNA, 422 bp, Homo sapiens
tttttttttttttttttaacaagctgaagttcaaataacacttaggtattggttaacaaaagctaggcaaacagccaaaaggatagctaagggtctgaaaaacattgcgaattttaaggcagctgagggtttgtaaacctgcagcatgtgcttgaagagtatgtattgtctttatctcctttcttccccacccacttcatgattcacagtcgcactaatgtccttttaggctataattaaaatgttctaatcttccagttcagttcagagttccagtttcaaatcagcatgaagacaatgacgaatgaaacatgaatttagatacagggacaattcaagcattatttcccaaatgactgtttcccaaactacgctcctgggataaagatggggatatttcaatgctgggaatcctcgtgccg

SEQ ID NO: 3742 - DNA, 463 bp, Homo sapiens
  misc_feature (368)..(368): n is a, c, g, or t
  misc_feature (393)..(393): n is a, c, g, or t
  misc_feature (400)..(400): n is a, c, g, or t
  misc_feature (409)..(409): n is a, c, g, or t
caaagctgggccaagctgagccacacgtttttcaagacagcctgtgaactaggcacatatccttcccttcccagtccataaaaaccctggacccagcctcgtagaggcaccactttcagatacctatctctgctggcaaagagctttcttctcttgcttcttaaactttcactccaacctcacctttgtgttcacgctccttaatctccttagaggtagaacaaagaactctggatgttatctcagactacgagagactgttacatcttgggtgcactgctgagactacgacacttggtttctttgactttgactaaatattttacatgagtgtaattatacagctttcctttttgactgtcttattntacttaacagaatgtttttgaaggnttgtccntattgtagnactttttcaagatttccttatttttaagggtggatgctatcccagtggattgta

SEQ ID NO: 3743 - DNA, 387 bp, Homo sapiens
ttttttttttttttttggggtatgaaagcctttgtcattttattttacaataaaaaattctaacagcatatgaacactctgttcccggcagaggctaaggacgtacaaagttcattagaaagcgaagcattaaaataacaacagctacattcaaagcttctgctcagtactttgcccaatgtgtctaatatggttttaaagactcaccggttggggtttttcacccagagttaaagcacatgtacaagtacttacatatcctccaaatcatagacaacaaggacaataacagcaactccagatgaggctagatcttgtgggcaatttcaaatttaggaatttctttatttttccttggcaaaacatggtgtcatggaacatgtgact

SEQ ID NO: 3744 - DNA, 354 bp, Homo sapiens
ttttaggatggaatatgcagctgatgaacattttatttataaaaaggtctgtaaaacacagagaagtgctggaataaagtgatggaacgataaggtggaaaaggcaggatacaaagttgtatatacaagataattgctctgtaaaaagaacaccggcaaattatgtgaagaagaaaagagtggaaggaagtacaacaaaacgaaataatgatagtctctggtgagactatgggtgacatttttttcttccttttctttttctcctccatctttccaagttttgcatactgaacaactcttaatttcactttttaaaggaaatagggccagacacagtggctcatgcctgtaatc

SEQ ID NO: 3745 - DNA, 415 bp, Homo sapiens
tttttttcacctgcttattaaatgtatcccaattggttttaattgtattaagctgtaactgtaaggctgccttctcagacccttgtgtttttaataacagattttcaccttctgcaatggttttttcatacatatgagactgagcggtcaaagttttactaaagtctttatgatctttaattaatgactccaagacatcgagtttggcagatattggatgagatttgttttgctcttctttctttgtatccagccaagcctgaaaatctctagacatttgctgaaattgatgagagcttgcacaggccgactgaaggtgctggacatgattctctgctttctgttcaacatccttaaatgattttaagatgccttctagttgcctactaagttctgctttggggggggggggatt

SEQ ID NO: 3746 - DNA, 5145 bp, Homo sapiens
ggcggcgggagagctgctggctcgcccggatcccgggagctgcctggaggcgggcccggcccggggaaggtgagcggctgcgggacccagcccctcgccgggagcgggcaccatggtgctgtcggtgcctgtgatcgcgctgggcgccacgctgggcacagccaccagcatcctcgcgttgtgcggggtcacctgcctgtgtcggcacatgcaccccaagaaggggctgctgccgcgggaccaggaccccgacctggagaaggcgaagcccagcttgctcgggtctgcacaacagttcaatgttaaaaagtccacggaacctgttcagccccgtgccctcctcaagttcccagacatctatggacccaggccagctgtgacggctccagaggtcatcaactatgcagactattcactgaggtctacggaggagcccactgcacctgccagcccccaacccccgaatgacagtcgcctcaagaggcaggtcacagaggagctgttcatcctccctcagaatggtgtggtggaggatgtctgtgtcatggagacctggaacccagagaaggctgccagttggaaccaggcccccaaactccactactgcctggactatgactgtcagaaggcagaattgtttgtgactcgcctggaagctgtgaccagcaaccacgacggaggctgtgactgctacgtccaagggagtgtggccaataggaccggctctgtggaggctcagacagccctaaagaagcggcagctgcacaccacctgggaggagggcctggtgctccccctggcggaggaggagctccccacagccaccctgacgctgaccttgaggacctgcgaccgcttctcccgtcacagcgtggccggggagctccgcctgggcctggacgggacatctgtgcctctaggggctgcccagtggggcgagctgaagacttcagcgaaggagccatctgcaggagctggagaggtcctactatccatcagctacctcccggctgccaaccgcctcctggtggtgctgattaaagccaagaacctccactctaaccagtccaaggagctcctggggaaggatgtctctgtcaaggtgaccttgaagcaccaggctcggaagctgaagaagaagcagactaaacgagctaagcacaagatcaaccccgtgtggaacgagatgatcatgtttgagctgcctgacgacctgctgcaggcctccagtgtggagctggaagtgctgggccaggacgattcagggcagagctgtgcgcttggccactgcagcctgggcctgcacacctcgggctctgagcgcagccactgggaggagatgctcaaaaaccctcgccggcagattgccatgtggcaccagctgcacctgtaaccagctgcccagctgcctcccttcttggacagccctgacccgtcctctgcaacctcctttctgtgcccctttcctcattctgacacccagaagacagtgacagatgtgtttgcaaggctgggatggctctctcatcatactcttgtttcttagaaataagcaagacagagcaggaaatggaatatgcgggtcacactgaggaatgcattttgctcatctgtgttattgaaggaggtgcttattaaatacagttcctatgcctgttttataggtggggttaggccagatgcagagaaagctaaatgtgggaatcatggatgcaaagaagaatttggctttttgaaaaacaagcatttcaaaaatgatgaaggaagtgaaagtatcctggatcaactcctagagttagagattgcccaggtggaaagaaaccttagccagcgttcaatcaagctcaccatgcagggcagtcacccggcagttctcaaactttagcatgtgaagagtcaccagcagattcctgggctcgcctggagacattcctagtcggtattcctggtcgaagcccaggagccttcctttttaacaagctgatgtagagggtggagcactgtatgtggagaaattccttctacaatattccacacaggtttttggccacagtccttgatggagtcccaaaaccatggtgcagccagttccaatgctggacacctcaaccatcagggtgaaatctggggcctcagctttttaatttaattattttaattcttaatactttaatttgtgcatttcataagccccctgctcttggactgaattttgtgctttttattgaagaattttattgtttttatcttaaaatcagtttctattatccttggggagaccatccctaacaaagtacaggtgggatctcctgtgagtcattggctgggttctgattgctagatgtcacacccaccagcatcaccaaagtgactctgagatagaccggtcccttctcagcgttccagtcacttcaggaggaatttagttattgacttagtctatgacatctggctacatgtaggtagagaagaaagacaattttaaaaaggaaatcaggtcttttgcaactgtgcctccctctgtctgttttcacttgaatgggtaaataaccagcagctaggttttgaattcctaccttgttattctaaacagatgtccacattgttaattaaatctaaattatgagccttgctgagtggatacggtacttacacctgaaccaggattcctgggttctgttgttgacattgcccttcagcacctgtttggccagctgtataagataggactaatgactaggaagcctaccccaatgaatgatatactagatgaaatagtgttcaaaacctgtaggcactctctggctaaaaacaaactctgaggccaccagcagatcatctttaagctaagttactatttttcacctttttttttagacggagttttgctctttgttgcccaggctggagtgcagtggcacgatctcggctcactgcaacctccgcctcccaagttcaagcgattctcctgtctcagcctcctgggtagctgggattacaggtgcccaccaacatgcctggctaatttttgtacttttagtagagatggggtttcaccatgttggccaggctggtcttcaactccagatctcaggtgatctaccctcctcggcctcccaaagtactgggattacaggcctgagccaccgcgcccggcctatttttcactttaatttggcagctgagaatgcccaaaaagtgccagaagcatcgtggcatttccagaaccatggattctgcctttggacccctctctattaatattaaaactctgggccttcagatgtcaccctaatccactgccctaagacagaatttctggacaagatgggtaagggcttcattccttcaacaagtcaagtcatacttggcctctccctgagaatctgagcaggagccttataacctgtggtcattattttttctttctgtacagaaatagaaaagcattagaaataacttctaaccatcctctgaaaaaacagaaaaaatatcgaatccctctttcatgagaagtcttttggataattggaaaccttcatcactgaggttggccagcccctgccaagtgttgtgtaggcaaagcacttgttagtggcttcctatgaaatgttttagagatctcttcaccatactggtttcttctctttggttggtgtgggtaaaagaaaacaaaacatttcctataagctgaaagctgaccagcattctcttcttggtaacatctactactccaacctagaaaatttggattctagaccaaaaatcaggaaacatggctccttataaatctgtgcagctgccttatagtaccatcaaaggaatttcaggtgggctgggcggggccccgatcccagaattatcaactccacccatcatcatttggtcatgaagcatcctttcattcttcttcttcttttttttggggggggcggggcgggggagggatctcaaagttttagtcttccagaatccaaattaaaggttgcccctgatgggggccaggttccgccacagaacatcttagatgtcagccttgacctcacttagcagggattacagaaatgagatacattttgaaggagagttgtctgttatgttcactgtattctaagtgcctgggataaagctgtctcatgggtgctccatatatattcatatatatttgttgagtgaattaatgaattaagagtggctggcagagtaggcagaaaaagacactgcaaatggcataaaaattaaagtcctagctgagttctcaatggtaaaggcatcagatgtcttagcagtcaagctagaaattcatgacaatgagtattactatttgcctaatgacaactcattgctctccatgtaaatgtaatcaacagatgaagagaatataattgctctgcttttccactaaaactccatcttagtgaattttaaattatccagagatgtcaaactgccaaataaaaatatttcagtagtctttgcatcagcttaccttgtaccagaaacatttccaatttactatcaaattatagtaactgagcctgtgtgaagtatctcatcattttcgaaaggaacaccttgtgtgatgccagtgagcatttctaaaaagggtgtgaggtagaggtaaaaataaggtgagagaccatttcagaatgcactgttgctcaaaaaggtgatctggttctttcttcagagatttctacggggatagaaaatcgggagtctgccctcattaatctgtgactccacctcttgcatcaaatcaatatctatttgttgagcacttattgattaagaccttgcatatgtctgtccattttgatttgagatacaactttttgtgtgggttgaatgacaaatcactccaaacaaaactgggcacagagaatcagctaggagaccagttattcagggtccatttctcttggatgtaaaggagtcctgggtaaaatgtggctgtaacctaaaccaactagtccttgtgatttgtttctgccctctgtgtttcctgttgtcaaatgctaagtgtgtgttttgcagtcatgaactaaagcacaaaaagatgcatgagacattgtagtcatatgtctggtgtgacactttggagcaaaaaccttgcagtggtaaataaaaaatttccaacagggt

SEQ ID NO: 3747 - protein, 439 aa, Homo sapiens
AAAGPSPSPGAGTMVLSVPVIALGATLGTATSILALCGVTCLCRHMHPKKGLLPRDQDPDLEKAKPSLLGSAQQFNVKKSTEPVQPRALLKFPDIYGPRPAVTAPEVINYADYSLRSTEEPTAPASPQPPNDSRLKRQVTEELFILPQNGVVEDVCVMETWNPEKAASWNQAPKLHYCLDYDCQKAELFVTRLEAVTSNHDGGCDCYVQGSVANRTGSVEAQTALKKRQLHTTWEEGLVLPLAEEELPTATLTLTLRTCDRFSRHSVAGELRLGLDGTSVPLGAAQWGELKTSAKEPSAGAGEVLLSISYLPAANRLLVVLIKAKNLHSNQSKELLGKDVSVKVTLKHQARKLKKKQTKRAKHKINPVWNEMIMFELPDDLLQASSVELEVLGQDDSGQSCALGHCSLGLHTSGSERSHWEEMLKNPRRQIAMWHQLHL

SEQ ID NO: 3748 - DNA, 391 bp, Homo sapiens
tttttttttttttttttttttttttggcatataaccatttatatatttatgatttctaattttattataaaataaaagcagaaatatttcccgaagaacattcacatgagggcattacggggagacggcaagttggcggctcggggggcgcgctcagccgggagcgctgtagtcacagtcccgggaggaagagcgcggtgtggcggggcctcgccaagagagaaggaggaggggcgtatgacgaggcggcgtttaggggcttctgtggcgctgccctttctctttcacttaagttactagacgaaaagtttacacctgcagctcccactgacccacatgggcgagggaaaaggcctcaggagatggcctaggttcaaagtccctgtctttt

SEQ ID NO: 3749 - DNA, 5639 bp, Homo sapiens
ctctgccaaatccacctcctgaggagatttccacaggaactcaatccacattcagcacaatgggcacagtttccaggagaaggatctgcagaaccaacacaatggcacgagccaagattctccaggacatagacagagagcttgatcttgtggaaagggagtctgcaaaacttcgaaagaaacaagcagagcttgatgaagaagaaaaggagattgatgctaagctacgatacctggaaatgggaattaacaggaggaaagaggccctattaaaggagagagaaaagagagaacgagcctacctccagggagtagctgaggatcgtgattacatgtctgacagtgaagtgagtagcacaagaccaacccgaatagaaagtcagcatggcattgagcgaccaagaactgctccccaaactgaattcagccagtttataccaccacaaacccaaacagaatctcaactagttcctccgacaagtccttacacacaataccagtactcttcccctgctcttcctacccaagcacccacctcatacactcaacagtctcattttgagcaacaaactttgtaccatcagcaagtttcaccttatcagactcagccaacattccaagctgtggcaacaatgtccttcacacctcaagttcaacctacaccaaccccacagccttcttatcagttaccttcacagatgatggtgatacaacagaagccacggcaaactacattatatttggagcccaagataacctcaaactatgaagtgattcgcaaccaaccccttatgatagcacctgtttctacggataacacatttgctgtttcccatcttggtagtaagtacaatagtttagacttgagaataggtttggaggaaagaagtagcatggcaagcagtccaatatcaagcatatctgcagattctttctatgcagatattgatcaccatactccacgaaattatgtcctaattgacgacattggagagatcaccaaaggaacagcggcattaagcaccgcatttagccttcatgaaaaggatctgtcaaaaacagaccgtctccttcgaaccactgagacacgccggtctcaagaagtgacagatttcctagcacctttacagtcttcctctagattgcatagttatgtgaaggcggaggaagacccaatggaggatccttacgagttaaagcttctgaaacatcagattaaacaggaatttcgtagagggacagagagcttagatcaccttgctggtctttctcattattaccatgctgatactagctacagacattttccaaaatctgagaagtatagcatcagtagactcacacttgaaaaacaagcagcaaaacaactgccagcagccatactttatcaaaagcagtcaaagcataagaaatcactaattgaccctaaaatgtcaaaattttcacctattcaagaaagtagagaccttgaacctgattattcaagctatatgacttctagcacttcatctattggtggcatttcctccagggcaaggctccttcaagatgacatcacttttggcctcagaaaaaatattacagaccaacaaaaatttatgggatcttctcttggcacaggactgggcacattaggaaataccatacgctcagctctgcaggatgaagcggataagccatacagtagtggcagcaggtccagaccttcctccagaccttcctctgtctatgggcttgatttatcaattaaaagggattcttctagctcttccctaagactgaaagctcaagaggctgaagctctagatgtttcctttagtcatgcatcatcctctgccagaactaagccgaccagtttgccaattagtcaaagtagaggaagaataccaattgtggcccagaattctgaagaagaaagcccactcagtcctgttggccagccaatgggaatggccagggctgcagctggacccctgccaccaatatctgcagacaccagggatcagtttggatcaagccactcattgcctgaagttcagcaacacatgagggaagaatcacggactcgaggctatgaccgtgacatagcattcatcatggatgacttccaacatgccatgtcagacagtgaagcctatcatctgcgtcgtgaggaaacagattggtttgataaacccagggagtctcgtttggaaaatggacatggtctggaccgaaaactgccggaaagattggtccactctagaccactcagtcaacatcaagagcaaattatacagatgaacgggaaaactatgcactacatctttcctcacgcaaggataaaaataacaagagactcaaaggatcacacagtttcaggtaatggattaggaattagaattgtgggtggtaaagaaatcccgggacatagtggagaaattggagcctatattgccaagattcttcctgggggaagtgcggaacagacggggaagcttatggaagggatgcaagtattggaatggaatggaattcccttgacttctaaaacatatgaagaagttcagagtatcattagtcagcaaagtggggaagcagaaatatgtgtaagactggacctcaatatgctatcagattctgaaaattcccagcatctggaacttcatgagccaccaaaagctgtggataaggcgaaatccccaggggttgatcctaagcagttggcagcagaactccagaaggtttcactacagcagtcaccgctggttctgtcatcagttgttgaaaaaggatctcatgttcattcaggtcctacatcagcaggatccagttccgttcccagccctgggcaaccagggtccccctcagtgagcaaaaagaagcacggcagcagcaagcctaccgatggaacaaaggttgtctctcatccaattacaggagaaattcagcttcaaattaactatgatcttggaaatctcataatacatattctccaagcaagaaatcttgttcctcgagacaacaatggttattctgacccttttgtgaaagtgtaccttcttccagggagaggtcaagtcatggttgtccagaatgcaagtgctgagtacaagagaaggactaaacatgtccagaaaagtcttaatcctgagtggaatcaaacagtaatttataaaagtatttccatggaacagctcaagaagaaaacactggaggtgacagtttgggattatgatagattttcatccaacgacttccttggggaggtattgattgatttatctagcacatctcacctcgataacactccaaggtggtatcctctcaaagaacagactgaaagcattgatcatggcaagtctcattccagtcagagcagccagcagtccccaaagccatctgttatcaaaagcagaagccatggtatcttccctgacccatcaaaggacatgcaggttcccaccattgagaaatcccatagtagtcctggtagctcaaaatcatcatcagaaggccatctccgttctcatggaccatctcgcagtcaaagcaaaaccagcgtcactcagacccacctggaagatgcaggggctgccatagctgctgccgaagctgccgtgcaacaactccgcattcaaccaagtaaaagacgcaaataaattcctcagcatggcagcttaatgttcatctgttgcctttctttcctgctgtcctttcctgtttgctttcagttttcaacatcctctgctcaccctgttctctgtccctttgtctgtgtaagaacgatataaatacattaatatgctctttcttatttagattttttttatttacatagactgaaataaaactggctgtttctcctttgtttccaccatccatccaacctggctcatagcatttgatacagtgtctgtgatgtttggaagcaaagcaatgttgtgtgtcctttttgtttgcgcttaaatatcttttagaatacagaaattataagcacaagtggctgccagttttccaggacttataccaaaaaaaaaaaagtgcacacatataagtatttagagcagatttgcaattagattcttgtatctgaaaacactcaaaaagtctaggcagaagataatgcaaccaacagtcaacttctagaaccttggaggaaaagccatttcaagacagtgctttaaaacactaacaaattttgcttctgaaatatggtagctttccatgtgcaaaaaattgtagtcttctgaaaaatctgtgaagaaaatcttatttcttacattctcaaaaaactacattaaattaatatatgtataagcatatgtgataaggcaatgcaacctcactgaggagcacaattgggtccattctgttggatcacactttgtatgtgatgacagattttacagatattttttctaaccattggaaatcaagatatactatgtctggtagctataagtcaatcaaattataacaattgacctatcttaactgctgtattttcatttcatttgtgaaaatttagtcgattgatataattatataaaaacttaatatgtgcaaatatttcacaaatgtaggtaccctgttacttctaaaaggcattagccaggcaatggagatagatcattgttctctccatctccctagtcatcattttcaaagaaacagccagttttaaacccctttagtgctgtgcatgtggtgtcattttggcatttgaaaacacaacctatttaaatagagcaaaagagcacttctgtttgcatgaataacatttaagctggttccatctgaggatacatactctgggtttccatttcacccacactgccacagcagcacataaaagcggtcagtctaatcatgccaggaagcagcacagacacagcatagcaggagtcctccccattcaaagaactcagtctgataatctgcctccaccagccaatggcaaccaagaccaaagccagctagccctcaggaaggtgatgtctgatggaccagtcaagccagaaggaggtgagcagaaaggccctgttcaaagcacacagcaagaacatccccaaatttaaagctctcatctttaatttttagagattgtctgataaaatatgtttatccactttttaatgtgcttttgtgggcatggcatttcaggacttcatcatcaccatgtaagtcccaagatcagtcccgtaatatattgactacagtgatttgtatttttctatgcactgggcatcttttgacttttgttgggaaatagattaacaatattcatattgcagaatggaatgcatgctactaacctaatctgttcaagcatgactataaatatgtttcattgtgataaaagtttaaattgctcacagttcaagttagcctaccagttggaatgtggatcagtgttttttgcctattatttcaagtgtaacttttaaaaatttagtggattttgaaaattcttagaggaaagtaaaggaaaaattgttaatgcactcatttacctttacatggtgaaagttctctcttgatcctacaaacagacattttccactcgtgtttccatagttgttaagtgtatcagatgtgttgggcatgtgaatctccaagtgcctgtgtaataaataaagtatctttatttcattcat

SEQ ID NO: 3750 - protein, 1212 aa, Homo sapiens
LPNPPPEEISTGTQSTFSTMGTVSRRRICRTNTMARAKILQDIDRELDLVERESAKLRKKQAELDEEEKEIDAKLRYLEMGINRRKEALLKEREKRERAYLQGVAEDRDYMSDSEVSSTRPTRIESQHGIERPRTAPQTEFSQFIPPQTQTESQLVPPTSPYTQYQYSSPALPTQAPTSYTQQSHFEQQTLYHQQVSPYQTQPTFQAVATMSFTPQVQPTPTPQPSYQLPSQMMVIQQKPRQTTLYLEPKITSNYEVIRNQPLMIAPVSTDNTFAVSHLGSKYNSLDLRIGLEERSSMASSPISSISADSFYADIDHHTPRNYVLIDDIGEITKGTAALSTAFSLHEKDLSKTDRLLRTTETRRSQEVTDFLAPLQSSSRLHSYVKAEEDPMEDPYELKLLKHQIKQEFRRGTESLDHLAGLSHYYHADTSYRHFPKSEKYSISRLTLEKQAAKQLPAAILYQKQSKHKKSLIDPKMSKFSPIQESRDLEPDYSSYMTSSTSSIGGISSRARLLQDDITFGLRKNITDQQKFMGSSLGTGLGTLGNTIRSALQDEADKPYSSGSRSRPSSRPSSVYGLDLSIKRDSSSSSLRLKAQEAEALDVSFSHASSSARTKPTSLPISQSRGRIPIVAQNSEEESPLSPVGQPMGMARAAAGPLPPISADTRDQFGSSHSLPEVQQHMREESRTRGYDRDIAFIMDDFQHAMSDSEAYHLRREETDWFDKPRESRLENGHGLDRKLPERLVHSRPLSQHQEQIIQMNGKTMHYIFPHARIKITRDSKDHTVSGNGLGIRIVGGKEIPGHSGEIGAYIAKILPGGSAEQTGKLMEGMQVLEWNGIPLTSKTYEEVQSIISQQSGEAEICVRLDLNMLSDSENSQHLELHEPPKAVDKAKSPGVDPKQLAAELQKVSLQQSPLVLSSVVEKGSHVHSGPTSAGSSSVPSPGQPGSPSVSKKKHGSSKPTDGTKVVSHPITGEIQLQINYDLGNLIIHILQARNLVPRDNNGYSDPFVKVYLLPGRGQVMVVQNASAEYKRRTKHVQKSLNPEWNQTVIYKSISMEQLKKKTLEVTVWDYDRFSSNDFLGEVLIDLSSTSHLDNTPRWYPLKEQTESIDHGKSHSSQSSQQSPKPSVIKSRSHGIFPDPSKDMQVPTIEKSHSSPGSSKSSSEGHLRSHGPSRSQSKTSVTQTHLEDAGAAIAAAEAAVQQLRIQPSKRRK

SEQ ID NO: 3751 - DNA, 548 bp, Homo sapiens
  misc_feature (392)..(392): n is a, c, g, or t
  misc_feature (481)..(481): n is a, c, g, or t
  misc_feature (502)..(502): n is a, c, g, or t
  misc_feature (520)..(520): n is a, c, g, or t
tttttttttttttttttacattcaggtttatttatttccatgctaagacacacagcggcgtcactggtgtagatggtgaaggcagtgtggggtgggtcttgctactccctgtgggacacagggagaggctgggttagtgcgttaagccgggccactgtgttcatacaggtggcggctagaaccaagatggagccgggacagcagggccactgacccctctggcctccaggcggcgtggggcacgggctgtggggaccctccgtccaggtcccctggtgtccagaatggctttctcctccagggcccaagcccttctcctgctctgtgctctgcgggcctccgcctcctacacacacctcgggggcctctgagctctgtccctggtgccctangaaactctcaagttatcctcgcctgcctggaagagcgccctggctgtgctgtgcccattccaggggcatctgcagtggcttcccctaancggtggctgtggctgtcctgngttctgagtgtgaacaancgtgtgtgtgtgtgtgtgtgtgtgtgta

SEQ ID NO: 3752 - DNA, 2495 bp, Homo sapiens
caaaatttcttagtgttgatgttgatagcttctgggttggcaaactggcagttcactctagtcttactgggttgggcaagtccttgcccctagaaaattggggatagctttggccatgggaggagcaagaacactacgcagtcgtaagctctgttttttgttttgttttgttttgttttgttttcggcaccattatgtacgatgaagacttacagccacagcataggggacactttgaggagccctagtatcattgtttgaaatcattgtacagggaactgcaggggtgaacaccattgtaccaatccccgggccagtgtctcatttcctaacagaatcatcccattcttgttcactcttcagtcatcccaagccaaaagggaaaattcgaaacccactgtgacaccccaaccctaatttccaacctttggaggactcacctggggcagaagggagaaagggctttgctgaagtctcaggctgccgagagccatgtatgggcataggagcaagctgatggcatggctcttgacaaggttttctatagggcagcagctgctgctcccaggggaaccctctcctgttgcctccgcagtctattctggggtggaaacaccattctctattatttctctcacatacatgtggatttctaatatcaagttatgtgactgcctaccacttaaggcctacaaaaccacatgggagtttctttattgcgtatgcagccagtcaacatgaatgggaccctagaaactgtgaggagcaggattctctaaggtgctcttagatacggtgtcacttccacatacaagcacaattctcccagttaaggggctggaagacaagcggggcaactggttttgaaaagcccgctggcgtgccagagggggtgtttgcccacaccctccttgaatttaactgccacaatctatccgcagatgtgttttgttctgtttcttgtttttcactagcgtttgcgttgcttcctctgaagccagagggtgaaaggccctagcaaagttagttatcagtcaactgatgataactgtgatccttaaagatgaattcccagcctgaggtgacacacagaggttcagcagacgtctcaggatctgtcacatgtcatgttgcttggtgtgaagatggaagaacaaagtccacatcagtttctgctccttcaaacagtgtgtcgatatgaaacattgagatttggcagaaacatgtgcctagtttgcagcaccaaatactggtcttctcagaagtgtttctgtttttttgtttttgtttttgtttttgtttttgttttttgtttaatttcctcttctggcatcccaatttggatcatttcctctctttctttcctggagaaacaggatggcaggtgctggagcccagagagggggttaccctccagctaaaatgatttaaatggaaaggagaatgacagcaaagcctcacgtgaactttaatgaccttatcaatgacctttactaactgacttttggtacccggattgttgagaggtgagtgggactaaaagccaggatcaagatcaggttgctccacacatttgcagatcaggagccccgggaatgtgagttagacccagaaagtattgaactggacattgaatgaagcttgaggccatgcattgataacatttttagagtctgttacattattttctcaaaaggaacacatgtttactacaaaccatttagaaaataccaataaccaaacagaagggaaatgtctggaaccttccagttgtttaattctgtagaaactgttcacgaaaggctgaatgagtggggacaagtcacagagatctcgccatggttagcaccagggacaagtctggctctaatgtatgttttatgaagtctgattagctttgaaatgcatctttgccagctgaacttgtcatgcactaaacttcccattgatcattagagtgtctacgattaagtggaaaaggtggtcaaccatttggatgtttgactttcacaacatcaagcattggccattgggcgtatctgggcattggtatggaataaacaggatactcagtgaaacatccaaactattgactggatttttcccatggggcatctgtctaagagtcacagatctgagaaatagaaggaccaggtccgtgtggatgctcctagtgcgttcaaataacccttgaattcaccaggtctcattgcatttatttaaagatggagcccattgtcccccctcctcctcagctcacccatggaactagaaattcacaaacctgaagctgaaccacaggacaagaaattaaacagcaacggccacatggcctcttttttcacaggttttgcattgaatgttttagaactttattcccccgccccctcacccatgtataccaaaactggttttattttcattttcctaaattattttctgatacaataaactgttaactgtttatttatacttttaaaaaaaaaaaaaaaaaa

SEQ ID NO: 3753 - DNA, 4369 bp, Homo sapiens
gcggcggcgggcgggtactggcttctggggccaggggccaggggcggtgggcgccgggaccgcggagctgaggagcggggcccggccagggctggagactttgcgcccgggggcaccggggctgcgcgcggtcgcacacatccaccggcgcggcttccctcggcggcccgggctccgctcatcctgcggcgggcggcgccgctcaggggcgggaagaggaggcggtagacgcgaccacagaagatgtcgggccaaacgctcacggatcggatcgccgccgctcagtacagcgttacaggctctgctgtagcaagagcggtctgcaaagccactactcatgaagtaatgggccccaagaaaaagcacctggactatttgatccaggctaccaacgagaccaatgttaatattcctcagatggccgacactctctttgagcgggcaacaaacagtagctgggtggttgtgtttaaggctttagtgacaacacatcatctcatggtgcatggaaatgagagatttattcaatatttggcttctagaaatacactattcaatctcagcaattttttggacaaaagtggatcccatggttatgatatgtctaccttcataaggcgctatagtagatatttgaatgaaaaggctttttcttacagacagatggcctttgattttgccagggtgaagaaaggggccgatggtgtaatgaggacaatggctcccgaaaagctgctaaagagtatgccaatactacagggacaaattgatgcactgcttgaatttgatgtgcatccaaatgaactaacaaatggtgtcataaatgcagcatttatgcttcttttcaaagatcttatcaaactttttgcttgctacaatgatggtgttattaacttactcgaaaagttttttgaaatgaagaaaggacaatgtaaagatgctctagaaatttacaaacgatttctaactagaatgacacgagtgtctgaatttctcaaggttgcagagcaagttggtattgataaaggtgacattcctgacctcacacaggctcccagcagtcttatggagacgcttgaacagcatctaaatacattagaaggaaagaaacctggaaacaatgaaggatctggtgctccctctccattaagtaagtcttctccagccacaactgttacgtctcctaattctacaccagctaaaactattgacacatccccaccggttgatttatttgcaactgcatctgcggctgtcccagtcagcacttctaaaccatctagtgatctcctggacctccagccagacttttcctctggaggggcagcagcagccgcagcaccagcaccaccaccacctgctggaggagccactgcatggggagaccttttgggagaggattctttggctgcactttcctctgttccctctgaagcacagatttcagatccatttgcaccagaacctacccctcctactacaactgctgaaattgcaactgcctcagcttctgcctccactactacaactgttactgctgtcactgctgaagtggatctctttggagatgcctttgcagcttctcctggggaggcccctgcagcatccgaaggggccgccgcaccagctaccccaacccctgtagcagcagcacttgatgcatgttcaggaaatgacccctttgccccgtctgaaggtagtgcagaggctgcacctgagctggacctctttgcaatgaagccacctgagaccagtgttcctgtagttacccctacagctagcacagcccctccggttcccgcaactgctccttctcctgctcctgccgttgcagctgctgctgctgccactactgctgccaccgccgctgccaccaccactaccaccacctccgctgccaccgccaccactgctcctcctgctctagatatctttggtgatttatttgagtccactcctgaagttgctgcagcgcctaagccagatgctgctcctagcatagacctgtttagtacagatgctttctcctctccaccacaaggggcctctcctgtgcctgagagttctctcactgctgacctcttatctgtggatgcatttgcagcaccatctcctgcaaccactgcctcgccagcaaaggtggattcttcaggtgtcatagacctttttggggatgcatttggaagtagcgcttctgaaccccaacctgcatctcaggctgcttctagttcatcagcatcggcagacctactagctggatttgggggttctttcatggcgccttccccatctccagtgactccagctcagaataacctgctacagcccaattttgaggcagcttttgggacaacgccttcaacttccagcagcagctcctttgatccatcagtgtttgatggtctaggtgatcttttgatgccaaccatggcaccagctgggcagcctgcacctgtctcaatggtaccacccagtcctgcaatggcagccagcaaagcccttggaagtgatcttgattcatctcttgccagcttagtaggcaatcttggaatttctggtaccacaacaaaaaagggagatcttcagtggaatgctggagagaaaaagttgactggtggagccaactggcagcctaaagtagctccagcaacctggtcagcaggcgttccaccaagtgcacctttgcaaggagctgtacctccaaccagttcagttcctcctgttgccggggccccatcggttggacaacctggagcaggatttggaatgcctcctgctgggacaggcatgcccatgatgcctcagcagccggtcatgtttgcacagcccatgatgaggcccccctttggagctgccgctgtacctggcacgcagctttctccaagccctacacctgccagtcagagtcccaagaaacctccagcaaaggacccattagcggatcttaacatcaaggatttcttgtaaacaatttaagctgcaatatttgtgactgaataggaaaataaatgagtttggagacttcaaataagattgatgctgagtttcaaagggagccaccagtaccaaacccaatacttactcataacttctcttccaaaatgtgtaacacagccgtgaaagtgaacattaggaatatgtactaccttagctgttatccctactcttgaaattgtagtgtatttggattatttgtgtattgtacgatgtaaacaatgaatggatgttactgatgccgttagtgcttttttggacttcacctgaggacagatgatgcagctgttgtgtggcgagctatttggaaagacgtctgtgtttttgaaggtttcaatgtacatataacttttgaacaaaccccaaactcttcccataaattatcttttcttctgtatctctgttacaagcgtagtgtgataataccagataataaggaaaacactcataaatatacaaaactttttcagtgtggagtacatttttccaatcacaggaacttcaactgttgtgagaaatgtttatttttgtggcactgtatatgttaagaaattttattttaaaaaatataaaggttaacgtccataataaatacttctctttgaagctaccttatcaagaacgaaaaatcgtatgggaagaatcccctatttatcactgctatattaaaatatatatattttaattatatttgacaggttttgcatctaaattgacctatttattcattcttgattaaatgcactgaaaagtaaagggtctgtttgtgtcatgttcatgaaaatgcggttagagaggtgctattcaagtgattctgaaggcaccccaaggtatatctgtaatttaaagattactgcaaatatctttactttactgtgggtttttagtacatctgttaatttagtgtttctttgtgtgttttgtagactagtgttcttccatccttcaactgagctcaaagtaggttttgttgtaacattgtgattaggatttaaactaattcagagaattgtatcttttactgtacatactgtattctttaagttttaatttgttgtcatactgtctgtgctgatggcttggcttaagattttgatgcataaatgaggtcactgttgatcagtgttgctagtagcttggcagctcttcataaaagcatattgggttggaaaggtgtttgcctatttttcaaattatttaatagatgtatggtaccatttaaaagtggttgtatctgaatttactgtggggataacatacactgtaatggggaaaaattacctaaaaccaatttcaaaatggctttctttgtatttcagtttaaaaacccagtgcatgtacgccctctgagatgcaataaacaccttgaacaaag

SEQ ID NO: 3754 - protein, 907 aa, Homo sapiens
MSGQTLTDRIAAAQYSVTGSAVARAVCKATTHEVMGPKKKHLDYLIQATNETNVNIPQMADTLFERATNSSWVVVFKALVTTHHLMVHGNERFIQYLASRNTLFNLSNFLDKSGSHGYDMSTFIRRYSRYLNEKAFSYRQMAFDFARVKKGADGVMRTMAPEKLLKSMPILQGQIDALLEFDVHPNELTNGVINAAFMLLFKDLIKLFACYNDGVINLLEKFFEMKKGQCKDALEIYKRFLTRMTRVSEFLKVAEQVGIDKGDIPDLTQAPSSLMETLEQHLNTLEGKKPGNNEGSGAPSPLSKSSPATTVTSPNSTPAKTIDTSPPVDLFATASAAVPVSTSKPSSDLLDLQPDFSSGGAAAAAAPAPPPPAGGATAWGDLLGEDSLAALSSVPSEAQISDPFAPEPTPPTTTAEIATASASASTTTTVTAVTAEVDLFGDAFAASPGEAPAASEGAAAPATPTPVAAALDACSGNDPFAPSEGSAEAAPELDLFAMKPPETSVPVVTPTASTAPPVPATAPSPAPAVAAAAAATTAATAAATTTTTTSAATATTAPPALDIFGDLFESTPEVAAAPKPDAAPSIDLFSTDAFSSPPQGASPVPESSLTADLLSVDAFAAPSPATTASPAKVDSSGVIDLFGDAFGSSASEPQPASQAASSSSASADLLAGFGGSFMAPSPSPVTPAQNNLLQPNFEAAFGTTPSTSSSSSFDPSVFDGLGDLLMPTMAPAGQPAPVSMVPPSPAMAASKALGSDLDSSLASLVGNLGISGTTTKKGDLQWNAGEKKLTGGANWQPKVAPATWSAGVPPSAPLQGAVPPTSSVPPVAGAPSVGQPGAGFGMPPAGTGMPMMPQQPVMFAQPMMRPPFGAAAVPGTQLSPSPTPASQSPKKPPAKDPLADLNIKDFL

SEQ ID NO: 3755 - DNA, 413 bp, Homo sapiens
  misc_feature (348)..(348): n is a, c, g, or t
  misc_feature (387)..(387): n is a, c, g, or t
  misc_feature (392)..(392): n is a, c, g, or t
ggaactgagattttgtaatcaaatagttaacatcaggaagttaatttggctggcaaaattctagggaaacttggccagaaaactggtgttgaaggcttttgctcatataaacaagtgccattgagtttcaaatgaccagcaaatatatttagaacccttcctgttttatgtctgtacctcgtccacccctcaggtaatacctgcctctcacaggtacagctgtttcttggaaatcctccaaccaaatagcagttttcctaacttgattagcttgagctgacagactgttagaatacagttctctgggccacagctgatgaggggctttctgtactggcacacagattnttgtaacttgcaccccagttccagggtggactgggtaancccantcggagttgttggcccgtggg

SEQ ID NO: 3756 - DNA, 291 bp, Homo sapiens
  misc_feature (234)..(234): n is a, c, g, or t
tttgggtaacactgagcacatattaaggacaaaaaagtcatagacctcgtagaattatagtttttagcatagcaatgattttgtagctcagaggaggtggctcttcattccattgcctgctatgagttttgtctcacattgctgggcacctctagcagatatatggtatgtgcagtgcttaaaacattgcccagaaaaacatataaaattgaggatataaataatttcaccttnccccgtgcccccactttcctcttgcctcttgctgataagaaaaagattaactggatt

SEQ ID NO: 3757 - DNA, 2360 bp, Homo sapiens
aaaatcgcatttccaagcccaatgacatcgagctgtttcagatcgacgacgagacgttctttgtcatcgcagacagctcaaaggctggtctgtccacagtttataaatggaacagcaaaggattctattcttaccagtcactgcacgagtggttcagggacacggatgcggagtttgttgatatcgatggaaaatcgcatctcatcctgtccagccgctcccaggtccccatcatcctccagtggaataaaagctctaagaagtttgtcccccatggtgacatccccaacatggaggacgtactggctgtgaagagcttccgaatgcaaaataccctctacctttcccttacccgcttcatcggggactcccgggtcatgaggtggaacagtaagcagtttgtggagatccaagctcttccatcccggggggccatgaccctgcagcccttttcttttaaagataatcactacctggccctggggagtgactatacattctctcagatataccagtgggataaagagaagcagctattcaaaaagtttaaggagatttacgtgcaggcgcctcgttcattcacagctgtctccaccgacaggagagatttcttttttgcatccagtttcaaagggaaaacaaagatttttgaacatataattgttgacttaagtttgtgaaggtgtggtgggtgaaactaagagaaatgtagcattagctctcacaaaagaggaccaagaaaaatcaacaaacaaatcaaagccaggctcagagctctgaaattaaaaagcactgaaatagttagatgttttcaaacttttagaactcacattttaatcagggattgcatttattggctaactgcatgacatgcccattctaccattttaaaaaaaatcttaaagcctgtaatttctgagaaaagagtacagcatttactcttatcatctagaaatgtaatatgcttcccccccgctttttgatgaggaagaagacaattggataagatgggacagcacttataatgaaataaaaaaaaactttgagcccctctcattccactttagcaatctttttggtaagaactcttaaagccaaaagtctgctgaaaagatttgctgattattagtttaaaaatcttgtaacactcagcagtgctattttgagtcatcccagtttcctgaaagtaatgcccagtcttcctgaatcctccttaatagcagaaccttggtgattttgttggctcatatgaatgcttgtcatggatatgttaacaatttagtgtttgacattgcttcctctgccacaaagacaatactctggtgacacatgtctagacccagcacaggctgtaggcccaggagtgactcaaaggagtttttccctctttcttacggttcaaaggtgaccctggtggtggccagagcagtaatgcttgtttgatgctcttcatggctcatctgcttctcagaacccacccgttgagtttgtgggtaaccagcaggcaggccaaagactggtgcttttcatttcatcctttagagggatgaaacagttatttccgtctgatgagcattcggtagaatttttgaagtgagattttatgaagtcaaaggggactttacacagatctcgacctgctttgaaacctagaggtggccctttgatttgtgcgtgtccttgccctctggacaacttaatatttcaagtaatcgaataccaacttccctgccagcccacctgccttccgccccgcttgtgtaacagtcctgttttgttgagttgctgctattgcactgccagtgcagcccacaccaaatcacaacccaagatactcagataggaagactccttcctctcccagtactttaccaaaggaacccccgccaggacccacatggggccacgtgttggcagtggaatcagcctgtgcaggctggggatctcaggctgatcagtaggggccagctttggagccagccaagctgaatcccacactccaggtctgtgctcaagagaccagatggtgtatttccaaatgggcctctctggtatgggcaataggcaagctcctggggtctggttatgtggaagattcttagtggatgttccgcctggttagctggttctcttcagagaatataaagtgaatgcctttaggggtagctctgaaagagaaacccaacaacttcattcctagccatgaaagtagcacgatcatattgtactgtattgttattgtaaaatgactatttgccatgtcatgagtaggtagatgttttgccacaaatatgaatgtgtttgttgtttcctgactttaagcaatgaagattgagacaataaatagcactcagagaatg

SEQ ID NO: 3758 - protein, 129 aa, Homo sapiens
MEDVLAVKSFRMQNTLYLSLTRFIGDSRVMRWNSKQFVEIQALPSRGAMTLQPFSFKDNHYLALGSDYTFSQIYQWDKEKQLFKKFKEIYVQAPRSFTAVSTDRRDFFFASSFKGKTKIFEHIIVDLSL

SEQ ID NO: 3759 - DNA, 503 bp, Homo sapiens
gctcagcagtggctgaaggacctggaggaggagctgcacccgaggagaagtcctggtgatgctggtgggcaacaagacggacctcagccaggagcgggaggtgaccttccaggaagggaaggagttcgccgacagccagaagttgctgttcatggaaacttcggccaaactgaaccaccaggtgtcggaggtgttcaatacagtggcccaagagctactgcagagaagcgacgaggagggccaggctctacggggggatgcagctgtggctctgaacaaggggcccgcgaggcaggccaaatgctgcgcccactaggtgcagccagtcctgggggctgtggggaagacacccccttgcctgggccatggccagcgtctaggtggattctgattcactgtcaatgctgggtggctcccgagccctagatgtaccgggaagttggcccctttatgaaaaccacttcccacagccagtgggaacttgcagaggaagatctggcgta

SEQ ID NO: 3760 - DNA, 3017 bp, Homo sapiens
caaggaggctgctgattgtggcccacagcctcatctgaacgccaggagaccaggataccgaggcaccggatcccctctctgtgccctggggagccccagtgctgcccagtcaccccagggctgaggtctgcgtccctagtggtgcaaggcctggtaggaccacggggcagggaatgtgagcgccatctgagctcacggtgtcctgagtcgcggcttcgtgactttggcaggggcctccggaccagtgaccccagtcaaacccagagggtcttgggcggcagcgacgaaggaggtattcaggctccaggccaggtggggccggacgcccccagccatccaccatggtggtggcacaccccaccgccactgccaccaccacgcccactgccactgtcacggccaccgttgtgatgaccacggccaccatggacctgcgggactggctgttcctctgctacgggctcatcgccttcctgacggaggtcatcgacagcaccacctgcccctcggtgtgccgctgcgacaacggcttcatctactgcaacgaccggggactcacatccatccccgcagatatccctgatgatgccaccaccctctacctgcagaacaaccagatcaacaacgccggcatcccccaggacctcaagaccaaggtcaacgtgcaggtcatctacctatacgagaatgacctggatgagttccccatcaacctgccccgctccctccgggagctgcacctgcaggacaacaatgtgcgcaccattgccagggactcgctggcccgcatcccgctgctggagaagctgcacctggatgacaactccgtgtccaccgtcagcattgaggaggacgccttcgccgacagcaaacagctcaagctgctcttcctgagccggaaccacctgagcagcatcccctcggggctgccgcacacgctggaggagctgcggctggatgacaaccgcatctccaccatcccgctgcatgccttcaagggcctcaacagcctgcggcgcctggtgctggacggtaacctgctggccaaccagcgcatcgccgacgacaccttcagccgcctacagaacctcacagagctctcgctggtgcgcaattcgctggccgcgccacccctcaacctgcccagcgcccacctgcagaagctctacctgcaggacaatgccatcagccacatcccctacaacacgctggccaagatgcgtgagctggagcggctggacctgtccaacaacaacctgaccacgctgccccgcggcctgttcgacgacctggggaacctggcccagctgctgctcaggaacaacccttggttttgtggctgcaacctcatgtggctgcgggactgggtgaaggcacgggcggccgtggtcaacgtgcggggcctcatgtgccagggccctgagaaggtccggggcatggccatcaaggacattaccagcgagatggacgagtgttttgagacggggccgcagggcggcgtggccaatgcggctgccaagaccacggccagcaaccacgcctctgccaccacgccccagggttccctgtttaccctcaaggccaaaaggccagggctgcgcctccccgactccaacattgactaccccatggccacgggtgatggcgccaagaccctggccatccacgtgaaggccctgacggcagactccatccgcatcacgtggaaggccacgctccccgcctcctctttccggctcagttggctgcgcctgggccacagcccagccgtgggctccatcacggagaccttggtgcagggggacaagacagagtacctgctgacagccctggagcccaagtccacctacatcatctgcatggtcaccatggagaccagcaatgcctacgtagctgatgagacacccgtgtgtgccaaggcagagacagccgacagctatggccctaccaccacactcaaccaggagcagaacgctggccccatggcgagcctgcccctggcgggcatcatcggcggggcagtggctctggtcttcctcttcctggtcctgggggccatctgctggtacgtgcaccaggctggcgagctgctgacccgggagagggcctacaaccggggcagcaggaaaaaggatgactatatggagtcagggaccaagaaggataactccatcctggaaatccgcggccctgggctgcagatgctgcccatcaacccgtaccgcgccaaagaggagtacgtggtccacactatcttcccctccaacggcagcagcctctgcaaggccacacacaccattggctacggcaccacgcggggctaccgggacggcggcatccccgacatagactactcctacacatgatgcccgcccacccgggctgccccgcctcagccccagctgccctggcgtggccatgtggctttgcccagcctgctgcaatccaagagagcaaggaagagaaattccatgggtgactttcctccgcagaaagcaaagtttggggagggctgacgattttgtagaacacaacagtgacaattttttttaaaagaatagaaggcaggagggggaattcgacattgttgaagacataatttataccaagttatgccagttggggagggaaggactaaaaataatattgcaggcagggctgggttgggttttttttttttcccccctgaactggaaggatactacctgtacaacatctgtggacacctcatgctctgttcaaggccatcacaaaggaaccgccagggagaagcagccggctctcaaagctcccacgcagctctcccgccactggccactcgctggcgacccgatggaaggttttcaggctcctcacaaaggagagagggaagaaaagatcttttgccctggagatatggtcctgaaatctctcccctggcttattccataccatttcccttgcagatttgcagaaacatggcatctttcactgcattctttgaacaatcatgtagtcgattaaaaaaaaaaaacaaa

SEQ ID NO: 3761 - protein, 674 aa, Homo sapiens
MVVAHPTATATTTPTATVTATVVMTTATMDLRDWLFLCYGLIAFLTEVIDSTTCPSVCRCDNGFIYCNDRGLTSIPADIPDDATTLYLQNNQINNAGIPQDLKTKVNVQVIYLYENDLDEFPINLPRSLRELHLQDNNVRTIARDSLARIPLLEKLHLDDNSVSTVSIEEDAFADSKQLKLLFLSRNHLSSIPSGLPHTLEELRLDDNRISTIPLHAFKGLNSLRRLVLDGNLLANQRIADDTFSRLQNLTELSLVRNSLAAPPLNLPSAHLQKLYLQDNAISHIPYNTLAKMRELERLDLSNNNLTTLPRGLFDDLGNLAQLLLRNNPWFCGCNLMWLRDWVKARAAVVNVRGLMCQGPEKVRGMAIKDITSEMDECFETGPQGGVANAAAKTTASNHASATTPQGSLFTLKAKRPGLRLPDSNIDYPMATGDGAKTLAIHVKALTADSIRITWKATLPASSFRLSWLRLGHSPAVGSITETLVQGDKTEYLLTALEPKSTYIICMVTMETSNAYVADETPVCAKAETADSYGPTTTLNQEQNAGPMASLPLAGIIGGAVALVFLFLVLGAICWYVHQAGELLTRERAYNRGSRKKDDYMESGTKKDNSILEIRGPGLQMLPINPYRAKEEYVVHTIFPSNGSSLCKATHTIGYGTTRGYRDGGIPDIDYSYT

SEQ ID NO: 3762 - DNA, 3927 bp, Homo sapiens
tagcgggcgcctccttttcatccctcatccttcatccctggctttcgcgctctagcggagtgggatctgcgaacacgtgaggcgggggcgcggtccccaggctgccgagatggccctgagcgacgaaccggccgcgggtggccccgaggaggaggcggaggacgagacactggcctttggcgcggcgctggaagcgttcggcgagagcgcggagacccgggcgctgctgggccgcctgcgggaggtgcacggcggcggcgcggagcgcgaggtggccctggagcggttccgcgtaataatggacaaataccaggagcagcctcatctgttggacccgcaccttgaatggatgatgaacttgttgttggacatagtgcaagatcagacatctccagcttcccttgtacatctggcttttaaatttctttacatcatcaccaaggttcgaggctataaaacatttcttcgtttatttcctcatgaagttgccgatgtagagcctgttttagatttggtcacaattcagaatcccaaggaccatgaagcttgggaaacccgctacatgcttttgctctggctctccgtgacctgcctgatcccttttgatttttctcgccttgacgggaacctcctcacccagcctgggcaagcacgaatgtccataatggaccgtattctccaaatagcagagtcctacttgattgtcagtgacaaggcccgagatgcagctgctgtccttgtgtccagatttatcacacgtcctgatgtcaagcaaagcaagatggctgagttcctggactggagcctgtgcaatctggcccgttcctccttccagaccatgcagggggtcatcaccatggatgggacgctgcaggccctggcacaaatatttaaacatggaaaacgtgaagactgtttgccctatgctgccactgtcctcaggtgcctcgatggctgcagactccctgagagcaaccagaccctgctgcggaagctgggggtgaagcttgtgcagcgactggggctgacattcctgaagccgaaggtggcagcatggaggtaccagcgtggctgccgatctttggctgcaaatctgcagctcctcactcagggtcagagtgagcagaagccactcatcctgaccgaagatgacgacgaagatgacgacgtcccagagggggtggagcgtgtgatagagcagctgctggtcgggctgaaggacaaggacacggtcgtgcggtggtctgcagccaagggcatcggtaggatggctggcaggcttcccagagccctggcggatgatgtggtcgggtctgtgctggactgcttcagtttccaggagactgacaaggcgtggcatgggggatgtctggcgctggcagagctgggcaggagaggcctgttgctgccgtctcgactcgtggatgttgtcgccgtgatcctgaaggcgctgacctacgacgagaagcggggtgcctgcagcgtgggcaccaacgtcagggacgccgcctgctacgtgtgctgtgccttcgcgcgtgcctatgagcctcaggagctgaagccctttgtgactgcaatctcgagtgcactggtgattgctgcggtgtttgaccgagacataaactgcagaagagcagcctctgccgccttccaggagaatgtggggagacagggcactttccctcatggtattgatattttgaccacagctgactattttgccgtcggtaacagatccaactgtttcctggttataagtgtgtttattgccggctttcctgagtacacgcagccaatgatagaccacctggttaccatgaagatcagccactgggatggggtcatccgagagttggctgcgagggcgctgcacaacctggcccagcaggcacccgagttcagcgccacgcaagtcttcccgaggctgctgtccatgacactgagtccagatcttcacatgaggcatgggtcgattctcgcctgcgcagaagttgcttacgccttgtacaaacttgcagcccaagagaacaggcccgtcacggaccatctggacgagcaggcagtgcagggcctgaagcagattcaccagcagctctatgatcgtcagttatacaggggtctgggaggacagctcatgagacaagcagtgtgtgttttaatagaaaagttgtcactttccaaaatgccctttagaggtgacaccgtaattgatggttggcaatggctgataaatgacactttgagacatctccatctcatctcaagtcactcccgccagcagatgaaggatgcagcagtctcggccctggctgctctatgcagtgaatattacatgaaggagccgggggaggcagatcccgcaattcaggaggagctgatcacgcagtacctggctgagcttcggaaccccgaggagatgactcgctgtggcttctcgttggccttgggcgcccttccaggcttccttctgaaaggccggctccagcaggttctcacaggtttaagagcagttacccacacttcccccgaggacgtaagttttgctgagtccaggagagacggcttgaaggccattgcgaggatttgccagactgttggtgtgaaagcaggagccccagacgaagctgtgtgcggagagaatgtttcccagatttactgtgcgctgctgggctgcatggacgactacaccacggacagcagaggggacgtgggcacctgggtccgcaaggccgccatgaccagtctgatggatctgacacttctgctggctcggagccagcctgagctgatcgaggcccatacctgtgagcgcatcatgtgctgtgtggcccagcaggccagtgagaagattgaccgtttccgtgctcacgccgccagcgtgttcctgacgctcctgcactttgacagccctcccatcccccacgtgccccaccgaggagaactggaaaagctgtttcccaggtccgatgtggcctccgtgaactggagtgcaccttcccaggccttcccacgcatcacccagctccttgggctgcccacctaccgctaccacgtcctgctggggctagtcgtgtccctgggcggcttgacggagtcgacgatccggcactccacccagagcctctttgagtacatgaagggcattcagagcgacccgcaggccctgggcagcttcagcgggacccttctgcagatctttgaggacaaccttctgaatgagagggtgtccgtgccgctgctgaagacgctggaccacgtgctcacccacggctgcttcgacatcttcaccacggaggaggaccacccctttgctgtgaagttgcttgcgctctgtaagaaagaaatcaagaattcaaaagatatccagaagctcctgtcaggcatcgcagtgttctgcgggatggtgcagttccccggcgacgtgaggaggcaggccctcctgcagctgtgtctgctcctctgccaccgtttcccgctgatccggaagaccacggccagccaggtgtacgagacattgctcacctacagtgacgtcgtgggcgcggatgtgctggacgaggtggtgactgtgctcagtgacactgcgtgggacgcggagcttgcagtggtgagagagcagcgcaaccgtctgtgtgaccttctgggcgtacccaggccccagctggtgccccagcctggtgcctgctgaagccagtcctggagcccatacctcacccctgcctggtgaggatgtcttgttcctgagggaggccggtgtggaaagccttgcacagtggtgcctccagctgttgaagggtagcgctggcccttggaggctggcactagctgacagcttttcctctctgcacctgcgctctggtgacttggggtggacgcctctgccttcacttgaacacaaatgtgcttcctataaaatcatgtaccaag

SEQ ID NO: 3763 - protein, 1192 aa, Homo sapiens
MALSDEPAAGGPEEEAEDETLAFGAALEAFGESAETRALLGRLREVHGGGAEREVALERFRVIMDKYQEQPHLLDPHLEWMMNLLLDIVQDQTSPASLVHLAFKFLYIITKVRGYKTFLRLFPHEVADVEPVLDLVTIQNPKDHEAWETRYMLLLWLSVTCLIPFDFSRLDGNLLTQPGQARMSIMDRILQIAESYLIVSDKARDAAAVLVSRFITRPDVKQSKMAEFLDWSLCNLARSSFQTMQGVITMDGTLQALAQIFKHGKREDCLPYAATVLRCLDGCRLPESNQTLLRKLGVKLVQRLGLTFLKPKVAAWRYQRGCRSLAANLQLLTQGQSEQKPLILTEDDDEDDDVPEGVERVIEQLLVGLKDKDTVVRWSAAKGIGRMAGRLPRALADDVVGSVLDCFSFQETDKAWHGGCLALAELGRRGLLLPSRLVDVVAVILKALTYDEKRGACSVGTNVRDAACYVCCAFARAYEPQELKPFVTAISSALVIAAVFDRDINCRRAASAAFQENVGRQGTFPHGIDILTTADYFAVGNRSNCFLVISVFIAGFPEYTQPMIDHLVTMKISHWDGVIRELAARALHNLAQQAPEFSATQVFPRLLSMTLSPDLHMRHGSILACAEVAYALYKLAAQENRPVTDHLDEQAVQGLKQIHQQLYDRQLYRGLGGQLMRQAVCVLIEKLSLSKMPFRGDTVIDGWQWLINDTLRHLHLISSHSRQQMKDAAVSALAALCSEYYMKEPGEADPAIQEELITQYLAELRNPEEMTRCGFSLALGALPGFLLKGRLQQVLTGLRAVTHTSPEDVSFAESRRDGLKAIARICQTVGVKAGAPDEAVCGENVSQIYCALLGCMDDYTTDSRGDVGTWVRKAAMTSLMDLTLLLARSQPELIEAHTCERIMCCVAQQASEKIDRFRAHAASVFLTLLHFDSPPIPHVPHRGELEKLFPRSDVASVNWSAPSQAFPRITQLLGLPTYRYHVLLGLVVSLGGLTESTIRHSTQSLFEYMKGIQSDPQALGSFSGTLLQIFEDNLLNERVSVPLLKTLDHVLTHGCFDIFTTEEDHPFAVKLLALCKKEIKNSKDIQKLLSGIAVFCGMVQFPGDVRRQALLQLCLLLCHRFPLIRKTTASQVYETLLTYSDVVGADVLDEVVTVLSDTAWDAELAVVREQRNRLCDLLGVPRPQLVPQPGAC

SEQ ID NO: 3764 - DNA, 445 bp, Homo sapiens
tgggggctctccagacccctctctaggaccaagtcacccatcgtgctgggagtgtggattctagcaaaagagctggaaaaaagtcagactctccacagaccccctatgggggacccccaactcaaggccaaggactgggcgtatcggatgctcataacacccctggcctggcccctttactgagaagactccttggatattttccaagaaccccccacatacacccctcacaagccacccctcctgagaggcagggggccctccgccccctccccatgtattacccacctgtgttccggttgaccagcacagaaatattaaacgttctctattcaccgggaaaaaaaaaaaaaaaaaagaaaaaaaaaactcgagggggggcccggtgcccaattctccctatagtgagtcgaattacaattcactggccggcgttttacaacgt

SEQ ID NO: 3765 - DNA, 260 bp, Homo sapiens
  misc_feature (245)..(245): n is a, c, g, or t
  misc_feature (257)..(257): n is a, c, g, or t
tcgctttgtgattcttgatccggaactttgtcacccaggaaccccggaagaggtagctcacgcgatagaaacgtgttcgctgcccagaagaagggaaggcgcgagtgaggaaaggaggtactgtagatgccctccaaatccttggttatggaatatttggctcatcccagtacactccggcttggctgttggagttgcttgtggcatgtgcctgggcctggagccttcgagtaatgctttgggangctccccaaaanccc

SEQ ID NO: 3766 - DNA, 1631 bp, Homo sapiens
atttactaatgaggcagtttgcaaagactgtccctgaagtgtagtgtagtctttcagggggattcatttagtaagctagattgatttaacctggtactgtactagcatagggtcaaatacgtgtcatcagagacctgggtatgaccaggcttacaaaactcaggaacaaactcagattcctactgacctcaaccaactaaactaggccaaatttctccgtgtacaaaatggaccacgttatttacaatccacgtggtggagaagatggtagacatgtggagagagtttggccaggtgctccattctaggtctttttccagtttctcaaaggcagaacattggctcctaattatttgccatggatatttgcttcctgttctggagctatgttgtaagacagctgtgtgatgtccatcattcttgactccagaatgaagacagggcttgctgttttctgtcctgttggtatcatctgttgccttggcgatcactcagtgatgagtcgtcagtattttgacatgtcccagtgcttgctgtacaagaggggactcagatcaacaggaagactctgaagacaggaacctgcatggtatcttacatctttgatacttgggtgctgatatgaagcagagttgttgatttactttatctaggcccttctttcatctcacctggatcaagcaactgagaagtgtatcaggagacactggatacatatctctatgaaatagagagggccatcgcagggcctggtacttaactacattaacgttctaaaacccagtttggtttacgttgtctttcacagtagtatatttagctcttctctggaaagttgtgggttaatataattcttaaacatgaaaatgtaattaaacacaccacgagagaacaatattccaggagacttaatagtgattactttcttcaatcaggaaatcgtttcagtgcctcctttgtaggaatgctttgttttgtgatgggttttcttaaagaagagcacacctccgtccaatctcctgagacagccacgtctccgctgacatcccactgtgatgctttcagatagtcagtgaatgtttctgataaccttcatccagtatctgaaacacaatgtgagagattatattgttttagataataacatcccatttagttgactaaaatcttccaaactctgaaagctgcacactgctactccagagagtgcaggtcttagctcttctcctttctgacttcaagatgaatctttgggacgatgtttctggtgcttggtccacagtgattcacttttgaaggagaggccacatgacatgaactgcctggtgttacaacctagctaacatatttgatgctactcctgttgtctgtactgcttattcaagtagtattctaagttatgttactaaaaaacatggtgggtaaagcacaatcctacccatcattgtcctccaaaataattgtatgacatacacggcccagcccattgccctccctgcatctctgtgctgctttgccatttccccttctacccagcctcctcaaggggtaccttggtggatatttcagtacttaaaaccagactgtaatcataacctccctctgtgtggcatcaataaatagccaaactc

SEQ ID NO: 3767 - DNA, 6830 bp, Homo sapiens
ctggtccttaaggtggtcacggtgaccaggaatctggaccccgacgacaccgccaggaagaaagctcccccgcctccaaagcgggcaccgaccacagccctcaccctgcgctccaagtccatgacctcggagctggaggagctcgtggataaagataaacccgaggagatagtcccggcctccaagccctcccgcgctgctgagaacatggctgtggaaccgagggtggcgaccatcaagcagcggcccagcagccggtgcttcccggcgggctcagacatgaactctgtgtacgaacgccaaggaatcgccgtgatgacgcccactgttcctgggagcccaaaagccccgtttctgggcatccctcgaggtacgatgcgaaggcagaaatcaatagacagcagaatctttctatcaggaataacagaggaagagcggcagtttctggctcctccaatgctgaagttcaccagaagcctgtccatgccggacacctctgaggacatcccccctccaccgcagtctgtgcccccgtccccaccaccaccttccccaaccacttacaactgccccaagtccccaactccaagagtctacgggacgattaagcctgcgttcaatcagaattctgccgccaaggtgtcccccgccaccaggtccgacaccgtggccaccatgatgagggagaaggggatgtacttcaggagagagctggaccgctactccttggactctgaagacctctacagtcggaatgccggcccgcaagccaacttccgcaacaagagaggccagatgccagaaaacccatactcagaggtggggaagatcgccagcaaagccgtctacgtccccgccaagcccgccaggcggaaggggatgctggtgaagcagtccaacgtggaggacagccccgagaagacgtgctccatccctatcccgaccatcatcgtgaaggagccgtccaccagcagcagcggcaagagcagccagggcagcagcatggagatcgacccccaggccccggagccaccgagccagctgcggcctgacgaaagcctgaccgtcagcagcccctttgccgccgccatcgccggagccgtccgcgaccgtgagaagcggctggaagccaggaggaactccccggccttcctctccacagacctgggggatgaggatgtgggcctggggccacccgcccccaggacgcggccctccatgttccccgaggagggggattttgctgacgaggacagcgctgagcagctgtcatcccccatgccgagtgccacgcccagggagcccgaaaaccatttcgtgggtggcgccgaggccagtgctccgggtgaggctgggaggccgctgaattccacgtccaaagcccaggggcccgagagcagcccagcagtgccctccgcgagcagcggcacagccggccccgggaattatgtccacccactcacagggcggctgcttgatcccagctccccgctggccctggcactctccgcaagggaccgagccatgaaggagtctcaacagggacccaaaggggaggcccccaaggccgacctcaacaaacctctttacattgataccaaaatgcggcccagcctggatgccggcttccctacggtcaccaggcagaacacccggggacccctgaggcggcaggagacggagaacaagtacgagaccgacctgggccgagaccggaaaggcgatgacaagaagaacatgctgatcgacatcatggacacgtcccagcagaagtcggctggcctgctgatggtgcacaccgtggacgccactaagctggacaacgccctgcaggaagaggacgagaaggcagaggtggagatgaagccagacagctcgccgtccgaggtgccagaaggtgtttccgaaaccgaaggtgctttacagatctccgctgcccccgagcccaccaccgtgcccggcagaaccatcgtcgcggtgggctccatggaagaggcggtgattttgccattccgcatccctcctccccctctggcatccgtggacttggatgaggattttatttttacagagccattgcctcctcccctggaatttgcaaatagttttgatatccccgatgaccgggcagcttctgtcccggctctctcagacttagtgaagcagaagaaaagcgacacccctcagtccccttcgttgaactccagccaaccaaccaactctgcagacagcaagaagccagccagtctttcaaactgtctgcctgcctcattcctgccaccccctgaaagctttgacgccgtcgccgactctgggatcgaggaggtggacagccggagtagcagcgaccaccacctcgagacgaccagcactatctccaccgtgtctagcatctccaccctgtcttccgaaggtggagagaatgtggacacctgcacagtctatgcagatgggcaagcatttatggttgacaaacccccagtacctcctaagccaaaaatgaagcccatcattcacaaaagcaatgcactttatcaagacgcgctcgtggaagaagatgtagatagctttgttatccccccgcccgctcccccgcccccgccgggcagtgcccagcctgggatggccaaggttctccagccaaggacctccaagttgtggggcgacgtcacagagatcaaaagcccgattctctcaggcccaaaggcaaacgttattagtgaattgaactctatcctacagcaaatgaaccgagagaaattggcaaagccgggggaaggactggattcaccaatgggagccaagtccgccagcctcgctccaagaagcccggagatcatgagcaccatctcaggtacacggagcacgacggtcaccttcactgttcgccccggcacctcccagcccatcaccctgcagagccggccccccgactatgaaagcaggacctcaggaacaagacgtgccccaagccctgtggtctcgccaacagagatgaacaaagagaccctgcccgcccccctgtctgctgccaccgcctctccttctcccgctctctcagatgtctttagccttccaagccagcccccttctggggatctatttggcttgaacccagcgggacgcagtaggtcgccatccccctcgatactgcaacagccaatctcaaataagccttttacaactaaacctgtccacctgtggactaaaccagatgtggccgattggctggaaagtctaaacttgggtgaacataaagaggccttcatggacaatgagatcgatggcagtcacttaccaaacctgcagaaggaggacctcatcgatcttggggtaactcgagtcgggcacagaatgaacatagaaagggctttgaaacagctgctggacagataaggacggctgctctccacctcgcagactgctcttgttataagtagagatgggctcgtgctgaaacatctgaatgccaagcgaagtctgtgagcatcaaccccactccatgggtttgtctcctggtacccaaagaaatactgagttgtgtccacaacatggctgggtcttcagacccctggctcaccatgtgggtgtcttgggcagtttctatcacacatgggacaaggggagggagtttttctaacatggaaaaagattcccagcctgccgcccagcatgcaggtggcctcgctttgccgggtccgagaggctccccgtcaattttgcacgggatcctagctcttgtaggcagacaccagtgcactctagatacctcctgagacctccgtcctctgctttccgggcagctctcaccaccccaggccccggcatgaggcctttcctcagtcctgtggcctctcagaggacacctgatgctcacctgcccctctttctcctgcacttggcttgcagtgagatgctcccagatgcatttgtccagtgccccatcatgggcctgaaaggcagagaaactttttcctacacagattcttttccccatctcctcctgtggtttgcatccatggctctttggccatgaggttcctggcagtgctgggagtttggatgggatcgtgcccagctttgcttagctttctttatttctgcaaatctgttagcataattccaaggtggccaagcagatgtcacatggagttagtcaaagcacaaagtcacgattccacaatggaggggagacctggccaagggagccagccagcgtgcaactgcccaagctccaggtctccaggacaagagcagttgtctgccatgagcacccatccaggatggagaataagggcttctctgcctctcagaattctttttaattgaagatgtcttgagctctgcaaagatcagagcaggtgagcatccactttgacatgaaggacaagaagacgcatggctcatggcgggcacatgcggctgccagtgagacagcgtctcctctgggagctgggcgggcacagcatcctcagttctgtgcccagccaagggtgagcatctctgctgagacagtccttttgctctcggaggccagggaagatggtacttagaggcttttcccctatcgctctgggtgtctaggaatcccaccagcttgtcttaacagtacaacagcttctttgaggacccagtgggtatggagtatagacagaacccagggttgagaacagaaggtgggcggcaggatcagagtgaaagcagaggcgtgaggagaggaaagcagggaggtctcctgggctgccaggtcagcctctctggcaaggctttcttgagccccgcccctttctttccccggagtccctccaccccataacaatacctcgaatttccaaaagaggtcaccagatgcacatgggccgcaaaacacacagtcaggcttccagcacattctcccccatttggaggatactcgaatgtcaggtttttggttttattattatttcagaactagctcagcccatctctaattataaaacatggttttgttttttttttttcctttttttcttgattaggtctggaacagctctagaatgaacacataaaatttagcaatttaaaatctttctttactgcaagtttaaatagttgtacagatagtttataagcacaatattttaagaaaaaaaagtggctggtctactaggcagcctttgtgccacttcagtgctagaaagttaaagaaaaaaaaacttttgtgatttaataatactatttctgtggaataattataaaagtatgacctttttaaatcaaccttatttggatgcatctgaaccagcagagctgtgttatattttctatctttgctagaacttcgtcattgaaggacaatttcttcaaagtggttacaattcataatgcagcagtttctccaaaaacaaaaacaaaacacacaccacacacacgcgcttttccagtcacacacccctgatgttggaaccaagtttttggaccttctgttccaaaaccttttgcaggtcaatctttgtatttgaaatgatccaatccaacttgaagtcaattgaatattaaggcgctttacttccgtgtgctttcagtttttccatcatgagatgaatgagcattactctagataaatttcaagacaggatactacaggtggcctgctgaggctgccccatattttagaaaatgtaaaaatggtggtttggccattaatttgtcttccatttgatgataccgcaaaattccgtgagtccattcctttggcatggcactttccctgggcctacagttggtattacctctgtgctcagtgccaggcaaaacactagctcaaaggagagtcaaggaaaccgctggcagacgataaccagtcgaaactcgtgacttcggtttgttgaactttggcagccagttggtgagggccagatgttattccctttcttaaagatactccaagccacatgccactaaccacaagcaagctggctgcaagactaaagagctgataacatagtttatttttacactgtcttattatagagaagtaatagacctatcagaacctgcactgaccaacaaataaacacatgttgccaagatgaatcggtctctatctctatctgcttattttggtactgaaagcaatagttcctcattcaaatcaccacccactgttctccccctttgggacatgttaggacgaggccctattccatgcccctctttaatggtggaacaaatgttaaactgctcatctaaagatcatgttgatattattccaggttttaagatcaacttttgttacatactgtaatttaaataaactgcatttacatgcctagtttctgtaatattgtgtatacaaaacccaaatctctcaaaatgtaaattatgtatacctgccaagataccttttccagggtgtctgcgcacattttaagttaattcacataatataaaaattactcaatgtgactgttgatttgctgaactttacatatcacaaagtgaattatttgtgatactttagttaataaaatggtaaatttttttctcagttattgaacaagcaagcattatccagttgatctggcaatgactttttgtgtgtgggccacaatattgattttcccattaacaatttttttttgttttttaaatactaatatgtttcacactatagtttgtgtaacaacacgtgttcgcattatctatgttgctgttacttttgtgcttttattctttttagactttataaaaaaaaaaaaaagctcctgtaatttgcactttctcccaatccttaaatctcttgtatggcaaccaaaattactgtaaaaaaataaatatactattgcact

SEQ ID NO: 3768 - protein, 1131 aa, Homo sapiens
LVLKVVTVTRNLDPDDTARKKAPPPPKRAPTTALTLRSKSMTSELEELVDKDKPEEIVPASKPSRAAENMAVEPRVATIKQRPSSRCFPAGSDMNSVYERQGIAVMTPTVPGSPKAPFLGIPRGTMRRQKSIDSRIFLSGITEEERQFLAPPMLKFTRSLSMPDTSEDIPPPPQSVPPSPPPPSPTTYNCPKSPTPRVYGTIKPAFNQNSAAKVSPATRSDTVATMMREKGMYFRRELDRYSLDSEDLYSRNAGPQANFRNKRGQMPENPYSEVGKIASKAVYVPAKPARRKGMLVKQSNVEDSPEKTCSIPIPTIIVKEPSTSSSGKSSQGSSMEIDPQAPEPPSQLRPDESLTVSSPFAAAIAGAVRDREKRLEARRNSPAFLSTDLGDEDVGLGPPAPRTRPSMFPEEGDFADEDSAEQLSSPMPSATPREPENHFVGGAEASAPGEAGRPLNSTSKAQGPESSPAVPSASSGTAGPGNYVHPLTGRLLDPSSPLALALSARDRAMKESQQGPKGEAPKADLNKPLYIDTKMRPSLDAGFPTVTRQNTRGPLRRQETENKYETDLGRDRKGDDKKNMLIDIMDTSQQKSAGLLMVHTVDATKLDNALQEEDEKAEVEMKPDSSPSEVPEGVSETEGALQISAAPEPTTVPGRTIVAVGSMEEAVILPFRIPPPPLASVDLDEDFIFTEPLPPPLEFANSFDIPDDRAASVPALSDLVKQKKSDTPQSPSLNSSQPTNSADSKKPASLSNCLPASFLPPPESFDAVADSGIEEVDSRSSSDHHLETTSTISTVSSISTLSSEGGENVDTCTVYADGQAFMVDKPPVPPKPKMKPIIHKSNALYQDALVEEDVDSFVIPPPAPPPPPGSAQPGMAKVLQPRTSKLWGDVTEIKSPILSGPKANVISELNSILQQMNREKLAKPGEGLDSPMGAKSASLAPRSPEIMSTISGTRSTTVTFTVRPGTSQPITLQSRPPDYESRTSGTRRAPSPVVSPTEMNKETLPAPLSAATASPSPALSDVFSLPSQPPSGDLFGLNPAGRSRSPSPSILQQPISNKPFTTKPVHLWTKPDVADWLESLNLGEHKEAFMDNEIDGSHLPNLQKEDLIDLGVTRVGHRMNIERALKQLLDR

SEQ ID NO: 3769 - DNA, 536 bp, Homo sapiens
  misc_feature (536)..(536): n is a, c, g, or t
tggctaggtacgaggctgggtggcggctgagggcccatgtgctgaaaatccgaagtgccgcggaaagtggaggtgagggccgcccgccctagaggtgcccgtccgagaggcagagctggcaaggaaggtttcgagcgttttgctggcaaagggatttcttacaacctccaggcatgcgtctttctgccctgctggccttggcatccaaggtcactctgcccccccattaccgctatgggatgagccccccaggctctgttgcagacaagaggaagaaccccccatggatcaggcggcgcccagtggttgtggaacccatctctgatgaagactggtatctgttctgtggggacacggtggagatcctagaaggcaaggatgccgggaagcagggcaaagtggttcaagttatccggcagcgaaactgggtggtcgtgggagggctgaacacacattaccgctacattggcaagaccatggattaccggggaaccatgatccctagtgaagcccccttgctccaccgccaggtcaan

SEQ ID NO: 3770 - DNA, 287 bp, Homo sapiens
gacggcgacggcggcggtggcggcagttcctgctctaggctgcgagcggctggcggcttcgaggggagctgaggcgcggtggtgttcggcggttgcggcggcggctcggcactgttacctctcggtccggctggcgccggggcgggcggtttggtcctttccgggcgcgcgggggcgacagcggcagcgacccgaggcctgcggcctaggcctcagcgcggcggcgggctcgagtgcagcgcggaaccggcccgagggccctacccggaggcaccatgagcgtggag

SEQ ID NO: 3771 - DNA, 279 bp, Homo sapiens
  misc_feature (80)..(80): n is a, c, g, or t
  misc_feature (82)..(82): n is a, c, g, or t
  misc_feature (243)..(243): n is a, c, g, or t
gaccggcccacgcttcccgccagtcccctaaccctgaggctgccgcgcggcggtcactgcgccggggtagtgggccccantnttgcgctctctggccgttccttacactttgcttcaggctccagtgcaggggcgtagtgggatatggccaactcgggctgcaaggacgtcacgggtccagatgaggagagttttctgtactttgcctacggcagcaacctgctgacagagaggatccacctncgaaacccctcggcggcgttctttctatttggcccg

SEQ ID NO: 3772 - DNA, 382 bp, Homo sapiens
ttcactcagacacgctgcaactgtttattccagaatcagaggttggaaacccaactgtatatagactgaaagcaaaacaaatacacaactgaacacaatatatgcagttatccagcaagacaggcaacgcaacacaatatatgcagttattgacaagacaggtgcacaggcacagcacacagagtgagatgaaggcagcctagcgagcagaggctctgcagcacggagggctgggaaggccatcgctcgagttaatccaatcccagtgcttcaggacaccttgggccacgttgacatctctcttttcctgagaggagccctagggtacagctgcatggttccatggagtttcaggcgtctgccagctctgtttcactgtttg

SEQ ID NO: 3773 - DNA, 6841 bp, Homo sapiens
gccggagggcgcccgaggggccccgggccgcggcgctcagggcccgggcggccggcggcggccccggggctggggggagtccagcccggatattgagtgcagccattgagaaaagccaaactcttgtgtgtgcgcgtctcgatagcccccaagatggccgccaatgtgggatcgatgtttcaatattggaagcgatttgatctacggcgactccagaaggagcttaattccgtcgcttctgagctgtctgcacggcaggaggagagtgaacattctcataaacatttaattgaactccgccgggaatttaagaaaaatgtacctgaggaaatcagagagatggtggctcctgtattaaaaagcttccaagccgaggtggtggcccttagtaagagaagtcaggaggcggaggctgcttttctgagtgtttacaagcaattaattgaagcaccagaccccgtgcctgtgtttgaggcggcacgcagcctagacgacagactgcagccccccagctttgaccccagtgggcagccccggcgagacctccacacttcgtggaagaggaaccccgagctcctcagccccaaagagcagagagaggggacgtcgcctgccgggcccacgctgaccgagggaagccgcctcccaggcattcccgggaaagccctcctgacagaaaccttgctgcagagaaatgaggcggaaaaacaaaagggccttcaagaagtacagatcactttggcggccagactgggggaggcagaggagaaaatcaaagtcctacattcagcgctaaaggctacgcaggcagagctgctagagctgcggcggaagtacgacgaggaggcagcatccaaggcagatgaagtcggcctgatcatgaccaacctggagaaagctaatcagcgagctgaggctgcccagcgggaggtggaaagtctccgggaacagctggcctctgtcaacagctccatccgcctggcttgctgctctccccaggggcccagtggggataaggtgaacttcactctgtgctcgggccctcggctggaggccgcgctggcctccaaggacagggagatcctgcggctgctgaaggacgtgcagcacctccagagctcactgcaggagctggaggaggcatccgccaaccagatcgccgacctggagcggcagctcacggccaagtccgaggccatagaaaagctggaagagaagctccaggcccagtctgactatgaggaaattaaaacggagctgagcatcctgaaagccatgaagctggcctccagcacctgcagcctcccccagggcatggccaagcctgaagactcactgcttattgcaaaggaggccttcttccccacgcagaaattccttctggagaagcccagcctcctggccagccctgaggaagacccatcagaggacgattccatcaaggattcactgggcacggagcagtcctacccctcccctcagcagctcccacctccaccagggccagaagaccccctgtctcccagccccgggcagcccctgctgggccccagcttggggcctgacggcactcggactttctcgctgtcccccttccccagcctggcatcaggggagagactgatgatgcccccagccgccttcaagggagaggcgggcggcctgctggtgttccccccagccttctatggcgccaagccccccacagcccctgccaccccggcccctggccctgagccactgggcggtcctgagcccgcggatggtggtgggggcggagcggcggggcccggggcagaggaggagcagctggacacggcagagatcgccttccaggtgaaggagcagctgctgaaacacaacatcgggcagcgggtgtttgggcattacgtgctggggctgtcgcagggctcggtcagcgagatcctagcccggcccaagccctggcgcaagctcacggtgaagggcaaggagcccttcatcaagatgaagcagttcctgtcggatgagcagaatgtactggcgctcaggaccatccaagtgcggcagcgaggcagcatcaccccgagaatccgcacgcctgagacaggctcagacgacgccatcaagagcattctagagcaggccaagaaggagatcgagtcgcagaagggcggcgagcccaagacctcggtggccccgctgagcatcgccaacggcacgacccccgccagcacctcggaggacgccatcaagagcatcctggagcaggcacgccgtgagatgcaggcgcaacagcaggcgctgctggagatggaggtggcgcccaggggccgctcggtgcccccctcgcccccggagcggccatcactggccaccgcgagccagaacggggccccggccttggtgaagcaggaggagggcagcgggggccccgcgcaggcgccgctcccggtcctgtcccccgccgccttcgtgcagagcatcatccgcaaggtcaagtccgagatcggcgacgccggctacttcgaccaccactgggcctccgaccgcggcctgctcagccgcccctacgcctccgtgtcgccctcgctgtcctcctcctcctcctctggctactctggccagcccaacggccgcgcctggccccgcggggacgaggcccctgtgccccccgaggacgaggcggcggcaggggcggaggacgaaccccccaggacgggcgagctcaaggctgagggcgcgacggccgaggcgggcgcgcggctgccctactacccggcctacgtgccgcgcaccctgaagcccaccgtgccgccgctgacccccgagcagtacgagctgtacatgtaccgtgaggtagacacgctggagctcacccgccaggtcaaggagaagctggccaagaacggcatctgccagaggatcttcggggagaaggtgctgggcctgtcacagggcagcgtgagcgacatgctgtcccggccgaagccatggagcaagctgacgcagaaggggcgggagcccttcatccgcatgcagctgtggctctctgaccagctcggccaggcagtgggccagcagcctggtgcctcccaggccagtcccacagaaccaaggtcctcaccatccccaccccccagccccacagagcctgagaagagctcccaggagccgttgagcctgtccctggagagcagcaaggagaaccagcagccagagggccgctccagctcctcgttgagcgggaagatgtactcaggcagccaggccccagggggcatccaggagatcgtggccatgtcccccgagctggacacgtactccatcaccaagagggtgaaggaggtcctcacagacaacaatctagggcagcggctgtttggggaaagcatcctgggtctgacacagggctccgtgtctgacctgctgtcccggcccaaaccctggcacaagctgagcctgaaggggcgggagccttttgtccgcatgcagctgtggctcaatgacccccataacgtggagaagctgagggatatgaagaagctggagaagaaagcctacctgaaacgtcgctatggcctcatcagcaccggctcagacagtgagtccccggccacccgctcagagtgccccagcccctgcctgcagccccaggacctgagcctcctgcagatcaagaagccccgggtggtgctggcacccgaggagaaggaggcactgcggaaggcctatcagctggaaccctacccctcgcagcagaccatcgagctcctctccttccagctcaacctcaagaccaacaccgtcatcaactggttccacaactacaggtcccggatgcgccgggagatgttggtggaggggacccaggatgagccagaccttgatccaagcgggggtcctggaatcctaccgccaggccactcccacccagaccccaccccgcagagccctgactctgagactgaggaccagaagccaaccgtgaaggaactggagcttcaggagggccctgaggagaacagcacacccctgaccacccaggacaaggcccaagtgaggatcaagcaggaacagatggaggaggatgctgaggaagaggcaggcagccagccccaggactcaggggagctggacaaaggccaaggtccccccaaagaggagcatcccgaccctccgggtaatgatggactcccaaaagtggctcccgggcccctccttccaggtggatccaccccagactgtccctcacttcatccccaacaggagagtgaggccggggagcgacttcacccggaccctttaagttttaagtcagcctcagagtcctcacgctgcagcctggaggtgtcactgaactcgccctcggccgcctcctcaccaggcctcatgatgtctgtgtcacctgtcccctcctcctcagctcccatctccccatccccacctggcgccccccctgccaaagtgccgagtgccagccccactgctgacatggctggagccttgcaccccagtgccaaggtgaaccccaacttgcagcggcggcatgagaagatggccaatctgaacaacatcatttaccgactagagcgggctgccaatcgggaggaggccctggagtgggagttctgaaggcagggtgagggggcaagggacataccctggtaactaccttccttctcgcacttactctcctcaacaggatggggtaagggagggaggaactcaaccatcaaaatgtggacagcaatgttatgccgtttacgttttttgttgtaatcctagttctatgaagctgtgtgagcaggtgggtcaaatgccattgcctccacttttctgcacccccctgctcctcttcaccctgacccctctgcaggaggcagaagcaaaatggcaccacatattcacctgaaaactccaaactcttttagaaaaataaataaatatttatagacctcttttagatattttaataaaggatcctttggaatttatcccagctgatgctgttttgatattacagagagttataaaatcaggatgctgtcacaactgttgcgaagtatacactgaagttgtgtcgtttttgccactagatgagattaaaagaagacaattattcaaagccatcacaaaacactataagactgaccaaaatttagataacctttgaaccacgatttttttccacatctgtctgtgagacacagcgcaatgctactgcccttccagaaactgtgctaaaaagagaaagtccaaaagactctaaacaaaaacctcgacgccgttgaggatgtgtttcattctggtggtctgttttgcaagcttgataacagaatgtccgtgccattgtaaatgttgtagagatgtgggccgtggcccaaccgtcctatatgagatgtagcatggtacagaacaaactgcttacacaggtctcactagttagaaacctgtgggccatggaggtcagacatccatcttgtccatctataggcaagaagtgtttccagatcctttggaaaggtgggcatggggcaggtgcttggagagtggcgtttgagccagagcgaccccatttcccgtgtgaaccataggcacaacccaggaagtttccccacttgtaggagtgtgggtattccagagcaagactgtggccaccatcttcccctcttggtgttttccgaaagtgacagtgttggtcatcccatgaccactgaagcttagtaaccagcgccaaaaagtagattcatcaaactagagaccccagctccccttctcgccatcttctttctcaagttgaccgtggtgctgtttctggaaggcatctgcaactccaagtccatgcagaactctggaaggccaagttcatcgcagcatgttcaccatatcccagcctccaaatctatcctcctaccttccaacgcatgacctgttggggagcagagacttaacccccaactcagaggaacccttcctccagcgtctttggcatggtttctagggtgagagttcccaatttggatagaacggccaccatattggttactgaatctctctcccttgtttttattacgtttcctttttcaaactgtccatgggaaggctgaattgagtgactccccagaatgaagatgagaaggtgaatataatcaatgccaatgtaatgccagcgggtgagatggccgatggaggtttcaaagatgtagctagcattttgaaaccatatgggcaaaacccggcaaccagaaggggacagataaggaccgttccagaaatcccaactctcacacccagcccaggctgcagtctccacaccaaacagtcaacaaaacacaaaccctgaaggaaaaccttttccatacacccaggctatgcattgaagagttttccactgtatacatttttatccagatgaaggtatttttatattttgacaataggaaacagtgaccattttcagagtaatcaaatctggaacaaatgaaacatcttttagccaccaccaccctgttgcaattaagacaaccgtgggggaacacaccactttttactgttgaaaccaacacaacgttgaaatccaggcttatacgcagactccgattcctagagaactaaatttggctttagtgtgacgggatttgattaagcacttagtatagtcttttgaacacggaaatcctgttgtacttaaagctagcggacccgtgaacaactttgtcaggttcacgtcctataacggttaaaaaacacacacacacatacacaaaccgtttctatgagagattgatgaactttgtttaaaattttaaaaaaaggaacacgttctgtaaacgagtcgctaaatacagaattgtataat

SEQ ID NO: 3774 - protein, 1505 aa, Homo sapiens
VQPLRKAKLLCVRVSIAPKMAANVGSMFQYWKRFDLRRLQKELNSVASELSARQEESEHSHKHLIELRREFKKNVPEEIREMVAPVLKSFQAEVVALSKRSQEAEAAFLSVYKQLIEAPDPVPVFEAARSLDDRLQPPSFDPSGQPRRDLHTSWKRNPELLSPKEQREGTSPAGPTLTEGSRLPGIPGKALLTETLLQRNEAEKQKGLQEVQITLAARLGEAEEKIKVLHSALKATQAELLELRRKYDEEAASKADEVGLIMTNLEKANQRAEAAQREVESLREQLASVNSSIRLACCSPQGPSGDKVNFTLCSGPRLEAALASKDREILRLLKDVQHLQSSLQELEEASANQIADLERQLTAKSEAIEKLEEKLQAQSDYEEIKTELSILKAMKLASSTCSLPQGMAKPEDSLLIAKEAFFPTQKFLLEKPSLLASPEEDPSEDDSIKDSLGTEQSYPSPQQLPPPPGPEDPLSPSPGQPLLGPSLGPDGTRTFSLSPFPSLASGERLMMPPAAFKGEAGGLLVFPPAFYGAKPPTAPATPAPGPEPLGGPEPADGGGGGAAGPGAEEEQLDTAEIAFQVKEQLLKHNIGQRVFGHYVLGLSQGSVSEILARPKPWRKLTVKGKEPFIKMKQFLSDEQNVLALRTIQVRQRGSITPRIRTPETGSDDAIKSILEQAKKEIESQKGGEPKTSVAPLSIANGTTPASTSEDAIKSILEQARREMQAQQQALLEMEVAPRGRSVPPSPPERPSLATASQNGAPALVKQEEGSGGPAQAPLPVLSPAAFVQSIIRKVKSEIGDAGYFDHHWASDRGLLSRPYASVSPSLSSSSSSGYSGQPNGRAWPRGDEAPVPPEDEAAAGAEDEPPRTGELKAEGATAEAGARLPYYPAYVPRTLKPTVPPLTPEQYELYMYREVDTLELTRQVKEKLAKNGICQRIFGEKVLGLSQGSVSDMLSRPKPWSKLTQKGREPFIRMQLWLSDQLGQAVGQQPGASQASPTEPRSSPSPPPSPTEPEKSSQEPLSLSLESSKENQQPEGRSSSSLSGKMYSGSQAPGGIQEIVAMSPELDTYSITKRVKEVLTDNNLGQRLFGESILGLTQGSVSDLLSRPKPWHKLSLKGREPFVRMQLWLNDPHNVEKLRDMKKLEKKAYLKRRYGLISTGSDSESPATRSECPSPCLQPQDLSLLQIKKPRVVLAPEEKEALRKAYQLEPYPSQQTIELLSFQLNLKTNTVINWFHNYRSRMRREMLVEGTQDEPDLDPSGGPGILPPGHSHPDPTPQSPDSETEDQKPTVKELELQEGPEENSTPLTTQDKAQVRIKQEQMEEDAEEEAGSQPQDSGELDKGQGPPKEEHPDPPGNDGLPKVAPGPLLPGGSTPDCPSLHPQQESEAGERLHPDPLSFKSASESSRCSLEVSLNSPSAASSPGLMMSVSPVPSSSAPISPSPPGAPPAKVPSASPTADMAGALHPSAKVNPNLQRRHEKMANLNNIIYRLERAANREEALEWEF

SEQ ID NO: 3775 - DNA, 446 bp, Homo sapiens
  misc_feature (424)..(424): n is a, c, g, or t
ttttattatgtaactagagtcttcttatagagtagtggtgcccaactagcatgcctccaagtagtaatgcataacataatttatttttttccttttagaattccagatctgaacactctctcagatggaatgttgagttctgaaggttatgctaaagggatagagaagaagggctgcagcaagtgtgagcagcaagagagggccggagaaagtctgggatttattggaacatgtatgggaatttggctgtgggcatgagggtcacggtgggctgaaaaataaaaatttggctgtccttgttttgcggagccataacttacctagggctagcacaataggaatgacaacttaagctgcctagaggggctggggcagtgaacagaattaagtgaagatggttgtaagaatttggaaatgccctgantaagactgctctactcatagct

SEQ ID NO: 3776 - DNA, 650 bp, Homo sapiens
gaaacagcagttgagggtttgctgtgtatcacatttctgtattttatcacccccttcctgcaacattatttatctggaatctacctgcccttttgttttttagatacaagggcttggttttgttacccaggctggtttcaaggccatagctttaagagatcctctcaccacagatttccaaagtgctgggattgcaggtgtgattcatggcacccagactttgctgcctttcttacatgatccaggcccagaacccaaactcaggcactgtatagatgaccactttcgtaaactactgacctagcttgttgccaattgttgattgaacttcccataactccacttcgtgtctgttcctctgtatacagccaccttctgttcccgtcatgagcctttaggtctccatttgcatattgcaaatactatgttccatgtaggtagctcattcagggccttgctcttcacttcaagaaaaggttcccttgaggactggctgtcactttgcgcgtcgctggtgtttgggtgttgatgacacatcactacatgcttgtcttcccttaaaaacaaacaaaaaaacaaaaaaaaaaaacaaacacaaaaaaccgccgcgctttttcccgggcgcacaaagttataaaacgccgtccatc

SEQ ID NO: 3777 - DNA, 2286 bp, Homo sapiens
aactatgtggactccattttgaccagttaacccattctcgtggctttgggagtatccttctggtaacatgaagactcagcgcagaggaagtcagccatctactcctcgtctgtctcctacatttcctgagagcatagaacatccacttgctcggagggttaggagcgacccacctagtacaggcaaccatgttggccttccaatatatatccctgctttttctaatggtaccaatagttactcctcttccaatggtggttccacctctagctcacctccagaatcaagacgaaagcacgactgtgtgatttgctttgagaatgaggttattgctgccctagttccatgtggccacaacctcttctgcatggaatgtgccaacaagatctgtgaaaagagaacgccatcatgtccagtttgccagacagctgttactcaggcaatccaaattcactcttaactatatatatatacataaatactatatctctatatggactcgtaaaggcatgggtataatggtaccccccagtaaacttcctaatgatttcttatgactgttatcaggctttattgggattaggctaaagttgttagtaaacttataaaaggctgctatggtaacactaaacctaagtggtctcttgtctattagtttggtttgaattattagtactatcctgtagacccagagacatagtttatataagaattgctaaagctgaagttcaacttggctgagtgaagataatcataggttgtgtgagcctatgaaaaagtgtatacgtctaagatttcaaaacaatgggtcccaaagcctaaccactttaagagtttatggagggtacttggcattacagacgattcatacacttccagtgctgccttctttacactgccagttttgacaaaacaggtttgttttttattttacaacaacatatgcctaattctgcaggattgcaagtaactttttaatgcattgtgattacttattggtaatgatagggctgatggcagtttactagatcactggttataatttgggacaaaaactgtacatcaactttcatctcgcccagagtgtcaaggctggtatgatcagtggatcaggaatgcaattgtgaattcctgcccattgcctctcttggtgaatgtggaaatggccacctgggttttcccatatcaggaagggctttgggatagcacctatattggctgataattgaggatgcaaacattccatcattagtgtgatcgagctgttaatttttagactatagatcaaaatgtgaaacattttatgttcaatccatatttgtcttgcacattataaatatatttttattttttagtaatttaggggagggaggagggagaaagggataatgatgcccttggcataatttcacaaaagcagctgtgacaacctccaatcagtttacttcatttcaaaactatttccaatcacaaggaaagatttatttaaaatatactcgtacatttcacctgtggatgtctataacttcatcctcagtatgttcccaaatctgtgctggcattgaaaggacaaaacattatactagtgggtttttctactaattattttttgaagcattattttcccaacacaaaagagcttttttctcggtataatgaaaattgaaatcctatgtgtattcaatagtaaatagacaaattttattttttatttccacttgaagagttacatttcgtataaaagtttacaaataacggtttttattttgattttttcagtataaaaaaagttgccttgatggcatattatgatgtaatgctaattgcttgtaggatagtaaatggtcagtattgaaacctaatctctagctgccgtcttgtagatatgaacgaatgttcaccaagcatgtattttgtattttgttgcattgtacactgcaactaataagccaaggaatcgacatatattaggtgcgtgtactgtttctaaaaaccacaaactaagaatgataaattatcaatatagtttagtatttgctaattttactacactcttttgttatgtatatgtagggaagtcatagggattataaattcaatttgagtaaaatttaaaaccatatattttatgataaagggcctttaacttaagatggccaaagcactgatattatatatttgctgtaaagagaattataagagttttatttttctgatattaaaagttacttaataaagacttgtttccattaacttgaaaaaaaaaaaaaaaaaaaaaaaaaaaaa

SEQ ID NO: 3778 - protein, 130 aa, Homo sapiens
MKTQRRGSQPSTPRLSPTFPESIEHPLARRVRSDPPSTGNHVGLPIYIPAFSNGTNSYSSSNGGSTSSSPPESRRKHDCVICFENEVIAALVPCGHNLFCMECANKICEKRTPSCPVCQTAVTQAIQIHS

SEQ ID NO: 3779 - DNA, 351 bp, Homo sapiens
  misc_feature (212)..(212): n is a, c, g, or t
tggaggtggagccttttttgctcacggcagcaagttcccttctcctttctctcccccggcggcgtgtgcattggctcttcaagctgcctgtgctgctccgtggagtgaaaaaggcagggtgtgctcgcagactgtgctataaactgcaatttctatttggggtcctcacggagaagaacaccaggaaagacagacaggaccagtgccatggncagctttgctgcttttcctttctcaagagatgaaggaaaaatcagtgaaaagaacggaggggagcccgatgacgctgaactagtaaggctcagtaagaggctggtggagaacgcggtgctcaaggctgtccagcagtat

SEQ ID NO: 3780 - DNA, 2401 bp, Homo sapiens
ccgcagaggagcctcggccaggctagccagggcgcccccagcccctccccaggccgcgagcgcccctgccgcggtgcctggcctcccctcccagactgcagggacagcacccggtaactgcgagtggagcggaggacccgagcggctgaggagagaggaggcggcggcttagctgctacggggtccggccggcgccctcccgaggggggctcaggaggaggaaggaggacccgtgcgagaatgcctctgccctggagccttgcgctcccgctgctgctctcctgggtggcaggtggtttcgggaacgcggccagtgcaaggcatcacgggttgttagcatcggcacgtcagcctggggtctgtcactatggaactaaactggcctgctgctacggctggagaagaaacagcaagggagtctgtgaagctacatgcgaacctggatgtaagtttggtgagtgcgtgggaccaaacaaatgcagatgctttccaggatacaccgggaaaacctgcagtcaagatgtgaatgagtgtggaatgaaaccccggccatgccaacacagatgtgtgaatacacacggaagctacaagtgcttttgcctcagtggccacatgctcatgccagatgctacgtgtgtgaactctaggacatgtgccatgataaactgtcagtacagctgtgaagacacagaagaagggccacagtgcctgtgtccatcctcaggactccgcctggccccaaatggaagagactgtctagatattgatgaatgtgcctctggtaaagtcatctgtccctacaatcgaagatgtgtgaacacatttggaagctactactgcaaatgtcacattggtttcgaactgcaatatatcagtggacgatatgactgtatagatataaatgaatgtactatggatagccatacgtgcagccaccatgccaattgcttcaatacccaagggtccttcaagtgtaaatgcaagcagggatataaaggcaatggacttcggtgttctgctatccctgaaaattctgtgaaggaagtcctcagagcacctggtaccatcaaagacagaatcaagaagttgcttgctcacaaaaacagcatgaaaaagaaggcaaaaattaaaaatgttaccccagaacccaccaggactcctacccctaaggtgaacttgcagcccttcaactatgaagagatagtttccagaggcgggaactctcatggaggtaaaaaagggaatgaagagaaaatgaaagaggggcttgaggatgagaaaagagaagagaaagccctgaagaatgacatagaggagcgaagcctgcgaggagatgtgtttttccctaaggtgaatgaagcaggtgaattcggcctgattctggtccaaaggaaagcgctaacttccaaactggaacataaagcagatttaaatatctcggttgactgcagcttcaatcatgggatctgtgactggaaacaggatagagaagatgattttgactggaatcctgctgatcgagataatgctattggcttctatatggcagttccggccttggcaggtcacaagaaagacattggccgattgaaacttctcctacctgacctgcaaccccaaagcaacttctgtttgctctttgattaccggctggccggagacaaagtcgggaaacttcgagtgtttgtgaaaaacagtaacaatgccctggcatgggagaagaccacgagtgaggatgaaaagtggaagacagggaaaattcagttgtatcaaggaactgatgctaccaaaagcatcatttttgaagcagaacgtggcaagggcaaaaccggcgaaatcgcagtggatggcgtcttgcttgtttcaggcttatgtccagatagccttttatctgtggatgactgaatgttactatctttatatttgactttgtatgtcagttccctggtttttttgatattgcatcataggacctctggcattttagaattactagctgaaaaattgtaatgtaccaacagaaatattattgtaagatgcctttcttgtataagatatgccaatatttgctttaaatatcatatcactgtatcttctcagtcatttctgaatctttccacattatattataaaatatggaaatgtcagtttatctcccctcctcagtatatctgatttgtataagtaagttgatgagcttctctctacaacatttctagaaaatagaaaaaaaagcacagagaaatgtttaactgtttgactcttatgatacttcttggaaactatgacatcaaagatagacttttgcctaagtggcttagctgggtctttcatagccaaacttgtatatttaaattctttgtaataataatatccaaatcatcaaaaaaaaaaaaaaaaa

SEQ ID NO: 3781 - protein, 554 aa, Homo sapiens
MPLPWSLALPLLLSWVAGGFGNAASARHHGLLASARQPGVCHYGTKLACCYGWRRNSKGVCEATCEPGCKFGECVGPNKCRCFPGYTGKTCSQDVNECGMKPRPCQHRCVNTHGSYKCFCLSGHMLMPDATCVNSRTCAMINCQYSCEDTEEGPQCLCPSSGLRLAPNGRDCLDIDECASGKVICPYNRRCVNTFGSYYCKCHIGFELQYISGRYDCIDINECTMDSHTCSHHANCFNTQGSFKCKCKQGYKGNGLRCSAIPENSVKEVLRAPGTIKDRIKKLLAHKNSMKKKAKIKNVTPEPTRTPTPKVNLQPFNYEEIVSRGGNSHGGKKGNEEKMKEGLEDEKREEKALKNDIEERSLRGDVFFPKVNEAGEFGLILVQRKALTSKLEHKADLNISVDCSFNHGICDWKQDREDDFDWNPADRDNAIGFYMAVPALAGHKKDIGRLKLLLPDLQPQSNFCLLFDYRLAGDKVGKLRVFVKNSNNALAWEKTTSEDEKWKTGKIQLYQGTDATKSIIFEAERGKGKTGEIAVDGVLLVSGLCPDSLLSVDD

SEQ ID NO: 3782 - DNA, 2012 bp, Homo sapiens
tttgctccactaagtagtgggccatacatgatcaagaaacagacttcagaggaccattttcatatggtttcaaggaatgtgtttctttctactctagggtcatttcgcctctggcatgctgaatgacaagtctctgtggacagacatccctgtgaattttccaaagaatggctgggctgcaattggaactcactcctttgaatttgcacagtttgacaactttcttgtggaagccacacgctaatacttaacagggcatcatagaatactctggattttcttcccttctttttggttttggttcagagccaattcttgtttcattggaacagtatatgaggcttttgagactaaaaataatgaagagtaaaaggggagagaaatttatttttaatttaccctgtggaagattttattagaattaattccaaggggaaaactggtgaatctttaacattacctggtgtgttccctaacattcaaactgtgcattggccatacccttaggagtggtttgagtagtacagacctcgaagccttgctgctaacactgaggtagctctcttcatcttatttgcaagcggtcctgtagatggcagtaacttgatcatcactgagatgtatttatgcatgctgaccgtgtgtccaagtgagccagtgtcttcatcacaagatgatgctgccataatagaaagctgaagaacactagaagtagctttttgaaaaccacttcaacctgttatgctttatgctctaaaaagtatttttttattttcctttttaagatgatacttttgaaatgcaggatatgatgagtgggatgattttaaaaacgcctctttaataaactacctctaacactatttctgcggtaatagatattagcagattaattgggttatttgcattatttaatttttttgattccaagttttggtcttgtaaccactataactctctgtgaacgtttttccaggtggctggaagaaggaagaaaacctgatatagccaatgctgttgtagtcgtttcctcagcctcatctcactgtgctgtggtctgtcctcacatgtgcactggtaacagactcacacagctgatgaatgcttttctctccttatgtgtggaaggaggggagcacttagacatttgctaactcccagaattggatcatctcctaagatgtacttactttttaaagtccaaatatgtttatatttaaatatacgtgagcatgttcatcatgttgtatgatttatactaagcattaatgtggctctatgtagcaaatcagttattcatgtaggtaaagtaaatctagaattatttataagaattactcattgaactaattctactatttaggaatttataagagtctaacataggcttagctacagtgaagttttgcattgcttttgaagacaagaaaagtgctagaataaataagattacagagaaaattttttgttaaaaccaagtgatttccagctgatgtatctaatattttttaaaacaaacattatagaggtgtaatttatttacaataaaatgttcctactttaaatatacaattcagtgagttttgataaattgatatacccatgtaaccaacactccagtcaagcttcagaatatttccatcaccccagaaggttctcttgtatacctgctcagtcagttcctttcactcccaattgttggcagccattgataggaattctatcactataggttagttttctttgttccagaacatcatgaaagcggcgtcatgtactgtgtattcttatgaatggtttctttccatcagcataatgatttgagattggtccatgttgtgtgattcagtggtttgttccttcttatttctgaagagttttccattgtatgaatataccacaatttgtttcctccccaccagtttctgatactacaattaaaactgtctacatttacaatctctgggtcaaatatatttttatttcttctggatgaatactgaggagtgaaa

SEQ ID NO: 3783 - protein, 669 aa, Homo sapiens
MTAAAGSAGRAAVPLLLCALLAPGGAYVLDDSDGLGREFDGIGAVSGGGATSRLLVNYPEPYRSQILDYLFKPNFGASLHILKVEIGGDGQTTDGTEPSHMHYALDENYFRGYEWWLMKEAKKRNPNITLIGLPWSFPGWLGKGFDWPYVNLQLTAYYVVTWIVGAKRYHDLDIDYIGIWNERSYNANYIKILRKMLNYQGLQRVKIIASDNLWESISASMLLDAELFKVVDVIGAHYPGTHSAKDAKLTGKKLWSSEDFSTLNSDMGAGCWGRILNQNYINGYMTSTIAWNLVASYYEQLPYGRCGLMTAQEPWSGHYVVESPVWVSAHTTQFTQPGWYYLKTVGHLEKGGSYVALTDGLGNLTIIIETMSHKHSKCIRPFLPYFNVSQQFATFVLKGSFSEIPELQVWYTKLGKTSERFLFKQLDSLWLLDSDGSFTLSLHEDELFTLTTLTTGRKGSYPLPPKSQPFPSTYKDDFNVDYPFFSEAPNFADQTGVFEYFTNIEDPGEHHFTLRQVLNQRPITWAADASNTISIIGDYNWTNLTIKCDVYIETPDTGGVFIAGRVNKGGILIRSARGIFFWIFANGSYRVTGDLAGWIIYALGRVEVTAKKWYTLTLTIKGHFASGMLNDKSLWTDIPVNFPKNGWAAIGTHSFEFAQFDNFLVEATR

SEQ ID NO: 3784 - DNA, 4999 bp, Homo sapiens
gaggaggattcgcagttcaacatcaaggtccctgtgcgttttattgcgacctgccggtgggaactttgtctccgagtcggagcagcatggagcggcggagcgagagcccgtgtctgcgggacagccccgaccggcggagcggcagcccggacgtcaaggggcctcccccagtgaaggtggcccggctggagcagaacggcagccccatgggagcccgcgggaggcccaacggcgccgtggccaaggccgtgggaggtttgatgattcctgtcttttgtgtcgtggagcagttggacggctctcttgaatatgacaacagagaagaacacgccgagtttgtcctggtgcggaaagatgtgctttttagccagctggtggagactgcgctcctggccctggggtattctcacagctctgcggcccaggcccaaggaataatcaagctgggaaggtggaaccctctccccctcagttatgtgacagatgcacccgacgcgacagtggccgacatgctacaagatgtctatcatgttgtgacgttgaaaatccaattacaaagttgttcaaagttggaagacttgcctgcggagcagtggaaccatgccacagtccgcaatgccttaaaggaactgctcaaagagatgaaccagagcacattagccaaagaatgccctctctcccagagtatgatttcatccattgtaaatagcacatattatgccaatgtgtcagcaaccaagtgccaggagtttgggagatggtataaaaagtacaagaagattaaagtggaaagagtggaacgagaaaacctttcagactattgtgttctgggccagcgtccaatgcatttaccaaatatgaaccagctggcatccctggggaaaaccaacgaacagtctcctcacagccaaattcaccacagtactccaatccgaaaccaagtgcccgcattacagcccatcatgagccctggtcttctttctccccagcttagtccacaacttgtaaggcaacaaatagccatggcccatctgataaaccaacagattgccgttagccggctcctggctcaccagcatcctcaagccatcaaccagcagttcctgaaccatccacccatccccagagcagttaagccagagccaaccaactcttccgtggaagtctctccagatatctaccagcaagtcagagatgagctgaagagggccagtgtgtcccaagctgtctttgcaagagtggcattcaaccgcacacagggattgttgtctgagattctgcgtaaggaagaagaccctcggacagcctctcagtctcttctagtaaacctgagggccatgcagaatttcctcaatctgccagaagtggagcgagatcgcatctaccaggatgagagggagcggagcatgaatcccaatgtgagcatggtctcctcggcctccagcagtcccagctcctcccgaacccctcaggccaaaacctcgacaccgacaacagacctccctattaaggtggacggcgccaacatcaacatcacagctgccatttatgacgagatccaacaggagatgaaaagggccaaggtgtctcaagccctgtttgccaaagtggctgcaaataaaagtcagggctggctgtgtgaactgctccgctggaaggagaacccaagcccagaaaaccgcaccctctgggaaaacctctgtaccatccgtcgcttcctgaaccttccccagcatgagagggatgtcatctatgaggaggagtcaaggcatcaccacagcgaacgcatgcaacacgtggtccagcttccccctgagccggtgcaggtacttcatagacagcagtctcagccagccaaggagagttcccctcccagagaagaagcgcctcccccacctcctccgactgaagacagttgtgccaaaaagccccggtctcgcacaaagatctccttagaagccctggggatcctccaaagctttattcatgatgtaggcctgtacccagaccaggaagccatccacactctttcggctcagctggatctccccaaacacaccatcatcaagttcttccagaaccagcggtaccacgtgaagcaccacgggaagctgaaagagcacctgggctccgcggtggacgtggctgaatataaggacgaggagctgctgaccgagtcagaggagaacgacagcgaggaaggctccgaggagatgtacaaagtggaggctgaggaggaaaatgctgacaaaagcaaggcagcacctgccgaaattgaccagagataatgtgaacttctactaggcaaagcaatacatcggtccaaggattttctgctttcatttctttaaaagttttttgttagtttgttttttgtttttgtttttgggtttttttggctttatttttgtctttttatgtctgttttgtttttcttacccttttggacatttctttgttgcacaggatacacctatagactgaataagttcagtatttccgaatcagacatcgccttggcaaagacactaaagcgttacactttatcccgtctctatgactggatcatagtcattataatcacaggagactctgccttcattatccttgcacttaacggaagttacatcaggcaagttccaggatgaaaagaactatgaaataaatgaaggaagctacaagtgtgtgtgtatatgtatatgtatatatctctatatttacatatatatattaaaattgcatgggacagagactttgcaatccgaaagaatagactgtgaaatgagttcttaaagaaaagacttgtttatgtattaaaaaaaccacttcacagtgagtcgctttggctttttgataaactgcggcctgctctcagggtggggtgactatttttgaattcctatttattttttgtgtttgtccctgatttttttttttaattctatggcttcctatctggcagcttaatgggtaatttttgaggtatgtatttaacaaaataaacgacactgccgaaaaaaaaaaaagtgaagtgaaaacaatcagggcacattaaaatgatacaagtcaaataaatcttaaagacacaatgcacacttaaaatgactcaataaaatgacttgctacgttccgttattcaatttgtcattactgtagtgaacagatgcatttctgtggaattccaaataagtaaaactgaaattcagtgcagagaaaactttgtccactagtgcaagtcttgatcaaatgacattttgacattggacatatggaattcatagtatgagccacattttgttgtgaaatttatttacctgcttgtggcttcaaatctgaaaattaataagcctgctcgtttaaaagttgtttgttgttgctgtttttttgtctttttgttttttactagaaaatagttcagtgtaatattaagttagaaaagaagttgctgcccagttaaaggggctccctctcaaataaatctccatccttccctctcccaaaagacatttctgatttctgcttcactttgggcttcctcttcttcgtacacattccatctacctaatcaaacattttcagtccctgatctctcctgtcccttttcctgggatgacagccctaacaagaactgtttttgaatcgttgtgcagctccaggcaatagagtatgtgaagcgatttcagtagaatcacttactcatcctaaaagaaaacattatcccagttacctacatcgcaattaccttatgtaaagcagaactaatgctgactggatgtttaatgggatgagcattaaagctgcaatctactatagtactccagatctctttcggcttcctatgagaaacaccagaagcattactttccacttctacttacagtaattgcaagaggagacctcacattcaggactggcctagtgaacgtaatccatgctttaaactggccattaaacagtcccacatggttggattttttttttttttttgagttgtgctttcacaaaaccttgtcaaagacctcatgcaatatcactttgaaagttattttctgtttactacacaaacattgtaatataactgttaatactatttatatatttgaaaggtataaaaggtaggagttaaaaaaaaaacctctatgtgtagatattaactcagaacttacaatatacagggagaagacatgttgcaatacaagctaattctagctgctcagtaacctctggagtttttaaagggacattttcctgtactttttcaaataatgatgtttaaaaattatcttgacataagcgtcatatacctttgcaaaaggatggttgtttgcagttagccctggccccatccttcctatttctgtagtatgctgcagctttaatcagaaagtccatggttgctgcttcctgatctccgagttactctttccaaattgtcttcttacactgttgctgaaggtcactctgtacacgtaatggaaactgattttgccaagctcttacaaggtggttcatctatcgatggcatccgcatttggtatcttttacacttcaaccaaaaatttattaggtatttttcaatgctaagtcttgccttttattttttaatttcactgccaagtttgcagtggttctaagtgaatctgtgggcattttagcctgtggtcttgccagatctttgcgaattacaatgcatatatgtctatttattcaatatctgtcatataatatctatttggaagaagaaactttctcttgtagtgcctcttgacaaagcacaatttcccgcctttttttttttttttgtgaaatgaaaaaaacaaattgtgttttattgcggtatcaacaatgtgaataaggattaacatattgtaaatgttcttttttccatgtaaatcaactatctttgttatcactaagtgataattaatttttaacttatgtgcattgttaggctgttagaattttttggttgttaaaataaacgcattcaataaatatg

SEQ ID NO: 3785 - protein, 761 aa, Homo sapiens
GGFAVQHQGPCAFYCDLPVGTLSPSRSSMERRSESPCLRDSPDRRSGSPDVKGPPPVKVARLEQNGSPMGARGRPNGAVAKAVGGLMIPVFCVVEQLDGSLEYDNREEHAEFVLVRKDVLFSQLVETALLALGYSHSSAAQAQGIIKLGRWNPLPLSYVTDAPDATVADMLQDVYHVVTLKIQLQSCSKLEDLPAEQWNHATVRNALKELLKEMNQSTLAKECPLSQSMISSIVNSTYYANVSATKCQEFGRWYKKYKKIKVERVERENLSDYCVLGQRPMHLPNMNQLASLGKTNEQSPHSQIHHSTPIRNQVPALQPIMSPGLLSPQLSPQLVRQQIAMAHLINQQIAVSRLLAHQHPQAINQQFLNHPPIPRAVKPEPTNSSVEVSPDIYQQVRDELKRASVSQAVFARVAFNRTQGLLSEILRKEEDPRTASQSLLVNLRAMQNFLNLPEVERDRIYQDERERSMNPNVSMVSSASSSPSSSRTPQAKTSTPTTDLPIKVDGANINITAAIYDEIQQEMKRAKVSQALFAKVAANKSQGWLCELLRWKENPSPENRTLWENLCTIRRFLNLPQHERDVIYEEESRHHHSERMQHVVQLPPEPVQVLHRQQSQPAKESSPPREEAPPPPPPTEDSCAKKPRSRTKISLEALGILQSFIHDVGLYPDQEAIHTLSAQLDLPKHTIIKFFQNQRYHVKHHGKLKEHLGSAVDVAEYKDEELLTESEENDSEEGSEEMYKVEAEEENADKSKAAPAEIDQR

SEQ ID NO: 3786 - DNA, 1362 bp, Homo sapiens
tttctctttttcaaatgttttttaatatcctgcaggtaataacactgatttttctaatactcagaaacatctacttagcagttgtgatactaatttgcaaaatgtaataatgttatacaaatataagatactactaaatacatagtagaaataattgcatgattcctgatatttatattcaaggtataaacatgactgatttcgctgatactacagaataaaaaaaataaagctgctatgtaaaaaattaaagaatatctcaattagatatttttgttcccaatctctttcagacagatctatgaaataatatagaatatactatcaatatgttctttcatatgaagtgaaaaaaatgggatttaagtagtgagataatttctattttttacttttttaaaaaaatagacagggtcttgctatgttgcccaagctggtctcaaactcctgggctccagtgtgcttcctgcctcagcctcccaaagtgctgggattataggcatgagccattgtgcctggcctgtgggatcatttctattggtttttcttagagtcaaggtcttgctctgttgcccaggctgatcttggacttgcgagccaccatgcctggctgggttttttaaaaatagaatctcactgatagcctgcaagaaacagatgcagtgcctgcttccgtatcagtccaaggagccctcgtgtttgccacctttacctttgaacctccccctgcctccctgcctgtgtccgcttttgcagctcaatgcagccatgacaaggaaagaaaagacaaaggaaggccagagagccgcgcagttctctgcaggtgcagatgcaggcagtggaggtggcctgagcaggcagaaggacaccaagcgccctatgttgcttgtcattcatgacgtggtcttggagcttctgactagttcagactgccacgccaaccccagaaaataccccacatgccagaaaagtgaagtcctaggtgtttccatctatgtttcaatctgtccatctaccaggcctcgcgataaaaacaaaacaaaaaaacgctgccaggttttagaagcagttctggtctcaaaaccatcaggatcctgccaccagggttcttttgaaatagtaccacatgtaaaagggaatttggctttcacttcatctaatcactgaattgtcaggctttgattgataattgtagaaataagtagccttctgttgtgggaataagttataatcagtattcatctctttgttttttgtcactcttttctctctaattgtgtcatttgtactgtttgaaaaatatttcttctataaaattaaactaacctgccttaagaacagaaaaaaaaaaaaaaaaaaaaa

SEQ ID NO: 3787 - protein, 169 aa, Homo sapiens
MQCLLPYQSKEPSCLPPLPLNLPLPPCLCPLLQLNAAMTRKEKTKEGQRAAQFSAGADAGSGGGLSRQKDTKRPMLLVIHDVVLELLTSSDCHANPRKYPTCQKSEVLGVSIYVSICPSTRPRDKNKTKKRCQVLEAVLVSKPSGSCHQGSFEIVPHVKGNLAFTSSNH

SEQ ID NO: 3788 - DNA, 306 bp, Homo sapiens
  misc_feature (10)..(10): n is a, c, g, or t
  misc_feature (12)..(12): n is a, c, g, or t
  misc_feature (294)..(294): n is a, c, g, or t
tattttcagntnctgacagggtttcaccatgttggccaggctggtctcgaactcctgacctcaactgatccacccaccttggcctcccaaagtgctggtattacaggtgtaagccaccgcacccagccaatataggacatattttagttatataagtgcattctgctttgtccagtaaagcaatgtaatctatcctaccagtaagtagagactacctacacagtaggtgaaagatctagccatttcaaggagggtcaaggggacaattctggtaaataaatttgcatctaaggnaggttcccttac

SEQ ID NO: 3789 - DNA, 408 bp, Homo sapiens
tttttttttttttcatgttattgagtctcactgtgccaagggcttaagttgacatagcaaatatgaggaatacagcaataatattattaaaatatgtaatagaaaatggataaaaatatttaagcatagcacacatagtattacttttttgaaatttttactttagtatatatattacatatacacacagatacacatatatacttgtgtatgtgcacatatgtgtacaggatcctgatataaggtgcatttttttactggggctttttgggaaaaaattctggaagccactgtcctagaataccagagcaccaagaatacattgtgtatcagaaggagcatcaaatttggtattgaatgggatcagttcctaattcgctcctgtgtacaagagcagagtgatggcag

SEQ ID NO: 3790 - DNA, 640 bp, Homo sapiens
cgggctgatagctacgtgtccctcggctcttggcggcgctgtggcggggacgggggcgagagtgaacgattcaacccgggggagctcaggatggcccaacagcaggccttgaggttccgaggtccggctcccccaccaaatgcagtgatgcgaggcccaccacctctgatgcgacctcctccaccttttggtatgatgcgaggccctcctccacctaccacggccgccctttggacgtcctccttttgatcctaatatgccgccaatgcctcctccaggagggatacctccacctatgggccctccacatcctccagagaccacctttcatgcctcctcccatgagttccatgcctcctcctccgggtatgatgtttccagccaggaatgcctcctgtgactgtctcctggtactccagcactacctcctacggaggagatatgggttgaaaataaaactccagatgggaaggtttattattataatgctcggacacgtgaagtctgcatggaccaagccagatggagttaaggttattcagcaatcagaactgacacctatgcttgcagcccaggcacaggttcaggctcaggcccaggccgcaggctcaggcccaggcgcaagctcaggcccaggcac

SEQ ID NO: 3791 - DNA, 442 bp, Homo sapiens
  misc_feature (30)..(30): n is a, c, g, or t
  misc_feature (338)..(338): n is a, c, g, or t
  misc_feature (381)..(381): n is a, c, g, or t
tcctatttgatctatgcgatctttgtagtnctggtctacaaatcttgcaagattgcaaaggctttccttagaaccatcctactcagctatcttcaggaaggcaagatttcaaagcctcataaagtttgcctctggatatatcccatgggtcctgatacaatttcctttttaatgatgagctagaaagaaattagatcacatcctctagaaaactaaatgctaaggtcacagtgccagttcccccttgaggacggtatattaacgtatactttttgtaaaggagattaaaacatttaaaaattaaatcaaagtggagatccatgaatagattataacanaaaaaaaaaaaaacccaaaaatggcaagcaccattcagagtgnggatttttccttcttggagggtactcggcatcccccctcatcttcctccaagctcatttgg

SEQ ID NO: 3792 - DNA, 5423 bp, Homo sapiens
cccgggccaccgcctccgcccggctgcccgcccggactgtcgcggcccgcggtggcgacggcggccgctgcaaagtttccccggcggcggcggcccgggggcgcatcctcccgcaactgtcaagcgctggcggcggaaatgatgaggcgctggccattttccgagcccgggtttcctgcctgagccccgctcgagcgagccgcgagcgaggagccggcgggcgggagaggacgcgcccagggcgggggcccgcccgccccctcgggatttcgagggcccgggggcgcgcgacgccatgggccggccgggcccagagctcctgtctctcagcccggccgcaccacctgggtctccgccatgaacgggcctgccctgcagccctcctcgccctcttccgcgccctcagcctccccggcggcggccccgcggggctggagcgagttctgtgagttgcacgccgtagcggcggcccgggagctggcccgccagtactggctgttcgcccgggagcatccgcagcacgcgccgctgcgcgccgagctggtgtcgctgcagttcaccgacctcttccagcgctacttctgccgcgaggtgcgcgacggacgggcgccgggccgcgactaccgggacacaggccgtgggcccccagccaaggccgaggcgtccccggagccaggccccggccccgccgcccctggcctgcccaaggcccgcagctctgaggagctggccccgccgcggccgcccgggccctgctccttccagcactttcgccgcagcctccgccacatcttccgccgccgctcggccggggagctgccagcggcccacaccgctgccgcccccgggacccccggagaggctgctgagacccccgcccggcctggcctggccaagaagttcctgccctggagcctggcccgggagccgccacccgaggcgctgaaggaggcggtgctgcgctacagcctggccgacgaggcctccatggacagcggggcacgctggcagcgcgggaggctggcgctgcgccgggccccgggccccgatggccccgaccgcgtgctggagctcttcgacccacccaagagttcaaggcccaagctacaagcagcttgctccagcatccaggaggtccggtggtgcacacggcttgagatgcctgacaacctttacacctttgtgctgaaggtgaaggaccggacagacatcatctttgaggtgggagacgagcagcagctgaattcatggatggctgagctctcggagtgcacaggccgagggctggagagcacagaagcagagatgcatattccctcagccctagagcctagcacgtccagctccccaaggggcagcacagattcccttaaccaaggtgcttctcctggggggctgctggacccggcctgccagaagacggaccatttcctgtcctgctacccctggttccacggccccatctccagagtgaaagcagctcagctggttcagctgcagggccctgatgctcatggagtgttcctggtgcggcagagcgagacgcggcgtggggaatacgtgctcactttcaactttcaggggatagccaagcacctgcgcctgtcgctgacagagcggggccagtgccgtgtgcagcacctccactttccctcggtcgtggacatgctccaccacttccagcgctcgcccatcccactcgagtgcggcgccgcctgtgatgtccggctctccagctacgtggtagtcgtctcccaaccaccaggttcctgcaacacggtcctcttccctttctcccttcctcactgggattcagagtcccttcctcactggggttcagagttgggccttccccaccttagttcttctggctgtccccgggggctcagcccagagggtctcccagggcgatcctcaccccccgagcagatcttccacctggtgccttcgcccgaagaactggccaacagcctgcagcacctggagcatgagcctgtgaatcgagcccgggactcggactacgaaatggactcatcctcccggagccacctgcgggccatagacaatcagtacacacctctctgaccagtgaggaattccaggcctcaacagctgcccttgaggagcacaggcagaagtgtgaacttgtgaatgtaattgatctttccttccttccagagaaagatttaagggacactgttaactgctcgtgccagtttggaagtgacccttctattaggcctgttgaagggccctcctgtaggtttcatctatccacctggctttctccttattgtttacagatgtagttcttgttagaggatgccgctagctcctgcccggggtccctatgcccagtccccgttactcttagagaaaggagttggggtgagggccagagctggcagtggaaacttgttctctttttcactgacactgtcacagcggatgacagactttctacggggaggagggggggatcatcaggaagcccagaacactaacaagcggttctcccatctaccgtcagtccacatggcaggtctgctgtgtccacaccacagatgaccacatctaatcctgcttctactctcagctttaggacaaaagctctgtcagaggcacaagctgaaggtcaaaaatgatttaaaacattttacctcagactaatttctttaaaggattcaggttcaaaacttaaccactgcttatttcagtgcactgtttcaactaacacccatgctatttttgtagtcagaaacagctatgcaaaccctacctaatttacagtctgagccagcatgctggcttgtctactgcatcctcgggacagtcacctgccactgagtggccactgtccttcctaaatgtcaagaagtgaagtatgtcaccctttcagggaaattcaggcaattactgaaataggaaggtggcaagaacagttctatcctggtgccttacgaataaaaaactggattctggtttacagcagctttacagtgatagttaaattaactggggctaggggaaaagcaaccaaaaagggaaaaaggactcctaggccctttctattaaatccttcagcaacaaggctggcttggtgccctccaagcatctaatggcttattaaattatcccacaattgggttttaggctccttttttgacccaaaatggaagctgggaatctggtgccataactaatgagaaactcctttaataccccacaatcagtgttctgttctacctggctactgcttcactggattgaaaatctatctatctccttgcacacatgggcacacacaatctccaccatccagggaggtcctgaattcaaatctctatctatccaagtgatacaattcatagggggctggctcctcccagaacctgtctggaggctcagaaacgggggcagtgacagtggagtcagctgctcttgggtgccagcagagccattcagtacaacccccaggctcacagcagtggcttctaggaaactgggagtttagatcagctttacagatacatcgatcagaggctaaaatgaaacctcagcctaaaactcataggactgactgcctgggaggagggttaggtctgcttcttccacttatacttagtctctgtgctccaagaggtcaaatttttgcttctagaatttccttggggtctttcagagggtgggggaacaaacccctatgcacttttcttttttttttttgagatggagtttctcttgtcaaccgggctggagtgcagtggtgcaatcttggctcactgcaacctccaccttcctggttcaagcgattctgcctcgacctctcaagtagctgggattacaagcaccagccaccatgcctggctaattttgtatttttagtagagacagggtttcaccatgttggccaggctggtctcgaatgtctgacctcaggtgatccacccgccttggcctcccaaagtgctgggattacaggcgcgagccaccgcgcccagcctacaccacttttagtaccaacactcttgggtgatttcatggaccctaaagcagacctgacactgatccagatttgcagtccatttttaaggacacctgtctttatttcctcaaagtcaagcagctttctctggaaaatgaatgctaattagtgtgaaccaaaagagtaagtaagagtctgaagtttttttaaaggagaaagcttattatggaaagtcactggtcctcccctccgcacaggaaaggtacccagtagataatgaaccaaattaagttccctccctccagccagaagttaaacatctgggatatgacgtcttcatgccaggggcactcatttcttagcagcctctctacatacatctctcaggtggtgccaagaggcacaccaggtagagcaaacttagcagctctgactaacaggctgcaaagtgcaagttcagattctgtggcagagatttggagggcacccacgtccagactgcttcccgtccaagttaccaggacagctcaaaaacatgctgacagaaaactcccatggctctaggaaaaagtgacactaagccaacacctttctttatgtgggagcaaaatcagctgatgaaggggtgggcaccattgtggggcaggcaccccactggctgcagctagcccaccataggcacagcacatcccaccactctccttccagtcctgaccaggccccagccggcaacttctaccgagagccatggctcaacaccaaactggacagtagacatcatgatccctccagttagctctaattacagaccccaccagtacagcttgacagctcccggcaccatcccttccttcatctgacttattgaacttttacaaactaacagtcaccagcaccaaagaattaagtcaactaacctgccttgaattttaaaccagcaatccatatggctttatctggtataaatcttctgcctttgatcatttctggaccgtaggaaaaaggaatagcaatcattaaaatcttgggccagagaacactatttttacataacagtttcttaacctaaagtcaaggccttggactcttccctgagggttgcctgaaattccttcatgctttctattcaggactaattcccttactgcaaatgtgttagctctaacatctcccacaagctaaaggaacttgcaagtatattaacaaggacacatctgacatcctgtgtttggttaaaatatacagcacattgtgataacataaagtggatccatcttgtatcattataggcaaaaggtatttggcaaatttttatgtatggttttatgtactgtacaagtaacttattcttgaataatgcaaattttgctataatgtacaaattgctatatgtgaattaaaaagtttccaaaatcttgaaaaaaaaaaaaaaaaaaaa

SEQ ID NO: 3793 - protein, 575 aa, Homo sapiens
MNGPALQPSSPSSAPSASPAAAPRGWSEFCELHAVAAARELARQYWLFAREHPQHAPLRAELVSLQFTDLFQRYFCREVRDGRAPGRDYRDTGRGPPAKAEASPEPGPGPAAPGLPKARSSEELAPPRPPGPCSFQHFRRSLRHIFRRRSAGELPAAHTAAAPGTPGEAAETPARPGLAKKFLPWSLAREPPPEALKEAVLRYSLADEASMDSGARWQRGRLALRRAPGPDGPDRVLELFDPPKSSRPKLQAACSSIQEVRWCTRLEMPDNLYTFVLKVKDRTDIIFEVGDEQQLNSWMAELSECTGRGLESTEAEMHIPSALEPSTSSSPRGSTDSLNQGASPGGLLDPACQKTDHFLSCYPWFHGPISRVKAAQLVQLQGPDAHGVFLVRQSETRRGEYVLTFNFQGIAKHLRLSLTERGQCRVQHLHFPSVVDMLHHFQRSPIPLECGAACDVRLSSYVVVVSQPPGSCNTVLFPFSLPHWDSESLPHWGSELGLPHLSSSGCPRGLSPEGLPGRSSPPEQIFHLVPSPEELANSLQHLEHEPVNRARDSDYEMDSSSRSHLRAIDNQYTPL

SEQ ID NO: 3794 - DNA, 450 bp, Homo sapiens
  misc_feature (386)..(386): n is a, c, g, or t
  misc_feature (406)..(406): n is a, c, g, or t
  misc_feature (418)..(418): n is a, c, g, or t
  misc_feature (450)..(450): n is a, c, g, or t
aatactagggtgagcaaaatgttaaatcaggttctcttgatcattatgtatgtattaaacccttggaaacacacagggaaagctaagactcctatcagtttcagtgttcaatacatgaagcatgaaaggcagaatggttcttcaagatgagatgtttaaatggcaacttctttgtcactggatcagaccacacatgtggaacacaagggctgtgtccaaggcaggacaactcaatcgcagggctcaggaattagatattgagaaaaagtactagggcgaggatcaaggagtcaaacaggcctgggggtaggggaaggggcagggagtcatccgaacgggggtcctcatcccctccagatgttcaaagctccggggggccactgccnggccagagcttgcttgcctnttgctcttcagntattagtgggctaaggagggaagggccagggn

SEQ ID NO: 3795 - DNA, 264 bp, Homo sapiens
ttttttttttttcctctctttcttgattttattttaaacaacacacattaacattttaaaatagaatttaaacaggtgcccagtaacagaatgacagacgttaagtgtgaaatcagaaagttaaaaaactaaaccgcagatggtcacctttttattttttttaacatccgcctgcgctggactgttaagtggcctcatcactgtcaagccaggcaggatttgtaaagcttgggatgtgtgtattcagagatgacatttgcttgg

SEQ ID NO: 3796 - DNA, 4310 bp, Homo sapiens
cttaagtatctgtttagaagtttaggaattttctatactgtcttcttgaaatcaacttagagaaaatgaacacaatagattttaagatcttaattcactaatgtttaatgaatatgtttgatgctgacacaaccaccaacttggtaacaatttctttcattttgcctataggtgttcatgtatttggattatgctctacagctctcattacagatatcatacagctgtccacaggatatcaagcaccttactttctgactgtgtgcaaaccaaactatacctctctgaatgtatcttgcaaagaaaattcctacattgtggaagatatttgctcaggatctgacctcacagttatcaacagtggcagaaagtccttcccttctcaacatgcaacccttgctgcctttgcagctgtgtatgtttcgatgtacttcaattccacattaacggattcctctaagcttctgaaacctctcttggtcttcacatttatcatctgtggaataatctgcgggctaacacggataactcagtataagaaccacccagttgatgtctattgtggctttttaataggaggaggaattgcactgtacttgggcttgtatgctgtggggaatttcctgcccagtgatgagagtatgtttcagcacagagacgccctcaggtctctgacagacctcaatcaagatcccaaccgacttttatctgctaaaaatggtagcagcagtgatggaattgctcatacagaaggcatcctcaaccgaaaccacagagatgctagctctctgacaaatctcaaaagagcaaatgctgatgtggaaatcattactccacggagccccatggggaaggagaacatggttaccttcagcaataccttgccgcgagccaataccccatctgtagaagaccctgtcagaagaaatgcgagcattcatgcctctatggattccgctcgatcaaagcagctcctcacccagtggaagaataagaatgaaagtcgaaagttgtccttgcaagttatagagcctgagcctgggcagtcaccacccagatccatagaaatgaggtcaagctcagagccatcgagggtaggggtgaatggagaccaccatggtcctggcaatcagtacctcaaaatccagcctggcgctgtccccggatgtaacaacagcatgcctggagggccaagagtgtccattcagtcccgtcctgggtcctcacagttggtgcacatccctgaggagactcaggaaaacataagcacctcccccaaaagcagctctgctcgggccaagtggttaaaagctgctgaaaagactgtggcctgtaacagaagcaacagccagccccgaatcatgcaagtcatagccatgtccaagcagcagggtgtcctccaaagcagccccaagaacactgaaggcagcacggtctcctgcactggctccatccgctataaaaccttgacagaccatgagcccagtgggatagtgagggttgaggctcacccagagaacaacaggcccatcatacagatcccgtccactgaaggtgaaggcagtggctcctggaagtggaaagcccctgaaaagggcagccttcgccaaacttacgagctcaacgatctcaacagggactcagaaagctgtgagtctctgaaagacagctttggttctggagatcgcaagagaagcaacattgatagcaatgagcatcaccaccacggaattaccaccatccgcgtcaccccagtagagggcagcgaaattggctcagagacgctgtccatttcttcttcccgcgactccaccctgcggagaaagggcaatatcattctaatccctgaaagaagcaacagccccgaaaacactagaaatatcttctacaaaggaacctcccccacacgggcttataaggattgagtgatgtccattccatcattagggctactcgcaaaagaccatatgttgattctacctgtgttctgttccagcgaattgggaagtctcaccaagctagattgtctaccatcagcccagaactctgtaacttttcagaactgctatactcaaacttgcagatctcacatcaaggagagggaaaagcacaatgcaagaacctaactaacgtgatgatatgaagagttttcttaagacctgtcgtcaaacttaaaaggttttgcagagggcagtatcaaaagaaagtggttttcttcaaatgtatactattttacttcctgaatgtgccaactttggggatttttctttatagtgagctgtgggaacccagaacacacacgttttccctacagcagaggccatgcagtattatatattcattttgcagaatctgcacctacagctcaatacgggtggtgctgattattatagtacatataccatgtaaactctcaaactctatttagctgtgaaatagtggtgtgcaattccttgttaaagaaatgctactttattaagaagatgctggctgctttgtgttagaataggacaccccgcagcttctctgtagtggctctgtcacagtcaaaaaatgaaaaggtttttgtgcgtttcttcaaaattctgctttcttcaacatcaaaaattgtgtagaaatattttcagtgaaagggaataactagtacttttctgcatagtttttcttctgcttactttttatttaagtataggtactgctaatgaatctgttttcttagtgagtaaatttgcataattttataaatattattttagagaatcttttgaaattgttgtgatcatattttgctttctatggcttctccttaacttattgattaattttttgaagttatagatatgttctcctattttaaaagcaaaaataacaattgacattccttgagcaaaatatactgctgtgaatttgcaaacaagaaatctgagccaaaacttgacattgtgggttacattgccagaaatgttggtcaagtttgcccttagatgtctacaactagctggcataggttgccatcttaacaagtaatctaaaagtcccattcggttctacattattaactttttttttctatatcctgatgaccagtaaattagagccacactggttaagtttgactcgtctctaaaacgtttttgttaattggacaccaagaggaagaatctgaaaaaaaaatgcatgttggtaagtaaaagtatctcacggtacaaattaagaatgactttcttcaaaatatctgaataggtgcagttttagtttaacatgcaaacaaccattgttgctacctatcctgaatcaagccttgagcctaaatcaaagcaaaccaataccattgataagaagaagataaaaacaaaatattttggagtgttttccaacttaaagtatgaagacatactcagttcttggaacttagtattaaaccttttttatgccatttcataagaattccgatatatacttgatgattgccaaggggatgaaaggaaacaacagagatggttgatctgatcttagctcactttccaataacagaaggagttgtttacagatgaatagtatcacatcattatcaatttccacatgaaaaaggtggagctttctagaaaaaccaacctctaaggcattaggaatttagctgaaaccagcagaattgaaaactctggcaataaaacatggactcaaccatatcccttctggcaatttccttctcagagaggggagtgggaataaaatgttgccttccccacttctcaccaccaccgccatcatgacgctcatactggcttttgcctgtttgtagaggaaaaggtgggctggttttagtactctgaaggacaaaaacaagcaaacaaaaacccctgctgcagcatttcaggtgcagtatgatatttcctaatctttcctatttcttaacaaaagattttaaagtacttctctagtcattgaagtttttttttctttacataaatattgatatattctttttctactcaaagtgccaaaggctacagtttttaatgacttaacaaattgtaccacattgttaaggacatataatgatagacactagaactcagacctctgcatgtatatttgataacatgtcttttgtaaaacaaaaattacaaaaaaatttgtttacattccactggtaccttaatttaaaataaatcagactaaaaggtggtatctcttcttagtgttctatttatcttatttgctaatgggagcacttcttcctttgttaggctgtgctttactgataaaaccaagtattgaataaagagagttaattatctttttaaagt

SEQ ID NO: 3797 - protein, 607 aa, Homo sapiens
CLMNMFDADTTTNLVTISFILPIGVHVFGLCSTALITDIIQLSTGYQAPYFLTVCKPNYTSLNVSCKENSYIVEDICSGSDLTVINSGRKSFPSQHATLAAFAAVYVSMYFNSTLTDSSKLLKPLLVFTFIICGIICGLTRITQYKNHPVDVYCGFLIGGGIALYLGLYAVGNFLPSDESMFQHRDALRSLTDLNQDPNRLLSAKNGSSSDGIAHTEGILNRNHRDASSLTNLKRANADVEIITPRSPMGKENMVTFSNTLPRANTPSVEDPVRRNASIHASMDSARSKQLLTQWKNKNESRKLSLQVIEPEPGQSPPRSIEMRSSSEPSRVGVNGDHHGPGNQYLKIQPGAVPGCNNSMPGGPRVSIQSRPGSSQLVHIPEETQENISTSPKSSSARAKWLKAAEKTVACNRSNSQPRIMQVIAMSKQQGVLQSSPKNTEGSTVSCTGSIRYKTLTDHEPSGIVRVEAHPENNRPIIQIPSTEGEGSGSWKWKAPEKGSLRQTYELNDLNRDSESCESLKDSFGSGDRKRSNIDSNEHHHHGITTIRVTPVEGSEIGSETLSISSSRDSTLRRKGNIILIPERSNSPENTRNIFYKGTSPTRAYKD

SEQ ID NO: 3798 - DNA, 442 bp, Homo sapiens
ttttttttttttactttcaaataaggaaggcaatttattgtagtgaaattacattgaagttttatatatgacccccaatgcatataaaatcatttacctccacattataggataggatatcatgaactacaaagatactcaaagtgctatagatgagttaatattgatgtaatacattttcattaatctacccacatttaattggatgattgaaaggacacgttgaagtgtttttcatgatttttgctacggccccagcttttactggagtttttaatgcctttgatgactccagacactcaactctgttccttgcagtctgtttctttcttctatggtggtgattagttattgcaagactgcttatatagagtaatatatagtttactctggtatggagtaaacttataccagagatttaaacatttctccctaaatggag

SEQ ID NO: 3799 - DNA, 247 bp, Homo sapiens
  misc_feature (61)..(61): n is a, c, g, or t
  misc_feature (70)..(70): n is a, c, g, or t
  misc_feature (128)..(128): n is a, c, g, or t
  misc_feature (159)..(159): n is a, c, g, or t
atcttgtgcatggagtcgccattttcctcctagagaggccgccagaagacccggcgctttnttccttctncagctgaggctgcggcggggccggggctggggtcggggccaggaggaatttttttgtnagagaataaaaggaggttgtccataattaantttaagcagcaatcagtaaaacattgagctcttcagctccgccttttttgctctgaaaattggaaaaccaagaaggttttaatgtttt

SEQ ID NO: 3800 - DNA, 576 bp, Homo sapiens
tgtgtgtgtgtgtgtgtgtgtacatgtacgctgtgtgcattgagggagagagagactgaacagagagtactttgctgctaacgacatcatcttggactaaattctgacaaggcctcagttacccccagttgtgcaggggagtaggtcagaacagggttctccactgtctagatttagctggttagattttcctctaaaatcttaagcagatgctgaatccataaagccaaggagtgctgagggctggagtgtagtgggccctccctcccacagaccccagggatatacatctggactcctgggaatctggattaagaaagttgggatgaaagaggaggactgctcaggccagttgtgagccaggagaatgtaccaggtctggtttgtggtctggtgtctcctagaaaggtattgtgggaccagaagtgggactcaaaccagagatgatgaagttaggggaggggagtactccacgggcatctctactctctggcggactggatagctaaaccctagggtggagacagccctgacaccctcatccccttctcagaacaacagcctctagagcagggg

SEQ ID NO: 3801 - DNA, 1599 bp, Homo sapiens
gagttaaggacagattttaagagccccatagaccagtgcaatcctgttcatgcgagggaacggttgaggaacatcgagcgcatctgcttccttctgcgaaagctggtgctgccagaatactccatccatagcctcttctgcattatgttcctgtgtgcgcaagagtggctcacgctggggctgaatgtccctctacttttctatcacttctggaggtatttccactgtccagcagatagctcagaactagcctacgacccaccggtggtcatgaatgccgacactttgagttactgtcagaaggaggcctggtgtaagctggccttctatctcctctccttcttctactacctttactgcatgatctacactttagtgagctcttaacgcaaagaccatgcacatcatcagagactgagatgggagaggcctgagacggagaggtgcatttctgctggtgactggaggagggaccagaatgaggatacgtgagaaatagacccggcaggcagtcagactgaatgggagctggaatcacgcagcagctgggagccgagttaaccctgcgtgtctgtgtcaccctgtttgtcaatctttggcattcgaattccacacacggggtcctagagcccttctgagcatcagtggtgtgggggagtaggtgacgaaacactagacctctcctgagagagaattgctgcttcctgaatccacttcattgaacagcaccttgcaagttcaaatgagttcctgggagcggaggctggaaggccacaaggtgcttgctaaggaacagaatgacccagagtcaaggccaagtctgcagggacctgttgaaagcctcgagaatgtcttggctgcccaagactcttgttgcctttcttccaagccatggccatgccctttttctcaaatgggaggggctggagggtgtgtgggatttgtcttcagctgcaaccagccttgagcctgctgggctattttcagctgaggaggggtgaatataggaaaaatgcatttttgaaacgtttgcaacatgatcaaggtgttagttctccaccacacaagttgtattcttcttttgccacctcaaaccatcacagagtctttaaatgcaaatcaattggtcaatgctagtcaaagctatgttcttacaaaaaccccagacagctcagagctcagaaaatcctgtggagtggctgctctgtaccgtgggcatccggcagccaggaagtgagacaacataattataactttgttttatgatgctgcatcatttgtactgtttaggtcgacgtgaggacatcatcttatttagaattttccgtttggcattctcttttgggtgggagttatgctgggggttgtaaataatgacaaggctgagatttttatgatgtttaaattgggcacaatgattttgaccttattccccaaacttcttttcttttctactgtttaacatacacaggctatttatacacgtccccagctcccatctgaaacctgtgactcaggtttatgaatggtgtttgtgtagcaacacattgtgtgctatgtttattaaaatgcagcgacaaaaaaaaaaaaaaaaaaaaa

SEQ ID NO: 3802 - DNA, 431 bp, Homo sapiens
ttttttttttttttttttcaaaatatattttatttctttcttacatgtattttgcaaaatttccaaggtaaacattagctccacatacagaaataaaagagttctttaagaactagcattgaattcatcacaagaatcatcaaattatgataatggaaaacaaacttgcctatgaccaaagctactgagctgaagtgaagagctgtctttacaaagatccctctcattaagcccactgccctgcagctgactcaagccatcatcatgtatgtacgtgtataaaaaaggacactggccgggcatggtggctcgcgcctgtaatcccagcactttgggaggctgaggcgggcgtatcacgaggtcaggagtttgagaccagcctggccaacgtggagaaacccccgtgtctactaataatacaaaaactagct

SEQ ID NO: 3803 - DNA, 1962 bp, Homo sapiens
ctctagtactttttgtcataaacaaacaggccatctgccgccaaatacatccactccccatgccactgacatcctatgggtcagccaggcttgctttgactgaggccgaggcatctggaactttctctgcctgcaggggctagcagcagaggcttcaccgcatcaccaccccttcctccactcctgacattctttcccttcagggatccaaaatggttggccgagctcccagtgggaaaacgtgtgctagagttggggagtgagatgagtggtgctgtccatggaatcaggccacagcaggaactgccccactggccatttgagacacacacaggtggtaaatgctctgctggtgggctgtgcttccctcattcagagagctctgttacagcccactgtgtcctttagaagcttgaaaggaacccaactctttgctgcactgtcctttttcttcctcaaattcagaccctccttccaccggcacccccctactccaccctcagctcttccttgcctggtttatcaagcagagctgaggccccacgtttccaactctgattgtcacttgcatcttcacaaaggataaaccacggagcaactggaaaaccatcagccaagcgttcggatgagtctggttattggtccacccccgaccagattcccttacacttaactcacttctttctttggcaatgaccctcatgacatgtataaatgggtatgactaagaagaggctgtgatctaacatttatttgctgccattttttactctggggagaagcagccccaactcatcactgggaaagaactccccctgcaaaccagctaaatttgataatttaaaccccctgcccctaaaacttctcacagagctggggagttggtggcaactttccaagtcaaggtcttgcttagaaagtccttcactacatggccaggtgcagtggctcacgcctgtagtcccaggtacttgggagcctgaggcaggaggattgcttgagctcaggagttcaaggctgcagagagctatgatcatcccactgcatttgtttaaaaataaatttttaaaatttgtgtgttttatcaggggtctcctgtacagtgtatctgtgtatgtttgtgtgtgtgtttgtaaacagccttgtttaatgttttgagcaataagatatgcacacacaggtattttgttgctaaagagattggacaaggttgtagctgtgctcaggcttcagcttggtttgttaaattgagagataaacaatgacaagagctgccagccaaccacactattcaaaaagcaaagtgttcaccactaaagctaaccattcatctggttgcaggcaaggctaaggctctctctcctctagttcctggaacagactcacagattggcatgaagcactgatcaggggctgcactcagactccctggccaagcaaacctacaccagaagagtcagtgtcacagatatgatgcggccaatctctgtctccaaaaacctacctgaacttaatggtagaattcaaagatctggggactgagggcacccagccttctaaaacacaatgtattcatgtgtttagtgtaaactctctgcatggattctcagtgttaataataaaaggaagcattcttttacaactcctgctgtgtgcaaaagaaagtgcaaaggatttggagtggcattccgaagatcaccacacataccttggttctgatggctgctgaactccgacttcttcgctgagacatgactgtgggaacagcctccagctatctgctcatcagaggtgctttcctcaacctcctgcaccacctccaagagaaacagcctaaaaagaaaccccagctgtttacttatattggtctgtaaatccctggaagtaaaccccatgcatttttatctactgtctgaggacatacaataaatctgagaaagtcaaaaaaaaaaaaaaaaaaaa

SEQ ID NO: 3804 - DNA, 1821 bp, Homo sapiens
aaaaatacaaaaattagccggcatggtggcgcacgcctgtagtctcagctagtcaggaggctaaggcaggagaatcacttgaacctcggaggcggaggttgcagtgagtcgcaaacgcaccactgcactccagcctgggtgaaagagcgagactctgtctcaaaacaaaacaaaacaaaaaacctaacaaaaacaatagctaccatttactagacactcactacataccaggcactgtgccaaacagctccttcttatcagctcagggtgctgggggtgccagggagggaaggtcagtgaaactgtggcaggtgtcggttaagcaaaagaaggctggcatctgtgcagctgggggcaggccttccctcctccaacccccttggccaggagcatcacagggcaggcctgagcttccacaaggtgacccagccagtcaccatgaggcaggccccaggcgccaggccactctgcagaggagccacgcaggaggtgacctttcctatcttgactgaaacgggcacctggcgtggaggccaagtctggagccagccccctaggagagctccaggaggcagacatgcctgcggggtcaaagcctgccagctgactgctgtgccctcctcaggaccctgctccagcagctgcagaaactccagactctggtcaccaacaagatctccagaccttacaagatggccgccacccagactgggacctgcctcatggtggcagccttgtgctttgttctggtgctgggctccctcgtgccctgccttcccgagttctcctccggctcccagactgtgaaggaagaccccctggccgcagacggcgtctacacggccagccagatgccctcccgaagcctcctattctacgatgacggggcaggcttatgggaagatggccgcagcaccctgctgcccatggagcccccagatggctgggaaatcaaccccggggggccggcagagcagcggccccgggaccacctgcagcatgatcacctggacagcacccacgagaccaccaagtacctgagtgaggcctggcctaaagacggtggaaacggcaccagccccgacttctcccactccaaggagtggttccacgacagggatctgggccccaacaccaccatcaaactctcctaggccatgccaagacccaggacataggacggacccctggtacccagaagaggagttcttgctcactaacccggatccgcctcgtgcccctgcctcctggagcttcccattccaggagaaaaggctccacttcccagcccttccttgcccctgacatttggactcttcccttgggccgaccactctgttctcattctccttcccaccaacatccatccgtccttctcagacaaaccactcactgggtaccccacctcctctctcatatgcccaacacgaccactgcctccctgcccccacacctgcacccaaacagacacatcaacgcaccccactcacagacaccccttaccccacccccactgtacagagaccaagaacagaaattgtttgtaaataatgaaccttattttttattattgccaatcccctaagatattgtattttacaaatctccctcttcccttcgcccctcccttgttttatattttatgaagttagtgcgggctttgctgctccctggcccaggaaagagggactacctgaccctcacctggcacccccctgctgctgcccaagccgctgggcctttttaattgccaaactgctctcttcatcagctcagcacatgctttaagaaagcaaaaccaaaaaaaaaaaaaaaaaaaaa

SEQ ID NO: 3805 - DNA, 426 bp, Homo sapiens
tcctgaaaaagaaaccagaaaaaaatgtactcttactgagataccctctcaccccaaatgtgtaatggaaaatttttaattaagaaaaacttcagttttgccaagtgcaatggtgttgccttctttaaaaaatgccgttttcttacactaccagtggatgtccagacatgctcttagtctactagagaggtgctgccttttctaagtcataatgaggaacagtcccttaatttcttgtgtgcaactctgttttatcctagaactaaaagagcattggtttgttaaagagctttcaatgtatattaaaaccttcaatactcagaaatgatggattcctccaaggagtcctttactagcctaaacattctcaaatgtttgagattcaagtgaatggaaggaaaaccacatgcctttaaaactaaactg

SEQ ID NO: 3806 - DNA, 738 bp, Homo sapiens
agcacctgctgtgtgcagggagctgagctatgggatgggaatgggagtaaacaaggtactttttacttttttctttttttcctcactgctagacggtgtgggaacttctcactcatggcttctttcccacacacctgaagagcactgactgtgtgccgggcactagtgatacaaaagagtgtgacagtgttcagtctgcattttcgatcatgggctacatgccgagtgctggggcacagagatgaacaagatcggttccttcacttcttcatgccacaagtgtttattgagcacctgtgtgccaggcctcacagactcccagttgggttgaagaatggttgactgagttgattcttcctgtaccctcggtcgtctgagctgtgtgcagacaacatccccccaccacccaagagggagggtagctcttccgctcaccaggggcaagcacaggtcctggtggcccacgccacatgttagcccccctggagggggcgccagttggagacgggggctgggtgtccctggcccactcccggtcccctgtgctttacctccttgcccttgtgtctcaggtgtggtccctgctgcttgatgaagttgctctgttcaagcctttggtgggatcatgtgtttgggggctttaggggaccagtgcctgggcactgccgtggcctgggtaggacttttccagcaggctggaggagttgccgtgcttcagcctgatcgatgtataacagc

SEQ ID NO: 3807 - DNA, 360 bp, Homo sapiens
tttttttttcaatgtttcattgttttattaactaatcgctttttatttccaggcctgcgggatacaacgggaatacaaaaatgcgctagagcggtccgcaacgctgtagcctgcgtaaggaacaattgatactaagtggcactaggctgcagggggtgccactgacacactgggagagggctcagccaaccacaaggtgataacgaggtcagcggagcaccagaaaccggctcactagcctcctgatcagtctcggcccagaggaaaatgaagggcttgagcttctgcttttacaaatctgaggggcaggaaatgaaatcccactagcagtctgcgtagtgagttgaaccctagcacccg

SEQ ID NO: 3808 - DNA, 2230 bp, Homo sapiens
gcagcccactcttcccgagaggccccgacatctcccggataatctggagctttcaaaatgtttgccaaagcaaccaggaattttcttagagaagttgatgctgatggtgacctgattgcagtatcaaatctgaatgactctgataagttacagcttctaagtctggtgacaaaaaagaagagattctggtgctggcagagacccaagtaccagtttttatccctcacccttggcgatgtactcatagaagaccaatttccgagtccagtggtcgtggagtcggactttgtgaaatacgagggcaagtttgcaaaccacgtgagtggaaccctggagactgcactggggaaggtcaagctgaacctggggggcagcagccgcgtagagagccagtcttcatttggaaccctgaggaagcaggaggtggatttgcagcagctcatcagagactctgccgagagaacaataaatctgagaaaccctgtgctccagcaggtgctggaaggaaggaatgaggtcctgtgcgttttgacacagaagatcacgacgatgcagaagtgtgtgatctctgagcacatgcaggtcgaggagaagtgtggtggcatcgtgggcatccagaccaagacggtgcaggtgtcagcgacggaggatgggaatgtcaccaaggactccaacgtggtgctggagatcccagctgccaccaccattgcctacggtgtcattgagttatacgtgaaactggacggccagttcgagttctgccttctccgagggaagcaaggtggcttcgagaacaagaagagaattgactctgtctacctggaccccctggtctttcgagagtttgcattcatagacatgccagatgctgcgcatgggatatcttcccaggatggaccattaagtgttttaaagcaagcgaccctgctcctggagaggaatttccatccatttgcggagctgcctgagccacaacagacagctttgagtgacatcttccaggcggtcctatttgatgatgaactactcatggtcctggaaccagtgtgcgatgacctggtcagcggcctctcgcccacagtggcggtgctgggggagctgaagccccggcagcagcaggaccttgtggccttcctgcagctggtggggtgcagcttacagggtgggtgtccgggccccgaggatgcaggcagcaagcagctgtttatgacagcctacttcttggtcagtgccctcgcagaaatgccagatagcgcggcagctctgctgggcacttgctgcaaactccagatcattcccacactgtgccacttgcttcgtgctctgtctgatgatggagtatctgatcttgaagacccaaccttgactcccctgaaagatacagaaaggtttgggattgtgcagcgcttgtttgcctcagctgacattagtctggagagactgaagtcatctgtgaaagctgtcattctgaaggactctaaagtcttcccactgcttctttgtataaccctgaatggactctgtgctttaggcagagaacattcatgatgtcatatgtgaactagaagtacgtgttactggccaaggctatttttcagaactgttaaaggtcatatgcacgttaaaagttgaccaatgaaatgaatttacagaacagtttaagaagtggtgacattttgcatgatgaatgacctgacttttagccaccaggtactctttaaacagttttccttatcagaggccctcctgtgctggtgacccagcatctgagttaggttccagcatgtaaagagctgggagggcggagaattcttagcatacattcagacgttttttctgcacaataataagtccatctgtcacttgcattccactttttgttacatagaaagagtctgaccctttaatccaaaaggtctttttacattgtgaatgctgtgggaaggcaatttctctgcacacaagaggctacgttttggaagtgatgtatgttatttgatgactgaaaatgaactgtaaatgctcctagagtatattcctctgctgaacaaaattaaacttcaaaaaaatctaacagtaacacacccctgcttgggaccctagctatatgcattttatgtgaccttgccatgcttcagtgaacatactaattctatgtctagcacatgttgatttcctatgtattctgggtattctattaaaggaaactttgaactattaaaaaaaaaaa

SEQ ID NO: 3809 - protein, 496 aa, Homo sapiens
MFAKATRNFLREVDADGDLIAVSNLNDSDKLQLLSLVTKKKRFWCWQRPKYQFLSLTLGDVLIEDQFPSPVVVESDFVKYEGKFANHVSGTLETALGKVKLNLGGSSRVESQSSFGTLRKQEVDLQQLIRDSAERTINLRNPVLQQVLEGRNEVLCVLTQKITTMQKCVISEHMQVEEKCGGIVGIQTKTVQVSATEDGNVTKDSNVVLEIPAATTIAYGVIELYVKLDGQFEFCLLRGKQGGFENKKRIDSVYLDPLVFREFAFIDMPDAAHGISSQDGPLSVLKQATLLLERNFHPFAELPEPQQTALSDIFQAVLFDDELLMVLEPVCDDLVSGLSPTVAVLGELKPRQQQDLVAFLQLVGCSLQGGCPGPEDAGSKQLFMTAYFLVSALAEMPDSAAALLGTCCKLQIIPTLCHLLRALSDDGVSDLEDPTLTPLKDTERFGIVQRLFASADISLERLKSSVKAVILKDSKVFPLLLCITLNGLCALGREHS

SEQ ID NO: 3810 - DNA, 410 bp, Homo sapiens
ttttttttttttttttttttttcatcaccatagtttttaatgaaaaaacttgtttaaaattgtaaaggaaaaaaggggaaggggacggcaaaatcttaccagcaaaggggttaaacaaatggaaaatattaaggcccaaacattaaaatattaaagcatatatgtggcatataaaatacagtccaaacccaggagttgcactatactgattagggcttaacagaaaaaaggattaaattggttcctcccagaagtatatacacagttcatttccacagcattttcctatatagccagcaggttattttcttcagttattcacaccttgatcaaacctgaattataaacttagcacttacaaatatgaaaattcattcacagggaaaaacagtttttccatttccccaata

SEQ ID NO: 3811 - DNA, 609 bp, Homo sapiens
gcatagaatctgtaggagatagagcgaggagagggagatgaggaccaaaggcgtctttttctggtgtggaactgggatgtgcggcgatacggcagccatcttagaggcaacgtggggttcccagcacaggacgcgccgggaagcagtagtggaaagcactgggtcgttctcaggagcagtgggaccttctgcgtgtgctcgcccactgatatcggtgtactccgaaaagggggagtcatctggcaaaaatgtcacttgcctgctgtattcaaggctcctattcgaccagatattgtgaactttgttcacaccaacttgcgcaaaaacaacagacagccctatgctgtcagtgaattagcaggtcatcagactagtgctgagtcttggggtactggcagagctgtggctcgaattcccagagttcgaggtggtgggactcaccgctctggccagggtgcttttggaaacatgtgtcgtggaggccgaatgtttgcaccaaccaaaacctggcgccgttggcatcgtagagtgaacacaacccaaaacgatacgccatctgttctgcctggctgctcagcctacagcactggtcatgtctaaaggtcatcc

SEQ ID NO: 3812 - DNA, 398 bp, Homo sapiens
  misc_feature (32)..(32): n is a, c, g, or t
  misc_feature (39)..(39): n is a, c, g, or t
  misc_feature (139)..(139): n is a, c, g, or t
  misc_feature (167)..(167): n is a, c, g, or t
  misc_feature (172)..(172): n is a, c, g, or t
  misc_feature (278)..(278): n is a, c, g, or t
  misc_feature (318)..(318): n is a, c, g, or t
  misc_feature (380)..(380): n is a, c, g, or t
tttttttttttttttttttttttttgattttnagcaggnacagttttgattttattgcaaggcacacaatcgtatatacaatgcataattatcatcttttaaagtacaagataaaaatcatatacattatagtaaagancatatgagtatattcttgtttcagagangaaanttgccttaaggaagctgggttataccgtttttggatgtgattttcgtatttatactgaatcatccgaacagctcttggttaggaaaataaatctcattgatagggncacacaacctttcacaggctttcactttacaatgttccantttaaaggtcagccagtgtggctccctggattttggcatggggtcatcgttttttcatcccnggggtcttgggttggaaa

SEQ ID NO: 3813 - DNA, 1963 bp, Homo sapiens
gcgcggcgtgcaggtcgcagctgtggctcgggtgctggcaggtgctggcgggactggcggggatcgccgtggactgcctcaggggcgccgcagcccgctcggcccgagggcccgcctaaccgcgccgcccgcgcccgctcctcctcggcccgcgcccggagcgcgggggccgccggcgctgggtactcggcggccaccggggatcggggctgagcggtcggttcccgcccccgtgccgccgccgccgccttccggccgaccgcccggcttggccgctgctgccgcgtctggcccccgggtccccgccgctgggggcgcgggcggggtcgggggttgccgggcgccgccccccgtgcgcctggagtccacatcccgggcccggcggccggcgagcatggaggagaagtacctgcccgagctgatggcggagaaggactccctggacccctccttcacgcacgccctgcgcctggtgaaccaagaaatagaaaagtttcaaaaaggagaaggcaaggatgaagaaaagtacatcgatgtggtgattaataagaacatgaagctgggacagaaagtgttaattcccgtaaaacagttccctaagttcaactttgtggggaaacttttgggtccacgtggcaattctctgaagcgtttacaagaagaaaccttgacaaaaatgtccatccttgggaaaggttccatgagagacaaggccaaggaagaagagttgaggaaaagtggagaagcgaagtacttccatctcaatgatgatctccatgttctcattgaagtgtttgccccacctgcagaagcttatgccaggatgggacatgctttggaagaaatcaaaaagttcctcatccctgattataatgatgagatcaggcaagcacagctccaggagttaacatatttgaatggtggttcagaaaatgcagatgttccagtggttcgagggaaacccaccttgcgtacaagaggtgtaccagccccagcaataaccaggggaaggggaggagttacagcccggccagttggagttgtagtaccacgagggacgccaactcccagaggagtcctgtccacccgagggccagtgagtcggggaagaggacttctcactcccagagcaagaggagtccccccaactgggtacagacctccaccgccacccccgacacaagagacttatggagaatatgactatgatgatggatatggcactgcttatgatgaacagagttatgattcctatgataacagctatagcaccccagcccaaagtggtgctgattactatgattacggacatggactcagtgaggagacttatgattcctacgggcaagaagagtggactaactcaagacacaaggcaccttcagcgaggacagcaaagggcgtctacagagaccagccatatggcagatactgattgtactgtctgatgttgtgaaatagccaatctccaccagtcctgtatactgttcaaagtaatttttttctatgaacaatccctttttaaataaatcaaaatgcttaaaatctgaatggatggaacttaaaactactttgttgaaacatcaacctgggcagaaaaaaagaaaaaaagacatgtaaaattttgttatttccagtctgtatatgaaaaaataggtcatcaaaaggaaaaaaaataactttgattaactagtgttaaacaaaaaataggtttactaaatatgttaatctattcttttaacataagcctcacctttcattttaaaggtttccatagaatttagttattttatctttcagccatatgctagtttttttttctcttgccaacatgcgtaaaaagggaagccaattacaagtgcaaataatgtggtattcttttgtaactcaagtcttgaaatgttctgtagtgttaagcaaagtctcctcttgcttgatactaaataaacttttgaaaaaaaaa

SEQ ID NO: 3814 - protein, 346 aa, Homo sapiens
MEEKYLPELMAEKDSLDPSFTHALRLVNQEIEKFQKGEGKDEEKYIDVVINKNMKLGQKVLIPVKQFPKFNFVGKLLGPRGNSLKRLQEETLTKMSILGKGSMRDKAKEEELRKSGEAKYFHLNDDLHVLIEVFAPPAEAYARMGHALEEIKKFLIPDYNDEIRQAQLQELTYLNGGSENADVPVVRGKPTLRTRGVPAPAITRGRGGVTARPVGVVVPRGTPTPRGVLSTRGPVSRGRGLLTPRARGVPPTGYRPPPPPPTQETYGEYDYDDGYGTAYDEQSYDSYDNSYSTPAQSGADYYDYGHGLSEETYDSYGQEEWTNSRHKAPSARTAKGVYRDQPYGRY

SEQ ID NO: 3815 - DNA, 286 bp, Homo sapiens
ccctgatgcaaggttatttattattatcatcttttttttttttttttttttttttttttttgccgccggcggaatcagagacacggacgcaggcaggatcacgcgaaaccagaattccttccggagagcaaatccgtacagaaggtcgtggggggaggaccaggggaggaggggcccgggaagagggggttggggacgacacagggacagagggccctgtccggatctgctatagccaccccaaccaggttccgtcccttccccaccccaccccgcagagagattg

SEQ ID NO: 3816 - DNA, 298 bp, Homo sapiens
  misc_feature (254)..(255): n is a, c, g, or t
ggaccccctggcccctcttttgtcttctgtgaagacaggacctatgcaacgcacagacacttttggagaccgtaaaacaacaacgccccctcccttccagccctgagccgggaaccatctcccaggaccttgccctgctcaccctatgtggtcccacctatcctcctgggcctttttcaagtgctttggctgtgactttcatactctgctcttagtctaaaaaaaataaactggagataaaaaaaaaaaaaaannaaaaaaaaaaaaaaaaaaaaaaaaaaaaaaaaaaaaaaaaagg

SEQ ID NO: 3817 - DNA, 448 bp, Homo sapiens
gagatcagctgatgccggagggtttgaagccgcgccgcgagggagcgaggtcgcagtgacagcggcgggcgatcggacccaggctgccccgccgtacccgcctgcgtcccgcgctcccgccccagcatgacagccccggcgggtccgcgcggctcagagaccgagcggtttctgacccccaaccccgggtatgggacccaggcggggccttcaccggcccctccgacacccccagaagaggaagaccttcgccgtcgtctcaaatactttttcatgagtccctgcgacaagtttcgagccaagggccgcaagccctgcaagctgatgctgcaagtggtcaagatcctggtggtcacggtgcagctcatcctgtttgggctcagtaatcagctggctgtgacattccgggaagagaacaccatcgccttccgacacctcttcctgctgg

SEQ ID NO: 3818 - DNA, 587 bp, Homo sapiens
agtcacttatttcccctttccatgccagagacttccgttccctgctggaacttccgatcccattcttctctcggtgggaatgcttgtcggggggaaacaagaaacgcaatagataaagcggggcgcatgcgctcccggcacaggcttcgattgtgaggaaggccggctagtctccgagctcatcccgccttgcgcatgcggagaaggtaaaccagcgccccgagttgaggcgcgggtttggtggcgcgtttcagcgaagtcgcacgtgaccggatagcagtggcctgagtaaagacccagtcatggcagcctcccagcatcagttcaccatggggaaagctatgtgttcagagccattctgatggtcctcagtggcccttatcctcctccactcagcgattgtgccagtcccgtcgagactttgcaccaccgaggccagacagagagagagaagccccagttgatgtcttgacccagataggtcgatctgtgcgagggacactggatgcctggattggggccagagaccatgcacctggtgtcagagtcttcgtcccaagtgttgtgggccatctcatcagccattt

SEQ ID NO: 3819 - DNA, 338 bp, Homo sapiens
tttttttttttttttttttttttactggaaattgtcttttatttttctttgctggggttcaagggcatttctttaatcaaacctcaaagttggatatagagtcatcaaaagaaaaatcattcttcttcctctctgtttccctaaaaataaaacagtcacaggaaacctttccttttttcttaattggtctcatctcatctttaattattgctgctgctgttatgtgtttatgtttcccttttttttttaagttttgagggtaaatcgtgtcactgggcgtaaaatactgaaaaatcaggtagcttcactggctggtaggggacttttgcttttgaaac

SEQ ID NO: 3820 - DNA, 515 bp, Homo sapiens
  misc_feature (108)..(108): n is a, c, g, or t
  misc_feature (243)..(243): n is a, c, g, or t
  misc_feature (374)..(374): n is a, c, g, or t
ttttttttttttttttttgggaaagacattttatttccaagtttctaagagtgttctacaaacaatagaggcttaacgaaaaaataaaaggttaaaaaaaaaaaaaangaaaaagaaaaacaagtattcttaactactgaaaagtaaacagcctttttaaaaaagacttcaacataaaaatgcgaaaatgtagttgtcatctctaatccaaatacattcctagagaaaaggatcatccatggngacagggttacttacagctgtatacttatttaaatgctattcatattccttttgagttatttcttcattgcaaattcaattggagatctgtgcaaatctagcaaaatattctttggattacaaaaactatntaaaaaaatgaacacaacctgcaattatggaagtattgagaatgtgtaatccttcactgagatgaaagattctaaagtgacattgtccacaaaatgtattccattgaaatgttcagcccaatttgatttcaatgcaaagta

SEQ ID NO: 3821 - DNA, 808 bp, Homo sapiens
caatctgtgtaagtttgaacaaacaaagcagtcatagtgagaagccacagaagcctcctacattaaaaatactccagcataataaaggaaggtaaatgttaaagcgcctgcttgatgaattcagcaagtgatcattcacacaaaaagaaaaccaactgagacgctgtcactagggtttttcaaataggtagagaatcttaaatatccagtaatgatgacaacctcacttactgggagcttactcgtggggctaaggaggatgcgtgatgatcccatttttattgtcacagctaccgaaggaagataccctcatcaacccaattttacaaatggagaaatagaagctcagggaagaatctgaagtagtctcaaaggaagtgacaggaaggatgtggagaaagctgagtgtcaaagtcagtattcaagaccggatttactgctacttagagatgaatgaagaaatcagagggaacgcaggtgctgatgctaaagcggctgtcaccacccagctgtgtgacataggacatcttctttctctgtctcacttgactaatatgtgtgtcaggggagacatgattgtaattgcctaaagcaattctgtgtgatcaagaatcagaagcatgaacagtatgccctctgtgttagcccctttataagggaggaagtcatcttcagcatgctgaattgtcatctttcttagcagtgcaaatgactaaaacttagccaatgtagagttgtccaattggagctcatactcagtcttgagcaaaggaaaagaaactgtgatatggggaaattgacgggatat

SEQ ID NO: 3822 - DNA, 332 bp, Homo sapiens
  misc_feature (294)..(294): n is a, c, g, or t
  misc_feature (300)..(300): n is a, c, g, or t
  misc_feature (323)..(323): n is a, c, g, or t
ctgggacattttgctaaacatagaagatttcagttccagatttttcaggtgggtgggggagctattttagtcgggggggcaggggggtgggaaattttcaatttataaagatggacaatttttgtgttgtatttgaagcttttgaaagaattttgtaatattttccaagtttggatttatgtgcattgttaacaagaactgaaattctaacttttttggtaacattaaagtttaggtagcaggattgaaggaaatgatttaagaaggatatagctgttaaatgcaaatgaactntcattncaaattgaacctttttggtaccngttgggagt

SEQ ID NO: 3823 - DNA, 438 bp, Homo sapiens
  misc_feature (349)..(349): n is a, c, g, or t
ttttttctgtgcaactctttgttttcttgtagtgttctgtttatttaactttctctgtatttatcagttattcatccttgaatgtttcaccagccatctaaatttcctcttaggacattcaggtgtattggtattctaccagtgtcatttttctgacggtctctcctgaaaccttcagtcctattcccactagactggttgcccttcaaagttgtcattcctgggatctccagttctgtcatccctgtattcctgttgcttctctcccatgttagatctcttatttcctgtatcccttgtctgtctttcgcttgatttatccttttgttctggtggaacacaacctganaaagggtacataagagataaattttgtgagaaattgcatgtgtaaaatgtctttatttcacccataaactcaagtaataatttggctac

SEQ ID NO: 3824 - DNA, 524 bp, Homo sapiens
tcaaggaggaaggtggatttggtaagagtgcggttctgctcggccctgatcagctctgccctgcccaccccatctcagccaggcggctttacttcttcctgatcttcaggtctttcttcttcctgatttccttggccagctccccaatcaatctccagtactcattgaacttgagctccgagtcctgattcacatccaagctcttcatcttctcatcaagagagcccacatccttgagcagatggggcaactgctgggtaaccagctctttgaactcgttgacgctgaggctatccttccggccctcctgccttgcaaaggtgaagaaggtggtgaccacggtctcaatggactcctctagctctgtcagtggttctgctgccattaggaccctgaggccaaagctgatgtcctcaaggggctagctgacctttgtcagggctgacccggcaaggagatggggtagagtgagctggagcctcagggctgaggtttataagcagcggggaaggaggagagagctg

SEQ ID NO: 3825 - DNA, 511 bp, Homo sapiens
ttgcacttctgcttcctttgaaccaggtggggctgtcaagccctaagaaggcatacactgcattattttctctggcttcaaagaaggcatcatagtccccgcgatactggctttcattgaaaatctgaggtggcagggggtaacctgtggctggtcgactattttcaggtacattttctctcatccacttccgattctcttcatgggctgttatatctttttcttcaaatcctatttggtgggcttctaggaaaccaagcacatctggtggtttcttcttaatcgctgtagagccagaggaagatgcaatatatacacggatcaccatcctgggaacagcggctgcggttgttggggtcctgaaaagggctgtggagcagctgcagcaatggctgggaatccagctaggggctgaaacagcggttggcagagaagggtgcgggaaggtggaaggagaactcgccagagccccgcttccgtctttagcagcttccaccgtgcttatctcaat

SEQ ID NO: 3826 - DNA, 353 bp, Homo sapiens
ttttttttttttttataatctctaactttgtagattatattctgaatctctaaaatggcaagaacaaggtcttggcctttatagtccctcattagttcaaatcttcaggtcggagcttcccctggcagccaagcctcttgtgagcacttgtgaatcctttcattctgagatgctggagtttgagacctgtggactatgaagacagtgcctggggagagaggatgagaaagcaagtgaaagggtgcgaactggaggcaagttcagcagcaaaggagcctggcccccaatggcctctggggtcatcagggtcattgtccagcccaagtcccaggcccagaagaaaatcctgcgta

SEQ ID NO: 3827 - DNA, 1538 bp, Homo sapiens
atggatgggggaaccgggcggcgagacggcggcaggacggcggcaggatgtgtgaccggaatggtggtcggcggcttcgacagtggctgatcgagcagattgacagtagcatgtatccaggactgatttgggagaatgaggagaagagcatgttccggatcccttggaaacacgctggcaagcaagattataatcaggaagtggatgcctccatttttaaggcctgggcagtttttaaagggaagtttaaagaaggggacaaagctgaaccagccacttggaagacgaggttacgctgtgctttgaataagagcccagattttgaggaagtgacggaccggtcccaactggacatttccgagccatacaaagtttaccgaattgttcctgaggaagagcaaaaatgcaaactaggcgtggcaactgctggctgcgtgaatgaagttacagagatggagtgcggtcgctctgaaatcgacgagctgatcaaggagccttctgtggacgattacatggggatgatcaaaaggagcccttccccgccggaggcctgtcggagtcagctccttccagactggtgggcgcagcagcccagcacaggcgtgccgctggtgacggggtacaccacctacgacgcgcaccattcagcattctcccagatggtgatcagcttctactatgggggcaagctggtgggccaggccaccaccacctgccccgagggctgccgcctgtccctgagccagcctgggctgcccggcaccaagctgtatgggcccgagggcctggagctggtgcgcttcccgccggccgacgccatccccagcgagcgacagaggcaggtgacgcggaagctgttcgggcacctggagcgcggggtgctgctgcacagcagccggcagggcgtgttcgtcaagcggctgtgccagggccgcgtgttctgcagcggcaacgccgtggtgtgcaaaggcaggcccaacaagctggagcgtgatgaggtggtccaggtcttcgacaccagccagttcttccgagagctgcagcagttctataacagccagggccggcttcctgacggcagggtggtgctgtgctttggggaagagtttccggatatggcccccttgcgctccaaactcattctcgtgcagattgagcagctgtatgtccggcaactggcagaagaggctgggaagagctgtggagccggctctgtgatgcaggcccccgaggagccgccgccagaccaggtcttccggatgtttccagatatttgtgcctcacaccagagatcatttttcagagaaaaccaacagatcaccgtctaagtgcgtcgcttgggcgccccaccccgtctgcgtcctgcatccatctccctgttacagtggcccgcatcatgattaaagaatgtggatccctctgtctggggtgggatgccttactttgcacttaatttaataagggcattctcggaggagtagacgtttaatacgaagtggcgcatagccctgccgagatgtcggtgatggcctgatgcg

SEQ ID NO: 3828 - protein, 426 aa, Homo sapiens
MCDRNGGRRLRQWLIEQIDSSMYPGLIWENEEKSMFRIPWKHAGKQDYNQEVDASIFKAWAVFKGKFKEGDKAEPATWKTRLRCALNKSPDFEEVTDRSQLDISEPYKVYRIVPEEEQKCKLGVATAGCVNEVTEMECGRSEIDELIKEPSVDDYMGMIKRSPSPPEACRSQLLPDWWAQQPSTGVPLVTGYTTYDAHHSAFSQMVISFYYGGKLVGQATTTCPEGCRLSLSQPGLPGTKLYGPEGLELVRFPPADAIPSERQRQVTRKLFGHLERGVLLHSSRQGVFVKRLCQGRVFCSGNAVVCKGRPNKLERDEVVQVFDTSQFFRELQQFYNSQGRLPDGRVVLCFGEEFPDMAPLRSKLILVQIEQLYVRQLAEEAGKSCGAGSVMQAPEEPPPDQVFRMFPDICASHQRSFFRENQQITV

SEQ ID NO: 3829 - DNA, 328 bp, Homo sapiens
  misc_feature (93)..(93): n is a, c, g, or t
  misc_feature (108)..(108): n is a, c, g, or t
  misc_feature (125)..(125): n is a, c, g, or t
  misc_feature (136)..(136): n is a, c, g, or t
  misc_feature (161)..(161): n is a, c, g, or t
  misc_feature (173)..(173): n is a, c, g, or t
  misc_feature (182)..(182): n is a, c, g, or t
  misc_feature (235)..(235): n is a, c, g, or t
  misc_feature (244)..(244): n is a, c, g, or t
  misc_feature (252)..(252): n is a, c, g, or t
  misc_feature (309)..(309): n is a, c, g, or t
  misc_feature (314)..(314): n is a, c, g, or t
tcaaaggagacccggtctcgaaggctcatggcgatgctggtcctagtacccggacgagttatgcggcctctgggtggccaactttggcgcttnttgcctcgcggactngagttttggggcccagncgaggggactncgagagtcttgctgaggcagttctncgcgcggcaagnaaggcgttngcgtgcctcggggcgccctggctattgcctgggaacccggcccctcagcactncgaggccgncacccccnttgtcgcagaagggccccggagactccacggcgccccttgaagcccggggttaagtncacancttggaacccttct

SEQ ID NO: 3830 - DNA, 489 bp, Homo sapiens
cacaccacctgagtcctttgggatcttcagctcttcgaacttcattttgtcagtgagaggtctgccagaaaaaaaccaccgctgactacctggttccactccctctgctgcatgcaaccgtctcttcatgtggaatactgtgtctgtgctgcgaaccacaagcttgaggtctttgcctgtggaaaggcgcaaacgaagctgacattcatatccagaattgggtggtggctcaggaatatccagagtctctatgtcgctcttttcctctatcatgttgattggcggggccaagcaatacactggaagctgatatctgttccccagttcatcgtagcactctgtaagtgcaccttcagaaagagaagatatgaataagaacttaatccttaatgaatgcatttttgtttatgcctcacaaaatgcttaagcttctcttgctagcatggcactgtagagaaaaaacatcactctcagctgatcatcaatgat

SEQ ID NO: 3831 - DNA, 423 bp, Homo sapiens
  misc_feature (302)..(303): n is a, c, g, or t
gaaaatcctgagcgagcagctctgtactttgtttctggcgtgtgcatcgggctggtgctgaccctggctgctttggtgataaggatctcttgccacacagactgcaggcggcgtcccgggaagaagttcctgcaggacagagagagcagcagcgacacagcgacacatgtgatggcagtgaggacaccgtgtccgatctctccgtgcggagacaccgccgcttcgagaggactttgaacaagaatgtgttcacctctgcggaggagctggagcgcgcccagcggctggaggagcgcgagcanntcatcagggagatctggatgaatggccagcctgttgtgctcgggaccaggagcctgaatcgctactattagggagcagcaggaccccggaaaccactggaggccgcctggaaaggagagc

SEQ ID NO: 3832 - DNA, 493 bp, Homo sapiens
aaaccttacggctaggtacgaggcctgggtgttacagcagccagagagggagtcggtgtggacgcgaggagccgggcgcttagaacagaggcttgcacaggtggagatgtggaagtctgtagtgggccatgatgtgtctgtttccgtggagacccagggtgatgattgggacacagatcctgactttgtgaatgacatctctgaaaaggagcaacgatggggagccaagaccatcgaggggtctggacgcacagaacacatcaacatccaccagctgaggaacaaagtatcagaggagcatgatgttctcaggaagaaagagatggagtcagggcccaaagcatcccatggctatggaggtcggtttggagtagaaagagaccgaatggacaagagtgcagtgggccatgagtatgttgccgaggtggagaagcactcttctcagacggatgctgccaaaggctttgggggcaagtacggagttgagagggac

SEQ ID NO: 3833 - DNA, 736 bp, Homo sapiens
ggctaggtacgaggcctgggtgttgaccctttgcccctgctgcgatgaccctgatcgcccttctgctgttcctgccaccgtctgctgctgctgctggacgtccccacggcggcggtgcaggcgtcccctctgcaagcgttcacgacttctttgggcacatgggccaccagttatagctacaagacaggcaatctatacctgcgggggccccttaagaagtccaatgcaccgcttagtctatgtggaccctcttactatgaagcactgtgcggtggctcgccgcatccttcctgatccgggcagctcttccctaacatggctgttggtctatggagtatcctcatactgtctacgctggctgcccatacggatacacgcagcatggaacaatacagtgtcagatgggcagagtgcgtgcatgcttcaacgcttgcctagcatgcgtagaatgcagtgagtgcaaattcaacaaggtggaggcctgcgtgttggatgaacttgacatggagctagccttcctgaccattgtctgcttggatagcagttttgagcgacatggagagcaagtctgccaatatgcctgctgactctacgccccagggtctgtcgccagaacactatcatggagctgtgcaatggtgggaccgcggtatgacagctcatgtcactgccgaaagcccagcggaccagatgctctccaggctacacacgagtatgtgcccagagtcaccgtcag

SEQ ID NO: 3834 - DNA, 6051 bp, Homo sapiens
gcccctttggcaaaggtcgtaaacattttttttttatttccacaccaatttctgtagattattatgagaattaagggagagaattatatcaagcgcttagcacagtgtctggcatctaggaagaaagtagtaagtgatagcatttatttatttatttattttatttattgagatggagtttcgctcttgttgcccaggcatctaggaagaaagcagtaagtggtagcatttatcaatctatctatctatctatctatctatctattatctatctatctatctatctatctatctatctatctatctatctatctgttgagatggagtttcgctcttgttgcccaggctggagttcagtggcaagatctcgggccgcctcccaggttcaagcaattcagatagttgccgaccgggcgcggtggctcactcctgtaatcccaacactttgggaggccgaggtgggtggatcacctgaggttgggagtttgagaccagcctgaccaacatggagaaaccccatctctactaaaaatacaaaattagtcaggtgtggtggcacatgcctttaatcccagctactcgggaggatgaggcaggagaatcgcttgaacccgggaggcggaggttgcagtgagccgagatcgcgccactgcactccagcctgggcaacagagggagactccgcctcaaaaaaaaaagttgtcgtttgatggctggggggcgggggtgaggggcggggcttatggttctcgcccacgacggcgaggcccaatcagacccgcggagctggtggagttccgccctcgcggaggaggtggtgttccgccctcctagtcgcaccaagcgcggaactggggttgcggcgtctaagtgtttccggtggattcccagggactgtcggaggtgtggactctgcctgcctacctggtctgggaagatgttctaccatgtgagcagggctcagggtggcggcaagggctgggtggaaaggaagagcaaggccaggcgccggcgcgagactccccttgtcgtccaataacctgccagcgcctggctggtcggcatcccacttttctccgcagatctccctagagcacgaaatcctgctgcacccgcgctacttcggccccaacttgctcaacacggtgaagcagaagctcttcaccgaggtggaggggacctgcacagggaagtgagtgtcgagctcaccgcaccgccagatcgttcgatgcgcacacggggcgctatacctgcaacccctccccaactcctactcgtcctgccacccactctggggacccctctcctctctcagggagccagttgcttcctgctttgggttcccagagcgccctctgcaatgctggacaataagacttccttctctcagctgagatgggtcattcattgactccctcaaacattttaaaaacccttggtgtgtgtgccaggacccgtgttgggctcagaacaaggtagaatgggaacaagatagaatgaggacagcccctgtggagctcacagtgtaatcattgttcctgtgtctgctctccctctgtcattctgctggttttctcttatcccctgtgcccagggaccacacaccatgggcctctatatatcttctgaatgaatgaccagaaaaagcagatcgagagtttgggggaggaaggaagtagcctgggatttgaccatctctgggctttgcacagagggggctctctgatattaatgagctgggacccagctcagggcagtggagtacttggccctccagcatcagaaaaacctgcaggaacatgcagattcctgagcctccttattccctacagaatcaagactgtctggggcagacctgagaatctgcattttaagaagatgattctcaggcatcccgaagattgagatctgttgcctcaaggactccagccttcttggacatttattgtgaaattaccagaacagcatttggtcttacacatactgatctctgttctgtcttcttttggtcattaagctctctgggagcagaggtgctatctacttgtccttttgctctccccgaccctacccccaagagctcagcgacttttattgcagatgtctttagaggctcttggacacacagtgtcttcctgtttctcatcctccttgcaggtatggctttgtaattgctgtcaccaccattgacaatattggtgctggtgtgatccagccaggccgaggctttgtcctttatccagttaagtacaaggccattgttttccggccatttaaaggggaggtcgtggatgctgttgtcactcaggtcaacaaggtgagaccatacataggggaggcagtggggtagtctctcggaagatctgggttgggttctggctccacttcataactctgtgcctttggctaagtcacttcacttttttttttttttttttttttttgagaaagttttgctctgttgcccaggctggagtgcagtggtgcgatcttggccactgccacctctgcctcctaggttcaagtgattctcctgcctcggcctcccaagtagttgggactaaaggcacgtgccaccatggccggctattttttttttttttggagacggagtctcgctttgtcacccaggctggtgtgcagtgggcgagatctccactcactgcaagctccgcctcccgggttcacaccattctcctgcctcagcctcccaagtagctgggtctacaggtgcccaccaccacgcccggctaattttttgtatttttagtacagacggggtttcactgtgttagccaggatggtctcgatctcctgacctcgtgatccacccgcctcggcctcccaaagtgctgggattgcaggcttgagccaccgcgcccggcctgcactttcaaattatatggtaatcttgccctgcctaactcagagggcaagagagtcagtattaatagtcataacaataaaagcctgtgttgattgagtagttactatgggctaggtgatgtgcagagactcacaatgactctaaaaggtgggtttttttttttttttgagacggagtctagctctgttgccaggctggagtgcagtggcgcaatctcggctcgctgcaacctccgcctctgggttcaagcgattcccctgcctcagcctcccaactagctgggactataggcatgcgccaccatgcccagctaatttttgtatttttagtagagatggggtttctccatgttggtcaggctggtctcgaactcccgacctcaggtgatctgcctggctcagccacccaaagtgctgggattataggcgtgagccaccgtgcccggccagtgggtgctttttacagaagctgaagcttggaacaaattaagtgtactggccaagatcatgtggccaacaggtgttcaaatcttggactaacacgtcccaggcctaagctctttaatactttaaaatgaaagcttaggctgggcgcggtgactcacatctgtaatcccagcactttgggaggctgaggtgggcagatcacctgagggtgggagttcaagaccagcctggccaatatggtgaaaccccatctctactaaaaatacaaaaattagccaggcattgtggcatgtgcgtgtagtccctgctactcgggaggctgaggcatgagaatcacttgaacctgggaggtggaggttgcagtgagctgagattgcatcactgcactccagagtggagaacagagtgagattctgtctcaaagtaaatatgtaaataaatacaaatgaaagcttaaaaaaaaagagaaaagggctgggtgcgctggctcacacctataatcccagtgctttggggggcagaagtgggaagattgcttgagcctaggagtttgagacagcctgggcaacatatcaagactctgtctctacaaaaagtttttaaaaattagcctagcatggtggtgtgcacctgtggtttcagcaacttgggaggctgaggtgggaggatcgcttgagcccaggagttcaaatttacagtgagctgtgatcgcaccactactttccaacctgggcaacagagtgagaccctgtctcaaaatttaaaaagcaaaaaacaaaaacacaacacttgaggggacaaagaaaaggcaagatcactcttttgttttttttttttgagacagagtcttgctctgttgccaggctgaagtgcaatggtgcaatctcggctcactgcaacctccacctcctgggttcaaacgattctcctgcctcagtctcctgagtagctgggattagaggtgcacgccaccatgcccggctaatttttgtatttttagtagagacggggtttcaccatgttggtcaggctggtctgaaactcctgacctcgtgatccaccggcctcggcctcccaaagtgctgggattacaggcgtgagccaccgtgcacggccgtaagatcactcattttttttctaggttggactcttcacagaaattgggcccatgtcttgcttcatctctcgacatgtaagtctgggcacactgggtggggctgaggaagacagatactcattcatcaccatctattgaagcatccatttaaagtgctaacctagatctcactttcctttcagtccatcccttcagagatggagtttgatcctaactccaacccaccatgttacaagacaatggatgaggtgagtggacagaaagaagtcagggagacaaggagagaatcagccatcctgagggagaatattggcctggggatggctgagtacagatggtccccgaattaccatggcttgattcatgattttatgactttacgatggtgtgaaagtgatgtgcattcaatatgcccccgggcttacagtgaagtgattgtgatgtaacttctcataaactgaggagcatctgtacactgttccctcctctcctcaggatattgtgattcagcaggacgatgagatccgcttaaagattgtggggacccgtgtggacaagaatgacattgtgatcttttccccacctctctacctataccaggttgagctgagaactgtcgatttcttttttctttttttttttttttggagacggagtcttgctctgtcacccaggctggagtgcagaggcgcgatctcggctcactgcaagctctgcctcccgggttcatgacattctcctgcctcagcctcccgagtagctgggactacaggcggccgccaccacacctggctaattttttatatttgttagwacagacagggtttcaccatgttagccaggatggtctcgatctcctgacctaatgatccacccgactcgccctcccaaagtgctgggattacaggtgtgagccaccgcgcctggccgagagctgtcgatttcttaccacccacagtttcagggggttctgtgctcttctcccaggaagaagggatggatgggcagaagccctgggcctccagggtggaggttggttctgtgctcatcttggcttcactttctttttaccatctttcttgcagtttgctattggctccctgatggacgattacttgggtgagtgcctgatcataggtgctggggttattgcctggagaagggatgtgtgggggtggggagtaatataggattcaatgcccaaatcagagagacagaagaaactttcatgctgtctgcttgaaagatccaggacatttgccttgggatgaggagtacatggttgtggctaccctaaattccggttctaactgatatgctttttctggtttcgcagggcttgtaagctgagcctggtggcctcctacccttggtcctactctaggaagtgtgattgtcacacttatcatgttgtccagaggtccagtctggctgctgttgtggaggcaaggaaggcaactcatcccagaaggcatctggtgcttcttgtagcttaactactgcctcctcatttttcagtatgtgttctaagtataaaaagtcctttggttctcatggaagtgttatcttcttttttttttcagaggaggaacaatatctct

SEQ ID NO: 3835 - protein, 172 aa, Homo sapiens
MFYHISLEHEILLHPRYFGPNLLNTVKQKLFTEVEGTCTGKYGFVIAVTTIDNIGAGVIQPGRGFVLYPVKYKAIVFRPFKGEVVDAVVTQVNKVGLFTEIGPMSCFISRHSIPSEMEFDPNSNPPCYKTMDEDIVIQQDDEIRLKIVGTRVDKNDIFAIGSLMDDYLGLVS

SEQ ID NO: 3836 - DNA, 474 bp, Homo sapiens
gaccttcagctcacggctccaggcctgggccagttcttgctgctcctgccgtctcccccgactggctgtgtctgagtaactggaacatgagactgtatctgcaggactggccccatggtggccgagtcagaagtctgtttcctgtgagtcgccaccgttcactcagtcttgccctcccatgctttggagccagtctggtggctcctgtaaggttctcaaggctggtggcagctcagtctggggtcaggacatgtcggggtcatgcgtttctggccctgacataagctgtctggcctctctgtgacatgatgaaattgaaatcaatccacagtccatgaaattgtgacactccaccagattaagttagggcataacattaacttggaaatggccatgtcatcacccctgcggctgtcctatagctgagatgcgtgggtcgcaggggaggtgatttctaggcatattgctgtccct

SEQ ID NO: 3837 - DNA, 581 bp, Homo sapiens
tttggtccaaaccccacctcctccagtgtctacccagcttctgcgggcacctccctgggcatccagccccccacgcctgtgaacagccctggcacggtgtattctggggccttgggacaccaggggctgcaggctccaaggagtcctccagggtccccatgccctgagagaatttctagggaagtcatctcacttggccttctgaaggtcctccctaagagtctcctgacaaaagttacttattgaacacctctatgtgccaggctctgtgttgggtactttgatcaatgcccctgtttcagtctcatctgtactcacggcagccctgtggagtacggtgtactggcccagcttacagatgcagaaagcgagacgttctgccatcagataaagtcacgtggctctttagtaacacggacaaggctcctcgccaaggaactcgtggcagaagagggcagcagttggcagtagctgccgatgtctgtccccagctccaccattcctcctgtggctgtgcgtgctcgtggtttcagtgtccgtgtgtcatgtgtctgcccttcagagctcgcagctggtgtgct

SEQ ID NO: 3838 - DNA, 564 bp, Homo sapiens
gagacaaagtaaacaaatattcaaacccagatttctcatggaatttattatctcaaaaaaaaaaaaaaaacagtggtgctgtgaacatctgtgtttttccagcacacttattaagttatttatatgtaaaaggatagaattaaaactatttggaaggatttataagtatataaaaatgcataaatagttcagtttatattatccaactattatttttaataaagagccactggattttcttcattatatatgttcaaggatatatgtttatccaagtccagggacttaatcaatgttcttaatagctaatgacaacagggtttacttaaatttttttttaaataattaaacaaatatgtagtgatctctttagtttacatacactgtaggtatagcatgaatataatttcatttcagaatatttgaaagcaaatgtatattaagaactattataaatgaaatattaactactgttataaaatgattgcactgaatgaatgtataactacacttcttctctagaaagattaataaaccaatattaataacttctctcttgagatg

SEQ ID NO: 3839 - DNA, 4390 bp, Homo sapiens
cggcgccgggcgaggcggcagggcgaggcagtgccatgctgcctttgtgcaaagttgggcggcgggcggcgcgccgcgcgcaggggccccgcacacccgcgaccgcgcgcagccgtggctgctgctgagtggcgggggcccccccgctccccccggcccttgaaggcggagagagctcgcgtctcgctcggcttcagggtaagtccagctgtgagcagagtgttctgttcttcacttccagcaagccagagtttcataaatggacgctgacatggactacgaaagacccaacgttgaaactatcaaatgtgtggtcgtgggtgacaatgccgtggggaagacgcgcttgatctgtgccagggcgtgcaacaccacactcacgcagtatcagctgctggccacccacgtgccaacagtgtgggcgattgaccagtaccgcgtgtgccaggaggtcttggagcgttctcgggatgttgttgatgaagtgagtgtttctctcaggctttgggatacttttggtgatcatcacaaagacagacgctttgcatatggcaggtctgatgttgtggtcctctgtttttcgattgctaatcccaattccctaaatcatgtgaaaagcatgtggtatccagaaatcaagcacttttgccctcgaacacccgttatccttgttgggtgccagcttgatctccgctatgccgacctggaagctgttaatcgagccaggcgcccgttagcaaggcccataaagagaggggatattttgcccccagaaaaaggccgagaggtagcaaaggaacttggcttaccatactatgaaacaagcgtgtttgaccagtttggtatcaaggatgtgtttgacaatgcaatccgagcagcgctgatttcccgcaggcacctgcaattctggaaatcccacctaaagaaagtccagaaacctttacttcaggcacccttcctacctccaaaagcccctccaccggtcatcaaaattccagagtgtccttccatggggacaaatgaagctgcctgtttactggacaatcctctatgtgccgatgttctgttcatccttcaggaccaggaacacatctttgcacatcgaatttacctcgctacctcttcttccaaattttatgatctgtttttaatggaatgtgaagaatccccaaatgggagtgaaggagcctgtgagaaagagaagcagagcagagatttccaggggcggatattgagtgtcgacccagaggaagaaagggaggagggcccgcctaggattcctcaggccgaccagtggaagtcttcaaacaagagcctggtggaggctctggggctggaagccgagggtgcagttcctgagacacagactttgaccggatggagtaaggggttcattggcatgcacagggaaatgcaagtcaaccccatttcaaagcggatggggcccatgactgtggtcaggatggacgcttcagtccagccaggcccttttcggaccctgctccagtttctttatacgggacaactggatgaaaaggaaaaggatttggtgggcctggctcagatcgcagaggtcctcgagatgttcgatttgaggatgatggtggaaaacatcatgaacaaggaagccttcatgaaccaggagattacgaaagcctttcacgtaaggaaagccaatcggataaaagagtgtctcagcaagggaacgttctcggacgtgacatttaaattggacgatggagccatcagtgcccacaagccgctgctgatctgtagctgtgagtggatggcagccatgttcggggggtcatttgtggaaagtgccaacagtgaggtgtatctcccgaacataaacaagatatcaatgcaagcagtattggattatctctataccaagcagttgtctcctaacttggatctggacccgctggaattaattgccttggcaaacagattttgcctgccacacttggttgcacttgcagaacagcatgccgttcaggagttgaccaaagccgccacgagtggcgtgggcattgacggagaagtgctctcttacttggaattggctcagtttcacaatgcccaccagttggccgcctggtgtttgcaccacatctgcaccaactacaacagtgtatgctccaagttccgtaaggaaatcaaatcaaaatctgcagacaaccaggaatacttcgagcggcaccgctggccccctgtgtggtacctgaaggaagaagatcactaccagcgtgtgaaaagggaacgagagaaggaagatattgcactaaataagcatcgctcaagacgaaagtggtgcttctggaattcatctccagcagtggcctgaagaggaagagaaaaaaaacaaaaaacagaaaccaatcggtaatctgatccaccacttttcaaagcactactataaaattcgtcttgttagagatacgacatagttcaggtttcgggcactgatcttcctccacttttgtgcatttatctttgttaggatcaaagcacaagctcaccatcaatgagcctggacaaaaagggaagctgactctcactgcattccttaaactgatatgtatattttttttgttaggaggcttaataaactttagtctgttattttgtttctttttatacaaagaaaaaaaattcagctttcatgtttctgattccagattggaaaatatttttatatggtctgttgtattttgttgaaatgaaaatactgtgtattactttattttacaggccacaattgattatgaagtcaccctgtgattctctttgcccacatgaccaccgagcattattacgtaattagagggttatccttttgttgtgaaaggaaggaggggactgaaatctcccaaagtgcaaattggagagtgtttaatctttgttctgttgaataacatcggtgtaattacaaagtcaactccaagaatgtgtatttacaatatttgccatgttaagtgctggtaattatatggttatatgtgccatgtaaaatatagtgatatcaaatattctgttgtttccaatgtctagtttcaagaggacaatctttataatcattagaagggcttattaaatcccagcattatccagggcaaactcactggtggacctgaatacataagataccattagtgcgctggtgttcggattgctgtattagggtttacatctctcagtattccttgaacttgccatgcttctgcatgcagattcttcactgacttgaattgagatgggcaagggaaaaggtccctggactccctcctgccatctacaggcttgtcacatctcaccaccagaaacaggcttcctcaggcttctcacctgtggccaacttcactttgtaagacccatatttttaactcttcccagggaaaattcatgttgctgcagaagtaggctaaggcagaccacccacttctgctgaaatgcattgggagcctgtgaaagcacaaagctggaggctgggcgcctgcgttctcctacacggaaaggaatctaattccaagagtctaggaaatggtgctattgtgagttcgttctgactctttctcattctgagttttcagtgttaaactaggaagtgtgacagcaggggagctttcgtgaggcagtcagtcattgcttctctgtaaattaaaatgttacagcacacacatacacacacagagagcatttcaaggccacagctccacacctgccatgggatgttaatgtggcagggggtggggctcattctgttgggaggtcaaattaccaatgccaaggactgttgattttgtttttatttttattttttcttctagcttttcagaagatggaaatgagacagttgagttcaaaccccaatgctgacagccatatgcatttgaaaatctatctagattacagatgggcatttattactggcagtggaaacaccagatagaagatcttaggagaggcccagaaatgcatcaccttgtcatgacaaaagagaaggcagtagagtagggatagttacaaatgcatccatcttaattattttcaataggcttgtaaatcttatcgatggaaggagaaaggagacaagatgtggaagaattgacatgtatcccaccataaaatggtagaagatgagttttcaatgagtagtcatagttgaaattttacaaccaaagctcccatttgattgtaatcttgccaaaatataatggatgtataaatgaacttggggtataagcaataatatccactagtgttgttatcagctactgtaaccaagtggctggttcatttggttgatgctgattatggcctttaaccatggtggtttgttgtgtgttttttatttcacaaaaagccaataaaattgtttagctat

SEQ ID NO: 3840 - protein, 696 aa, Homo sapiens
MDADMDYERPNVETIKCVVVGDNAVGKTRLICARACNTTLTQYQLLATHVPTVWAIDQYRVCQEVLERSRDVVDEVSVSLRLWDTFGDHHKDRRFAYGRSDVVVLCFSIANPNSLNHVKSMWYPEIKHFCPRTPVILVGCQLDLRYADLEAVNRARRPLARPIKRGDILPPEKGREVAKELGLPYYETSVFDQFGIKDVFDNAIRAALISRRHLQFWKSHLKKVQKPLLQAPFLPPKAPPPVIKIPECPSMGTNEAACLLDNPLCADVLFILQDQEHIFAHRIYLATSSSKFYDLFLMECEESPNGSEGACEKEKQSRDFQGRILSVDPEEEREEGPPRIPQADQWKSSNKSLVEALGLEAEGAVPETQTLTGWSKGFIGMHREMQVNPISKRMGPMTVVRMDASVQPGPFRTLLQFLYTGQLDEKEKDLVGLAQIAEVLEMFDLRMMVENIMNKEAFMNQEITKAFHVRKANRIKECLSKGTFSDVTFKLDDGAISAHKPLLICSCEWMAAMFGGSFVESANSEVYLPNINKISMQAVLDYLYTKQLSPNLDLDPLELIALANRFCLPHLVALAEQHAVQELTKAATSGVGIDGEVLSYLELAQFHNAHQLAAWCLHHICTNYNSVCSKFRKEIKSKSADNQEYFERHRWPPVWYLKEEDHYQRVKREREKEDIALNKHRSRRKWCFWNSSPAVA

SEQ ID NO: 3841 - DNA, 358 bp, Homo sapiens
caaacatatatcctggcttcatgaagattatactctagttaacatgagcaacaaaataaaataatcacacaaaatatataggttcaagctgaaatgagtggctgcaccagattctatgagataagaaaggaagaaggacatttttcaccaagttcaaagactgggatacaaaggaatttgtcctgacaaaggcaaaacaaaaacaacaacaaacaaaaaacccaaaagagcaaaatgacagtagaacataacggggccagatcaaaaatgctgacaggttcccaaaagaataaaatgacggtaggacatgacggggccagatccaaaatgctgacaggttcaaacaaaattggaattg

SEQ ID NO: 3842 - DNA, 1789 bp, Homo sapiens
gcgcgctcgtcgccgaggcgagctaagccgccgctcgccatggggagccccgcacatcggcccgcgctgctgctgctgctgccgcctctgctgctgctgctgctgctgcgcgtcccgcccagccgcagcttcccaggatcgggagactcaccactagaagacgatgaagtcgggtattcacaccctagatataaagataccccgtggtgctcccccatcaaggtgaagtatggggatgtgtactgcagggcccctcaaggaggatactacaaaacagccctgggaaccaggtgcgacattcgctgccagaagggctacgagctgcatggctcttccctactgatctgccagtcaaacaaacgatggtctgacaaggtcatctgcaaacaaaagcgatgtcctacccttgccatgccagcaaatggagggtttaagtgtgtagatggtgcctactttaactcccggtgtgagtattattgttcaccaggatacacgttgaaaggggagcggaccgtcacatgtatggacaacaaggcctggagcggccggccagcctcctgtgtggatatggaacctcctagaatcaagtgcccaagtgtgaaggaacgcattgcagaacccaacaaactgacagtccgggtgtcctgggagacacccgaaggaagagacacagcagatggaattcttactgatgtcattctaaaaggcctccccccaggctccaactttccagaaggagaccacaagatccagtacacagtctatgacagagctgagaataagggcacttgcaaatttcgagttaaagtaagagtcaaacgctgtggcaaactcaatgccccagagaatggttacatgaagtgctccagcgacggtgataattatggagccacctgtgagttctcctgcatcggcggctatgagctccagggtagccctgcccgagtatgtcaatccaacctggcttggtctggcacggagcccacctgtgcagccatgaacgtcaatgtgggtgtcagaacggcagctgcacttctggatcagttttatgagaaaaggagactcctcattgtgtccacacccacagcccgaaacctcctttaccggctccagctaggaatgctgcagcaagcacagtgtggccttgatcttcgacacatcaccgtggtggagctggtgggtgtgttcccgactctcattggcaggataggagcaaagattatgcctccagccctagcgctgcagctcaggctgttgctgcgaatcccactctactccttcagtatggtgctagtggataagcatggcatggacaaagagcgctatgtctccctggtgatgcctgtggccctgttcaacctgattgacacttttcccttgagaaaagaagagatggtcctacaagccgaaatgagccagacctgtaacacctgacatgatggttcctctcttggcaattcctcttcattgtctacatagtgacatgcacacgggaaagccttaaaaatatccttgatgtacagattttatttgtaattttaaaagtctattttattatgagctttctttgcacttaaaaattagcatgctgctttttgtacttggaagtgtttcaaaaaattatatgaccatatttactctttctaacctttctttactccatcatggctggttgatttgtagagaaattagaacccataaccatacacaggctatcaacatgttattcaatgtgacacctaactcttttctattttgttttttaagtaagacttttattaataaaacg

SEQ ID NO: 3843 - protein, 464 aa, Homo sapiens
MGSPAHRPALLLLLPPLLLLLLLRVPPSRSFPGSGDSPLEDDEVGYSHPRYKDTPWCSPIKVKYGDVYCRAPQGGYYKTALGTRCDIRCQKGYELHGSSLLICQSNKRWSDKVICKQKRCPTLAMPANGGFKCVDGAYFNSRCEYYCSPGYTLKGERTVTCMDNKAWSGRPASCVDMEPPRIKCPSVKERIAEPNKLTVRVSWETPEGRDTADGILTDVILKGLPPGSNFPEGDHKIQYTVYDRAENKGTCKFRVKVRVKRCGKLNAPENGYMKCSSDGDNYGATCEFSCIGGYELQGSPARVCQSNLAWSGTEPTCAAMNVNVGVRTAAALLDQFYEKRRLLIVSTPTARNLLYRLQLGMLQQAQCGLDLRHITVVELVGVFPTLIGRIGAKIMPPALALQLRLLLRIPLYSFSMVLVDKHGMDKERYVSLVMPVALFNLIDTFPLRKEEMVLQAEMSQTCNT

SEQ ID NO: 3844 - DNA, 534 bp, Homo sapiens
  misc_feature (256)..(256): n is a, c, g, or t
  misc_feature (437)..(437): n is a, c, g, or t
  misc_feature (463)..(463): n is a, c, g, or t
  misc_feature (474)..(474): n is a, c, g, or t
  misc_feature (499)..(499): n is a, c, g, or t
  misc_feature (520)..(520): n is a, c, g, or t
  misc_feature (527)..(527): n is a, c, g, or t
caaaaagccgagtagagaagttatcagctgcatgtttgagcctgaagggaatgcctgcagcttgacggacagtaccgcagaggagcacgtgctggcgctggtggagcacgcagctgacgaagctcgggacaggatcaaccggttcctcccaggcggcaagatgggctatctgaagaggaacggggacgggagcctgctctacagcgtggtcaacacggccgagccgaacgctgatgaggaggagacccacccggtngacttgagctcgctctccagtaagctactcccaggcttcaccacgctgggcttcaaagacgagagaagaaacaaagtcacctttctctccagtgccacttacttgcgcttttcgatgcagaattaattcagtatttgggcgacttgaagttcggacgagatgggagctgctctactcagcntacggagatgagacaggcgtgcagtntgcgttgagcntgcaggagttttttgaaggatgctnggagtacacaagaaagtggtngacgacntctggat

SEQ ID NO: 3845 - DNA, 4412 bp, Homo sapiens
  misc_feature (662)..(662): n is a, c, g, or t
gagggaatgcgcgcagctcacaggccctgggagtgagctggtgcccggcgacctggcacccgcgcctggatatggggcgtctacatcgtcccaggagcagcaccagctacaggaacctgccgcatctgtttctgtttttcctcttcgtgggacccttcagctgcctcgggagttacagccgggccaccgagcttctgtacagcctaaacgagggactacccgcgggggtgctcatcggcagcctggccgaggacctgcggctgctgcccaggtctgcagggaggccggacccgcagtcgcagctgccagagcgcaccggtgctgagtggaacccccctctctccttcagcctggcctcccggggactgagtggccagtacgtgaccctagacaaccgctctggggagctgcacacttcagctcaggagatcgacagggaggccctgtgtgttgaagggggtggagggactgcgtggagcggcagcgtttccatctcctcctctccttctgactcttgtcttttgctgctggatgtgcttgtcctgcctcaggaatacttcaggtttgtgaaggtgaagatcgccatcagagacatcaatgacaacgccccgcagttccctgtttcccagatctcggtgtgggtcccggaaaatgcacctgtnaacacccgactggccatagagcatcctgctgtggacccagatgttggcattaatggggttcagacctatcgcttactggactaccatggtatgttcaccctggacgtggaggagaatgagaatggggagcgcaccccctacctaattgtcatgggtgctttggacagggaaacccaggaccagtatgtgagcatcatcacagctgaggatggtgggtctccaccacttttgggcagtgccactctcaccattggcatcagtgacattaatgacaattgccctctcttcacagactcacaaatcaatgtcactgtgtatgggaatgctacagtgggcaccccaattgcagctgtccaggctgtggataaagacttggggaccaatgctcaaattacttattcttacagtcagaaagttccacaagcatctaaggatttatttcacctggatgaaaacactggagtcattaaacttttcagtaagattggaggaagtgttctggagtcccacaagctcaccatccttgctaatggaccaggctgcatccctgctgtaatcactgctcttgtgtccattattaaagttattttcagaccccctgaaattgtccctcgttacatagcaaacgagatagatggtgttgtttatctgaaagaactggaacccgttaacactcccattgcgtttttcaccataagagatccagaaggtaaatacaaggttaactgctacctggatggtgaagggccgtttaggttatcaccttacaaaccatacaataatgaatatttactagagaccacaaaacctatggactatgagctacagcagttctatgaagtagctgtggtggcttggaactctgagggatttcatgtcaaaagggtcattaaagtgcaacttttagatgacaatgataatgctccaattttccttcaacccttaatagaactaaccatcgaagagaacaactcacccaatgcctttttgactaagctgtatgctacagatgccgacagcgaggagagaggccaagtttcatattttctgggacctgatgctccatcatatttttccttagacagtgtcacaggaattctgacagtttctactcagctggaccgagaagagaaagaaaagtacagatacactgtcagagctgttgactgtgggaagccacccagagaatcagtagccactgtggccctcacagtgttggataaaaatgacaacagtcctcggtttatcaacaaggacttcagcttttttgtgcctgaaaactttccaggctatggtgagattggagtaattagtgtaacagatgctgacgctggacgaaatggatgggtcgccctctctgtggtgaaccagagtgatatttttgtcatagatacaggaaagggtatgctgagggctaaagtctctttggacagagagcagcaaagctcctatactttgtgggttgaagctgttgatgggggtgagcctgccctctcctctacagcaaaaatcacaattctccttctagatatcaatgacaaccctcctcttgttttgtttcctcagtctaatatgtcttatctgttagtactgccttctactctgccaggctccccggttacagaagtctatgctgtcgacaaagacacaggcatgaatgctgtcatagcttacagcatcatagggagaagaggtcctaggcctgagtccttcaggattgaccctaaaactggcaacattactttggaagaggcattgctgcagacagattatgggctccatcgcttactggtgaaagtgagtgatcatggttatcccgagcctctccactccacagtcatggtgaacctatttgtcaatgacactgtcagtaatgagagttacattgagagtcttttaagaaaagaaccagagattaatatagaggagaaagaaccacaaatctcaatagaaccgactcataggaaggtagaatctgtgtcttgtatgcccaccttagtagctctgtctgtaataagcttgggttccatcacactggtcacagggatgggcatatacatctgtttaaggaaaggggaaaagcatcccagggaagatgaaaatttggaagtacagattccactgaaaggaaaaattgacttgcatatgcgagagagaaagccaatggatatttctaatatttgatatttcatggtggaataacacagagaaatgttttaactgactttggatcttcatcacctaaaaaagagtgtgttgatggcagttccaatgaaggacaactaatttataacttgttctatattgtaaatagctgtttacaggtttttaaatttaaattcagaggttataaaatgtgtacagcatttttaagtgaaaattagtactaacagctataggacttgtatttaaaaaaaaaaaaaaaaaaagcttggacatggtttgcagctttcatacaccaagcagttgattgataaaacctgggagtaaggtaagaaaaatggaacaaatttttatctaaaaattcctgtcaccacaagagggcatcagctgctcctttgcaggaaactggggtattgtacttggcagttgtacatgaaattaatgaaagagtatattttaaatatattgtttttaacattaaacaaatatgaaattaaagtaaattaaatttcaccctatttaaacatatgataaaaaaagaaatgcacttgtaaacagaatgtttattacctcataagtgcatatatagtttgaaagagaaggcattaaaaagaagtgcgattcctttttagcaaggataaaatcattgccttgtgttacagattcagcctgctgaagagtattccactttctgtgtactcgaattgctttctgtttgctttaccactgcacttgttattattacaagggaaatagatatatacatacatatatatattcttcattacaggaaatgtaactagatattgtgcccaagaaaaacagccagaagcaaagaaatgcttcaatctttagttgcttcataggcattcatgacattttagtgctttcacaacttgttggtcgtactttatacttgggttatatattagacttttataggcttgaaatcatccatcacataagaaaatagaaatcatattaaaagtgaattcttctagaggcttgtgtacactactggttgttttagttgggccttttatatgaaagttatactgtacttatctttttgttgttgtttaggtttgttgactaccatttctggcttcctttctttggttttggattaaatccaacagtttatttgtaagccctgcagcagatttctttgataatttagcttttactgaatctcttgcaatgaagaaagctatttcatcagtgatttatcactttcaattcattgtgtgagctggaaatattattttatatgagagctatagcaaaataatctgtataaacaaggaatgtgttagcttaaactggatcattttactttttggcatcatgcatctgtactgtaccaaaagtgtttatatgtctgcaaattaaaggtatatattttcataatttctttctcacttttagcattttatatttgaacatgggcttgttatttcactgaagtgcctgtcatttgtttgtttttagggttaaatgtgggtaacctgtagtattctgctatactaaagtttatattaaatgaattcattactcaaaaagaaaatgggtaaattattaaaaaaa

SEQ ID NO: 3846 - protein, 947 aa, Homo sapiens
GNARSSQALGVSWCPATWHPRLDMGRLHRPRSSTSYRNLPHLFLFFLFVGPFSCLGSYSRATELLYSLNEGLPAGVLIGSLAEDLRLLPRSAGRPDPQSQLPERTGAEWNPPLSFSLASRGLSGQYVTLDNRSGELHTSAQEIDREALCVEGGGGTAWSGSVSISSSPSDSCLLLLDVLVLPQEYFRFVKVKIAIRDINDNAPQFPVSQISVWVPENAPVNTRLAIEHPAVDPDVGINGVQTYRLLDYHGMFTLDVEENENGERTPYLIVMGALDRETQDQYVSIITAEDGGSPPLLGSATLTIGISDINDNCPLFTDSQINVTVYGNATVGTPIAAVQAVDKDLGTNAQITYSYSQKVPQASKDLFHLDENTGVIKLFSKIGGSVLESHKLTILANGPGCIPAVITALVSIIKVIFRPPEIVPRYIANEIDGVVYLKELEPVNTPIAFFTIRDPEGKYKVNCYLDGEGPFRLSPYKPYNNEYLLETTKPMDYELQQFYEVAVVAWNSEGFHVKRVIKVQLLDDNDNAPIFLQPLIELTIEENNSPNAFLTKLYATDADSEERGQVSYFLGPDAPSYFSLDSVTGILTVSTQLDREEKEKYRYTVRAVDCGKPPRESVATVALTVLDKNDNSPRFINKDFSFFVPENFPGYGEIGVISVTDADAGRNGWVALSVVNQSDIFVIDTGKGMLRAKVSLDREQQSSYTLWVEAVDGGEPALSSTAKITILLLDINDNPPLVLFPQSNMSYLLVLPSTLPGSPVTEVYAVDKDTGMNAVIAYSIIGRRGPRPESFRIDPKTGNITLEEALLQTDYGLHRLLVKVSDHGYPEPLHSTVMVNLFVNDTVSNESYIESLLRKEPEINIEEKEPQISIEPTHRKVESVSCMPTLVALSVISLGSITLVTGMGIYICLRKGEKHPREDENLEVQIPLKGKIDLHMRERKPMDISNI

SEQ ID NO: 3847 - DNA, 305 bp, Homo sapiens
  misc_feature (34)..(34): n is a, c, g, or t
  misc_feature (86)..(86): n is a, c, g, or t
  misc_feature (103)..(103): n is a, c, g, or t
  misc_feature (112)..(112): n is a, c, g, or t
  misc_feature (229)..(229): n is a, c, g, or t
  misc_feature (300)..(300): n is a, c, g, or t
agccttcttgggtgtctccatggtgaaggggaanaccaatgagtggaacaagaatgatgaccggctactgcaggccgtggagaatngagatgcggagaaggtngcctcactnctcggcaagaagggggccagtgccaccaaacacgacagtaagggcaagaccgctttccatcttgctgctgcaaaaggacacgtggaatgcctcagggtcatgattacacatggtgtngatgtgacagcccaagatactaccggtacacagcgccttacatctcgcagccaagaacagccaccattgantgcat

SEQ ID NO: 3848 - DNA, 453 bp, Homo sapiens
  misc_feature (226)..(226): n is a, c, g, or t
  misc_feature (284)..(284): n is a, c, g, or t
  misc_feature (359)..(359): n is a, c, g, or t
gcaaaacaaatacaaaatggaaagaaactataaatgtactagaaaaaaattggagaatttttaaaattatcatgtaatagggaaggtctatctcaggggaagaaagaaaaaaagaaatccagaggctatgaagataaaactttatacatttaactaagttaaaatttacattttcttcaaggcaaaaaccatacaagtagataaatgagcaaatgacacaaaaganttcacagaagaagacatgtaaaagacttttgagcatgaagagatgcttagtcaagganagcaaattcaaacagcaatgtaacctccttattaccttattaacctgcttattacagagagcgagactgtgatancagactgtaggtctgtgctgcctgctgcagtggcatctccccatgctcttgggtgctcccattacacggccgggggcctttccggggtgcccag

SEQ ID NO: 3849 - DNA, 791 bp, Homo sapiens
ggggcccgcgttggtgcctcctgaggcggccccctggatgaacgagatctgtggaaccctgggagccttgaggtaaccgaagcagctcggttgcgccagggcctgagctgctgctgtgacggcctctgctaatattcgattttagacacgagcatactatctgcagttgatgacccgggcttgactggtgcatacagctggacgccccctgagaatctcgcagacttttgtggctgccgtctatcaccaatcaaccttcatatctcgctctacatggtaatgctggtttgcacgactggtgatacgacaaagacccgcaagctgagcagggccttcgcgatcgcccctatcctgtgtcctgtctagctctctagagtcactcaccattctctgtctctctgagagcttccgtgcttgctcgacagctgcttcaccgcagcgccatgctgagccagcccaggctggatgagcctggacacccccggcggcctacatgcctgggcctcgcgctcctgggtactgggcgtcgtgctcgtgctcttccagcttctttgccctgtgggttcgctcggaactttcctagggttattacttcgggatcctcaaggaggcgagagtgacccgtgttccccttcaacatcctggacaaccccatgtactggggaagcacagcaactacctgggcttgggccatcatgcacgccagcccacgggcctgctctgacggtgctggtggcctcacctcataatggtctcctattagaagagccttacggtgagattaccgcgaa

SEQ ID NO: 3850 - DNA, 1211 bp, Homo sapiens
ggccccccccccccctagaaatgctcgaaccaggacggctcctggagtcctcgcgccctcgcagaaggactacgggccccggcgaccccgggggcggggcttccggcgcgctgccttgtgggcacggtagttccgccgggtctggcttccgcctgccgagcggccccggaccgcaggccggactacacttcccgtcggcccgcctgctctcccgatgccgccttggcgcgagacgttggcaagcagagtgtctccaagatggccgcttggggaaggaggcgtcttggcccgggcagcagtggcggcagcgcccgagagagggtgagcttgtcggccacagactgctacattgtgcatgagatctacaatggggagaatgcccaagaccagtttgagtacgagctggagcaggccctggaagcccagtacaagtacattgtgattgagcccactcgcattggcgacgagacagcccgctggatcaccgtgggcaactgcctgcacaagacggccgtgctggcgggcaccgcctgcctcttcaccccgttggcgctgcccttagattattcccactacatttccctgcccgctggtgtgctgagcctggcctgctgcaccctctatgggatctcctggcagtttgacccttgctgcaagtaccaagtggagtacgacgcctataaactgtcgcgcctgcctctgcacacactcacctcctccaccccggtggtgctggtccggaaggacgacctgcacagaaagagactgcacaacacgatagcactggccgccctggtgtactgtgtaaagaagatttacgaactctatgccgtatgatttcagtagaacagggagcgaagcaaaaccacccggcccacaagagacaacagagtattcagatcgccacactctgtgaggcagcagagcctgggcaggtgtttggcttagtatttgttatttttaaaaaataacagatcacgggtgtacccagggtttttcagctcattacactaagatgtggatttccataacccaagaggggggtctgaggctgtggaagtccgactgggcagtggaatgctgatggaggcagacgctgccgagggggtgtggacgtgctttgggggaggtctttaagtctattgtttaactgtaccatccagagcccaccagaagctattgatcattaaaattatgagaatttcaactcc

SEQ ID NO: 3851 - protein, 192 aa, Homo sapiens
MAAWGRRRLGPGSSGGSARERVSLSATDCYIVHEIYNGENAQDQFEYELEQALEAQYKYIVIEPTRIGDETARWITVGNCLHKTAVLAGTACLFTPLALPLDYSHYISLPAGVLSLACCTLYGISWQFDPCCKYQVEYDAYKLSRLPLHTLTSSTPVVLVRKDDLHRKRLHNTIALAALVYCVKKIYELYAV

SEQ ID NO: 3852 - DNA, 716 bp, Homo sapiens
agacagcctgggagggagaaggagttggagctcaagttggagacagcgaggagaaacctgccatagccagggtgtgtctttgatcctcttcaggaggtgaggacaagccagaggtccttggtgtgccctcagaaatctgcctgcagttctcaccaagccgctgtgaaaatggggataaacacccgggagctgtttctcaacttcactattgtcttgattacggttattcttatgtggctccttgtgaggtcctatcagtactgagaggccatgccatggtcctgggattgactgagatgctccggagctgcctgctctatgccctgagaccccactgctgtcattgtcacaggatgccattctccatccgagggcacctgtgacctgcactcacaatatctgctatgctgtagtgctaggattgattatgtgttctccaaagatgctgctcccaagggctgccaagtgtttgccagggaacggtagatttattccccaactcttaactgaaaatgtgttagacaagccacaaagttaaaattaaactggattcatgatgatgtaggattgttacaagcccctgatctgtctcaccacacatcccttcaacccacacggtctgcaaccaaactctaattcaacctgccagaaggaatgttagaggaagtctttgtcagcccttatagctatcatgtgaataaagttaagtcaacttc

SEQ ID NO: 3853 - protein, 31 aa, Homo sapiens
MGINTRELFLNFTIVLITVILMWLLVRSYQY

SEQ ID NO: 3854 - DNA, 507 bp, Homo sapiens
cgccctttttttttttttttaatggataagaaatacatttattgatatggaaagttgtttgccatattatcaagttgttttaaaggcacagagcatatcacaaaacagtatgtgttgtgtgatcctatttgcatataaaagcaaaataagtaaatacacacataaatatatatacacatacataaacatacattatatttctctccacatacatataaatatgtatacacacatatatatgtatatctactcacgtatatatataactgaacacagtcaagtgtctcttaacaagggagaaatgttctgagaaatgcattgttacgtgatttcattgttgtgttcatcatagagtgtacagttaacccttgaacactgaaggggctaggggctccaatcccccatgaaaatacacatctaagttttgacttccccaaaaccttagctactaatagcctactgttgaccagaagccttaccaataacaatcaattaacacatatgttg

SEQ ID NO: 3855 - DNA, 455 bp, Homo sapiens
tttttttttttttttttagaaagaagttgtttaccactttttttgggctggccaacatttggtcacatagatcatcttgaaatctaattgttttcatggccttcctatctcacaagaggagacctgaatactcttggaaaaagcaaaccaaacatagaaagagatgccatgataagacttgttgctacagcactatgtagttaacgatgccagactttggatttaatcagaggacatttctgcagtctaggacagctatacaaagccttaagacattgtatttacaggacttattcatgtagggatccatatcctacccataactctgccagagtcttaatagcatggtggagtggctcccttaagaatcctcattttcttctaagtggaaaagctagtagttctaaaaatattttcctggaagaggttagaacggttattatatatcaattgaa

SEQ ID NO: 3856 - DNA, 259 bp, Homo sapiens
ttttttttttttttttctggtctcaactcccgatttttactttggaggggcgaaggcaggcctacccttgccagccaccatttttcaatcacgtcgcggctggggaaaagcagccgtcctgtcccttcaaaaaggaactcgtatttccccctcgaacttttctcgtcggggtgagagaagggccctccattttctcctcaggaagctttcgcggcccgacttcctttcaccaccaggccaggaaaggcaatgacgccgc

SEQ ID NO: 3857 - DNA, 358 bp, Homo sapiens
  misc_feature (29)..(29): n is a, c, g, or t
  misc_feature (48)..(48): n is a, c, g, or t
  misc_feature (67)..(67): n is a, c, g, or t
  misc_feature (86)..(86): n is a, c, g, or t
  misc_feature (105)..(105): n is a, c, g, or t
  misc_feature (124)..(124): n is a, c, g, or t
  misc_feature (182)..(182): n is a, c, g, or t
  misc_feature (340)..(340): n is a, c, g, or t
ttttactgaccttgctagaagtttacagncaaggaagtgcaggaacanctcacaaatctacaatctncgagtatcacatcctgtancgctgtaaacactggaatncggaagggctgatgacttncagaagatgaaggtaagtacaaaccgttgatgggactgcgaaaccagagttaaaaccnctttggagcttctgaggactcagctggaaccaacgggcacagttggcaacaccatcatgacatcacaacctgttcccaatgagaccatcatagtgctcccatcaaatgtcattcaacttctcccaagcagagaaacccggaacccaccaaccaggggncaggatagcttgaagaaa

SEQ ID NO: 3858 - DNA, 782 bp, Homo sapiens
  misc_feature (302)..(302): n is a, c, g, or t
  misc_feature (696)..(697): n is a, c, g, or t
  misc_feature (753)..(753): n is a, c, g, or t
gctcatcctagtaaatagaaaagccaggattcaactccaggggctgggtgcagaactgctattcttcactgcttcaccaatcagcagctacccaaggcagaaaactttttcatccttggctccttcattctccctgtcaccccagatcccctctacatctagtcagagaataggtcctgtcaattccaacttctctatatggctcctctcaggcatgtgcccttaattggcctaattctctaatacaccttccctctacatgctcactccctcagatcattgctttatcacgtgttacctgngttgctattacataaagagcaatctttctaaaatgaggatcttatcacttcacttccacactaaaatgtttttcctggggaaccacactccttagcaatctgacccatcagaccttccaggctgtctcctgcctgctccctaaggctccagccacacagaattatcatgggcccacacacccaccaaatcctcccatgcctttgcccatgttgtctgggatgcccttctctcccttctgtctacatcaagcatcagactgaatatccctcttgtgcggccttctaaacctcccgtccaagcgaaaatattgccctctattatacttttacagcatttggacacagtacagagtagtagcttttatcacattctctgataatatatagatatggnnattctagctctctctccactgggctataagttgcttttggctgagggctaatttgngttttggggctgagggccctagttctaaa

SEQ ID NO: 3859 - DNA, 383 bp, Homo sapiens
tttaattaatgtgcaattagtcatggactgatagttttgtaaaaagtgaattcctgggaaaacaagattagaaagcaaagacagacaaaattcttttattattagatttaacagacatagcattactctgctggtttgctataaaagcttctgaatgcttctctcggtctctcttactcatatcttcatagacttgtaatagtttgcacatgggcacctgttccagaacacagattgagtggcactggaatgcccacgcactcagcacccagctgcaatgatttgcaactccttagctaattttggatgatctgtgcccccaccacttcccctttctcctatatcattttgaagcaaactccagattcatatcattttatctg

SEQ ID NO: 3860 - DNA, 300 bp, Homo sapiens
aggctggcgggcgcggggaaaatggcggcggcggcggtggcggctgcatttaccaacgggaccggaggaagcagcgtgatggaggtggatgcagcagtaattcctatcgtgatggcctgcggagtgactgggagtgtttccgttctctccatccccttgtcattctcaacatctcagaccactggatccgcatgcgctcccatgaggggcggcctgtgcaggtgattggggctctgattggcaagcaggagggcccaaatatccaggtgatgaactcctttgagctgctgtcccacaccg

SEQ ID NO: 3861 - DNA, 158 bp, Homo sapiens
ggttccgagggaccagtggaggcatagcacagcatcgtcgggaccagactcgtctcaggccagttgcagccttctcagccaaacgctgtccaatttaaactcactaccatgagaattgcagtgatttgcttttgcctcctaggcatcacctgtgccat

SEQ ID NO: 3862 - DNA, 458 bp, Homo sapiens
gcggccgcaagccgtcgccccctttaagagcctgctccgcgggactaacgttcgaacgggccctggcgcccctcctcgggctccgattggccgtgcgcggcgcacgagggcgcgccggccagccccggaacggttggcggcccttcgtgattggcggtcgagaagcctatataaggcgcggggcagccaggctgccctgtttagcgaccggacccgaaacggggaagttgtcttgtttggagaggttagtagagcagcgcgcgcgtcaccagagtcgtttctcttcggagtcttaggtgatcgagggtgtgcccagggggcggacttgtttgcgcctcccgttccctcccaatttccaaacgtgtcaccccggcgccgacggccctgtgcaggggaagcagatggagttcaagctggaggctcatcgcatcgtcagcatctctctgggcaagatctac

SEQ ID NO: 3863 - DNA, 575 bp, Homo sapiens
cccggcattgtttcctgcacttcttagtatatgcccagaatattctggaaaggctcttcctgacggatatggaggcagcacaacacagcaagaacgggctctgggagccgtggtcctagtcctggttttcatgaactttggtgagatcttaggccagtgggtttagcctctcggtacttcatatttttacttctaaagtgtatttagtaccttccctacctggtagggctcagatatgataagaatgtggaaaccattttgacaagtacatagcagtgtataaacataaagcattacttttataattggatgttgtaaatgttaattttgacattaagaagaagtaaacaagactaatattgagattgatcgccttagcaacttccttttaaaacgacaatgtcaacgagagtctaaatttgtatgtctttccagctaagtttctcacctacatacgaagtgcaggaatgtgtatatgtgtgtgtgtgtatgtgtgtgtgtgtgtatatatggagagagggagaaagacgcagtcttgctctgttgcccaggctgaagtgcaggacacacgaccc

SEQ ID NO: 3864 - DNA, 374 bp, Homo sapiens
ttttttttgtgttgaatgaaatattgcattttatttatttcacattattcaaaagagcggttttcagcatagcttcccatattactgctggtgctttaaattaagaacagtgaggatataaaagtctttttcctaatggtaatatatactgaaaggaagtgaagttgaaaggcagaatgcatttaaatatggttagcgtttgtgtgtgtaatctactgaaaaatatactgaaatttcacttgtaattgcaatctctcctataaaggaaaatgtgcctgttgaaagaggtaatatattctatttaatgtggtactcatttgagaattcaaatatctgaattttagtcacttttcagttacttaactttcccagtg

SEQ ID NO: 3865 - DNA, 429 bp, Homo sapiens
tatacggctgctagaagacgacagaagggttcacgtcaccttgatgaggggactcgaaggtgaatttgcactgggttccctttcagccaagcatcagtttgctccaacctcttgagcacacagaagttgagaaaaattgttattttagcaagaacactagaggactgtgctgttctctgaaccacgttcatctgattatgcatttgaggttatgaattaatccacgacacaggaacactgaataagttgtgctttgccagtcgggctgcctgtgttttatctgaacaaaacatctgactttaaccccaggcagatttctcttcaggttgtaattattctggaacaaacagagaagttgggaaggggcatcccagtggggacaatgatacctcctgtgtggaaggattcccactggaaattttcaaaaca

SEQ ID NO: 3866 - DNA, 1812 bp, Homo sapiens
gtgggtaggagcttgcttatagaaaagtggaatcgagtagtccttgctggtggagccgctgccgccagggaactcagggccggctcctgttccttcaagagtgctggaggccaaacttgaaatacaagtttaatgttcctcgtcgggcaaaagataaggatccgatctcccccggcccggtgtgcagcaggagcgaccaaccccgacccgggttaaaactcccagggactcttcgctgctgccacctcttgttctctcccccgttcccactcggggtctccctcagggccgggaggcacagcggtccctgcttgctgaggggctggatgtacgcatccgcaggttcccgcggacttgggggcgcccgctgagccccggcgcccgcagaagacttgtgtttgcctcctgcagcctcaacccggagggcagcgagggcctaccaccatgatcactggtgtgttcagcatgcgcttgtggaccccagtgggcgtcctgacctcgctggcgtactgcctgcaccagcggcgggtggccctggccgagctgcaggaggccgatggccagtgtccggtcgaccgcagcctgctgaagttgaaaatggtgcaggtcgtgtttcgacacggggctcggagtcctctcaagccgctcccgctggaggagcaggtagagtggaacccccagctattagaggtcccaccccaaactcagtttgattacacagtcaccaatctagctggtggtccgaaaccatattctccttacgactctcaataccatgagaccaccctgaaggggggcatgtttgctgggcagctgaccaaggtgggcatgcagcaaatgtttgccttgggagagagactgaggaagaactatgtggaagacattccctttctttcaccaaccttcaacccacaggaggtctttattcgttccactaacatttttcggaatctggagtccacccgttgtttgctggctgggcttttccagtgtcagaaagaaggacccatcatcatccacactgatgaagcagattcagaagtcttgtatcccaactaccaaagctgctggagcctgaggcagagaaccagaggccggaggcagactgcctctttacagccaggaatctcagaggatttgaaaaaggtgaaggacaggatgggcattgacagtagtgataaagtggacttcttcatcctcctggacaacgtggctgccgagcaggcacacaacctcccaagctgccccatgctgaagagatttgcacggatgatcgaacagagagctgtggacacatccttgtacatactgcccaaggaagacagggaaagtcttcagatggcagtaggcccattcctccacatcctagagagcaacctgctgaaagccatggactctgccactgcccccgacaagatcagaaagctgtatctctatgcggctcatgatgtgaccttcataccgctcttaatgaccctggggatttttgaccacaaatggccaccgtttgctgttgacctgaccatggaactttaccagcacctggaatctaaggagtggtttgtgcagctctattaccacgggaaggagcaggtgccgagaggttgccctgatgggctctgcccgctggacatgttcttgaatgccatgtcagtttataccttaagcccagaaaaataccatgcactctgctctcaaactcaggtgatggaagttggaaatgaagagtaactgatttataaaagcaggatgtgttgattttaaaataaagtgcctttatacaatgccaaaaaaaaaaaaaaaaaaaaaaaa

SEQ ID NO: 3867 - protein, 428 aa, Homo sapiens
MITGVFSMRLWTPVGVLTSLAYCLHQRRVALAELQEADGQCPVDRSLLKLKMVQVVFRHGARSPLKPLPLEEQVEWNPQLLEVPPQTQFDYTVTNLAGGPKPYSPYDSQYHETTLKGGMFAGQLTKVGMQQMFALGERLRKNYVEDIPFLSPTFNPQEVFIRSTNIFRNLESTRCLLAGLFQCQKEGPIIIHTDEADSEVLYPNYQSCWSLRQRTRGRRQTASLQPGISEDLKKVKDRMGIDSSDKVDFFILLDNVAAEQAHNLPSCPMLKRFARMIEQRAVDTSLYILPKEDRESLQMAVGPFLHILESNLLKAMDSATAPDKIRKLYLYAAHDVTFIPLLMTLGIFDHKWPPFAVDLTMELYQHLESKEWFVQLYYHGKEQVPRGCPDGLCPLDMFLNAMSVYTLSPEKYHALCSQTQVMEVGNEE

SEQ ID NO: 3868 - DNA, 365 bp, Homo sapiens
ttttttttttttttttttttttttttttttttttttttttttttttgaaaagcaaccatttattagaaccaatacaagagtatgaaaagggggaaacgaggagggtagaagacggggagagaatgaggtctgcatcagatgtcagttatggaaacacataaatgcttactttttaaacatttacatttaaaaggtgaacatatatatagaccacttatactttaaaaaaaaaatcaaaagcagacatgtttggctgaaataaaaccaagaaacacagctaaaactcccccataaacctaaaagtccatggagaattcaatttctcatttccattcagaaatctggctacaaagtgatttgtttgc

SEQ ID NO: 3869 - DNA, 501 bp, Homo sapiens
  misc_feature (315)..(315): n is a, c, g, or t
  misc_feature (397)..(397): n is a, c, g, or t
  misc_feature (476)..(476): n is a, c, g, or t
gctgctctgtgtcagccccgtcaccgccgggcggcccgcgcggagtctgagggagatggaagttgagcaagagcagcggcgcagaaaggtggaggccgggaggacgaagcttgctcacttccgacagagaaaaacaaaaggtgacagttcgcattcggagaaaaagacggcgaagaggaaggctcggctgtcgatgcgtctgtccaggaggagagtccggtaaccaaggaggacagcgcactctgtggaggaggggacatttgcaaaagcacatcatgtgacgacacccctgatggggcaggaggggcctttgcngctcagccggaggactgtgatggagagaagagagaggacttggaacagctgcagcagaaacaagtcaatgaccatcctccanagcagtgtggggatgttcacagtcagtgaccacccaccagaacagcatgggatgttcacagtcggtgaccacccaccanaacagcgtggggatgtcccagtcag

SEQ ID NO: 3870 - DNA, 461 bp, Homo sapiens
agcacctgggagaaggcagaccgtgtgagggggcctgtcgagcgtgctgtggcctcggggagtgggaagtggaggcaggagccttccttacacttcgccatgagtttcctcatcgactccagcatcatgattacctcccagatactattttttggatttgggtggcttttcttcatgcgccaattgtttaaagactatgagatacgtcagtatgttgtacaggtgatcttctccgtgacgtttgcattttcttgcaccatgtttgagctcatcatctttgaaatcttaggagtattgaatagcagctcccgttattttcactggaaaatgaacctgtgtgtaattctgctgatcctggttttcatggtgcctttttacattggctattttattgtgagcaatatccgactactgcataaacaacgactgcttttttcctgtctcttatggctgacctttaa

SEQ ID NO: 3871 - DNA, 296 bp, Homo sapiens
ttttttttttttttttttttttgatatattgtaaccattttattaaaaagaagcaatgggataaatcctttaacaggggaaaagatatatataccgatagaatatgtacaaacactttggtgcagtataatgcctgaataaaacaaataatgtgttatattacttgcacagacacacatgtgaaaacacattatcattgattgacagaagagcacacagccaagtacctcgtttctggcttaaatgcatagaaatgttctcatgtacaacgaattattcacaactcaaggacatca

SEQ ID NO: 3872 - DNA, 260 bp, Homo sapiens
ttttgctaggaatagccacactgattgttcatttgtttaatttttaaaaatgagtaagcagacaatcttgcaccctttgaatgcccaataaaaatgttcattatgcaaaacagtacaacctttttcattttttaataatactgtaaatatctcagaaaggatgtattgtttctaatgaatatcaaaaaagtcatcacaatgacatgttcccctgcccccacattgccctccccacccccaaagttacccaaatactagta

SEQ ID NO: 3873 - DNA, 381 bp, Homo sapiens
  misc_feature (344)..(344): n is a, c, g, or t
tattggttggacgacagttggggggtgaacatggcgtcctcgacttggtctgagacgtgataggcctgccttctggttgaagatgtggcgagtgaaaaaactgagcctcagcctgtcgccttcgccccagacgggaaaaccatctatgagaactcctctccgtgaacttaccctgcagcccggtgccctcaccaactctggaaaaagatcccccgcttgctcctcgctgaccccatcactgtgcaagctggggctgcaggaaggcagcaacaactcatctccagtggattttgtaaataacaagaggacagacttatcttcagaacatttcagtcattcctcanagtggctagaaacttgtcagcatgaatcagatgagca

SEQ ID NO: 3874 - DNA, 177 bp, Homo sapiens
agtgacggatgttgtgctcttggtgaatggggttcttcctttttttatttaccggtggctgtgcttccaatttaggaagacctcggcgacctgttcctcacccccgcttcgccctgacactttcgggatgtctgcgattcctgctgaggagagcgaccagctgctgatccgacccct

SEQ ID NO: 3875 - DNA, 2963 bp, Homo sapiens
ggtctggatccagctgctgttccaggagagcaaccctggggtgcactacgagtacaccatccacagggaggcaggtggccacgacgaggtcccgccgcccgtgttctcctggcattatgggccctggaccaagtgcacagtcacctgcggcagaggtgtgcagaggcagaatgtgtactgcttggagcggcaggcagggcccgtggacgaggagcactgtgaccccctgggccggcctgatgaccaacagaggaagtgcagcgagcagccctgccctgccaggtggtgggcaggtgagtggcagctgtgctccagctcctgcgggcctgggggcctctcccgccgggccgtgctctgcatccgcagcgtggggctggatgagcagagcgccctggagccacccgcctgtgaacaccttccccggccccctactgaaaccccttgcaaccgccatgtaccctgtccggccacctgggctgtggggaactggtctcagtgctcagtgacatgtggggagggcactcagcgccgaaatgtcctctgcaccaatgacaccggtgtcccctgtgacgaggcccagcagccagccagcgaagtcacctgctctctgccactctgtcggtggcccctgggcacactgggccctgaaggctcaggcagcggctcctccagccacgagctcttcaacgaggctgacttcatcccgcaccacctggccccacgcccttcacccgcctcatcacccaagccaggcaccatgggcaacgccattgaggaggaggctccagagctggacctgccggggcccgtgtttgtggacgacttctactacgactacaatttcatcaatttccacgaggatctgtcctacgggccctctgaggagcccgatctagacctggcggggacaggggaccggacacccccaccacacagccgtcctgctgcgccctccacgggtagccctgtgcctgccacagagcctcctgcagccaaggaggagggggtactgggaccttggtccccgagcccttggcctagccaggccggccgctccccacccccaccctcagagcagacccctgggaaccctttgatcaatttcctgcctgaggaagacacccccataggggccccagatcttgggctccccagcctgtcctggcccagggtttccactgatggcctgcagacacctgccacccctgagagccaaaatgatttcccagttggcaaggacagccagagccagctgccccctccatggcgggacaggaccaatgaggttttcaaggatgatgaggaacccaagggccgcggagcaccccacctgcccccgagacccagctccacgctgccccctttgtcccctgttggcagcacccactcctctcctagtcctgacgtggcggagctgtggacaggaggcacagtggcctgggagccagctctggagggtggcctggggcctgtggacagtgaactgtggcccactgttggggtggcttctctccttcctcctcccatagcccctctgccagagatgaaggtcagggacagttccctggagccggggactccctccttcccagccccaggaccaggctcatgggacctgcagactgtggcagtgtgggggaccttcctccccacaaccctgactggcctcgggcacatgcctgagcctgccctgaacccaggacccaagggtcagcctgagtccctcagccctgaggtgcccctgagctctaggctgctgtccacaccagcttgggacagccccgccaacagccacagagtccctgagacccagccgctggctcccagcctggctgaagcggggccccccgcggacccgttggttgtcaggaacgccagctggcaagcgggaaactggagcgagtgctctaccacctgtggcctgggtgcggtctggaggccggtgcgctgtagctccggccgggatgaggactgcgcccccgctggccggccccagcctgcccgccgctgccacctgcggccctgtgccacctggcactcaggcaactggagtaagtgctcccgcagctgcggcggaggttcctcagtgcgggacgtgcagtgtgtggacacacgggacctccggccactgcggcccttccattgtcagcccgggcctgccaagccgcctgcgcaccggccctgcggggcccagccctgcctcagctggtacacatcttcctggagggagtgctccgaggcctgtggcggtggtgagcagcagcgtctagtgacctgcccggagccaggcctctgcgaggaggcgctgagacccaacaccacccggccctgcaacacccacccctgcacgcagtgggtggtggggccctggggccagtgctcagccccctgtggtggtggtgtccagcggcgcctggtcaagtgtgtcaacacccagacagggctgcccgaggaagacagtgaccagtgtggccacgaggcctggcctgagagctcccggccgtgtggcaccgaggattgtgagcccgtcgagcctccccgctgtgagcgggaccgcctgtccttcgggttctgcgagacgctgcgcctactgggccgctgccagctgcccaccatccgcacccagtgctgccgctcgtgctctccgcccagccacggcgccccctcccgaggccatcagcgggttgcccgccgctgactgtgccaggatgcacagaccgaccgacagacctcagtgcccaccacgggctgtggcggagctcccgccccctgcgccctaatggtgctaaccccctctcactacccagcagcaggctggggacctcctccccctcaaaaaaggtatttttttattctaacagtttgtgtaacatttattatgattttacataaatgagcatctaccattccaaagcaaaaaaaaaaaaaaaaaaaaaaaaaaaaaaaaaaaaaaaaaaaaaaaa

SEQ ID NO: 3876 - protein, 898 aa, Homo sapiens
VWIQLLFQESNPGVHYEYTIHREAGGHDEVPPPVFSWHYGPWTKCTVTCGRGVQRQNVYCLERQAGPVDEEHCDPLGRPDDQQRKCSEQPCPARWWAGEWQLCSSSCGPGGLSRRAVLCIRSVGLDEQSALEPPACEHLPRPPTETPCNRHVPCPATWAVGNWSQCSVTCGEGTQRRNVLCTNDTGVPCDEAQQPASEVTCSLPLCRWPLGTLGPEGSGSGSSSHELFNEADFIPHHLAPRPSPASSPKPGTMGNAIEEEAPELDLPGPVFVDDFYYDYNFINFHEDLSYGPSEEPDLDLAGTGDRTPPPHSRPAAPSTGSPVPATEPPAAKEEGVLGPWSPSPWPSQAGRSPPPPSEQTPGNPLINFLPEEDTPIGAPDLGLPSLSWPRVSTDGLQTPATPESQNDFPVGKDSQSQLPPPWRDRTNEVFKDDEEPKGRGAPHLPPRPSSTLPPLSPVGSTHSSPSPDVAELWTGGTVAWEPALEGGLGPVDSELWPTVGVASLLPPPIAPLPEMKVRDSSLEPGTPSFPAPGPGSWDLQTVAVWGTFLPTTLTGLGHMPEPALNPGPKGQPESLSPEVPLSSRLLSTPAWDSPANSHRVPETQPLAPSLAEAGPPADPLVVRNASWQAGNWSECSTTCGLGAVWRPVRCSSGRDEDCAPAGRPQPARRCHLRPCATWHSGNWSKCSRSCGGGSSVRDVQCVDTRDLRPLRPFHCQPGPAKPPAHRPCGAQPCLSWYTSSWRECSEACGGGEQQRLVTCPEPGLCEEALRPNTTRPCNTHPCTQWVVGPWGQCSAPCGGGVQRRLVKCVNTQTGLPEEDSDQCGHEAWPESSRPCGTEDCEPVEPPRCERDRLSFGFCETLRLLGRCQLPTIRTQCCRSCSPPSHGAPSRGHQRVARR

SEQ ID NO: 3877 - DNA, 411 bp, Homo sapiens
tgaagctgcagtagcttggttaaacaaaaacaaaaaaaaaactgagagaaaacctatcagaaggactaaaagtacgccttgcttcagggttggctcaggtggtgaacttcatgctgggcatctatgcagagccaccttttggattgcatggttggactgagatctattgggagaaattatatatgtatatatatttatacaacttatgtatacatatatatatgtatacacacagacacacacacacaccaccaacaaccaccactacaccacacatgcttataacaggcactagaataaagagggacaacaaaatacacagccagagcagcaagccttagcaattaagaatatacaatatgccggaattggggttcgtgcctcctagcctaggaaacttaaaagaaatat

SEQ ID NO: 3878 - DNA, 13236 bp, Homo sapiens
gaattcctcttgcctgattgccttcacactgggacataggtttttctcctgcctttgaacttaaactgaaacatcatctcttcctgggccttaagcctgcccattctcaggtctttgaactcaaactgggactacactagcagctctcctgggtctccagcttgccagctcaccctgcagatcttggaacttgtcagccttcataattaaatgagccaattctctaatttcttattttttatacacacaccattggttctgtgtctctggggaatcctgacttatacaatggtcttaccaatgagttgccaaggtccattgggtattcatgtggcaaaaaataaatcttgaatccttcttcacaccaaacataaaaatcaactccagatggattgtaatttaaatattaatgctaaaacaataaagcttctacaagttaacataggaggatatctttattgccttaggataggggaagatttctcattagatcacgaaaggcctaactgtatataaaagattgaagcatgtgactctcttaaaaggaaaaacaattgtgaaaatccattaaagcattctgctctatcaaaggaggctgtgaccactcatttctgagaaatatctgtcatgtgaaaacataatcacatgattatgcataatcctaagcataatccctgggtgcttccaactcctggtcacccatctggagatacaacttctccataagcccctcaatcaacaagtgaaccactcgtttgtgtaccctaaacctttcaagtaaccataggcaaccctgggctgagaactcacatgacaccaccatagttaaaatgtcttgcatcagcacctccaatgttcccatggtccagtctgcctataaaaaggagagacaacagctcataccccagaaggaggccaggagttgtgagtttccaagccccagctcactctgaccacttctctgcctgcccagcatcatgaagggccttgcagctgccctccttgtcctcgtctgcaccatggccctctgctcctgtgcacaaggtgagtctgtcatccatgtgctttgatggctccctgggcagaagtcaggcgacatcttccaagtgctgtggcctgaaaaccctcgtgtgaaattagggatcctcaaatggggtttcaaagtgacatcattgttttcttcaagaaggttgaaaagcagtctattgatctgggcagcaggatgggagtcagagaagttttatcctactgagataaatgagatggttgaagtctaattcattgggttattagcgtgaggtagaatctaggtctatttagttctcactggtgctggtaagttttacaatgacctcagcagtctcctagagttcaaccccttgggtaacataaaagatgtctatacttttctcagctatcttgtgatttaatctattagaaaaaaaattccccaaggagagttaggagaagggcatagactattcagggagcttgattccctgtagcgtaaaataaagactaaaatggagagacaagactagggaaattaaggagaaacaaacaaaaagccagattatttccagctttcttttcctgcaggcctcaactctgagctatgctgtctccctttgctcctttgtgacccgcctgggcttcttctcctgagcaactcctgttgtctttgttccctcagataagattcacaccccatgcatctgctgcttctcctacacctcccagtagatgcactgcaaattttcggttgcctattataaaaccagtggtgagcggtcttaaaattaaaatcctatgatatattttaattactttatacagtcaatattcatttagttttcatcacatatttgctcttcctgtcctcttaaattcttctgcatctctgagctccatctgcaatcacttttcttctgcctaaaggaatcctcttagtattttcattactgtgggtcttctgatagtgaagtctccattttttgcttgcttggaaatgtcttcattttaccttcattttaccttcacactggatatgaaagtccatagtagctcccacctcctacttgtgcttacgtgctccttgtcccttgtcccatgggttgtctcctccatatgccctatttgcagacagaaggactgatgctgacattacgccagggtaagagcaccagctgctggagtcagcaaatttgcagtggatatggagaaacataagagaggcaggagacaatggggtgccttaaccgtgagggaaccagcatccagaacctgagaaaaaccaagtaaatttcttccactcttgaaaagggaccagcaagaagttgatgaagacctcactgctcaggactgtgaagtagggcacaaaaggaactaaggaagtcaggcattcatccttgactttgagtgtttcttttaaatctctgcctctgtcttactctcactcccttgctccctcttcagggagtatagctcttggaatggctggcctttgttccatctcttttgggtaggaacttcattcagtctacagagacttttcccagcaagagaccatcgtctctaaatcgctgtaggagtagagcttctcaggagaactgaaggaactctgccacttcctcaccctaggaaccaactagacccagagtttgcatcttgtgaatgactgagttaggccccagttttcccaactaacaatgggtcctagccctctcctgcctttcagatctaggttagatatctaagtcctcagaaaatagcccagaacattttgaaaccttttgtgaagttctttgattttacttagagaatcttaatccacaagaattaagtgatatggcttaaatgtctgtccagagcatagggaaacaactctaaaatgaagaaaggacaagggtcaagagagtctcacgggacagatgagacttgtgagctgagggccatggagaggagatggagggcaccaaagaagacctgttcagtgttgggcaggcagaggagtgtaggcaatgccaaaacaggactgggcactcactgccacctacatcgttctggggtccaagccatgtcctcaaccctttacaggcaactctaaaccatgaggagctggagactggggatgaccagaggggaagatgttaagtgcatggtgtcttgctctgagttgtacatgttggggtaccttgggtcccccaggggttcaggatgtacaagagcaactcaactgctcacttgttggggctgaatgtgcagaaatgtttttgacagtgagagagggtgagatgttagtgttgaagtcatacgtacaaggagagatcttcagattaacacttccaccacagagcagctctctaatgctgtgctgcagctcctctgaccacatggtgtgatgtaaatggtcatgccacagcgttctgggcagcacaagtcacatttaaaccacaccctgggtgaaaaggaccattacatcgtgttaatcggagtgcttctaagaaatgcttaactcatgaggaggacgtcaagaattggtgttaccaagaagccaagcttagctggtaccttctatcaagaacagatctatttgtgaatggcaccatggtcatttcctcctatggaacagatatttctagtgttgtgtttccattgcacagaagtgacatgtaagatgataccccagaatcttaagtagttcgagttgtgtttgatccagacccaaatggacagaatggaatagggaaagtctggactatgggaatgacaagaatgatggggccaggcttttaactgctgtttgattcattgaacattcatagctccctacaatatgccatcattgggtttgactctgggtaatagacatgaatatgcatgacatatggggtgtctatatagatcaggagccttagatgcccttattttttcacccaggaagcccacagctaggaaaatatcctacagaaataacctcacttatggagaaagttttttgcatacagatgtttggcacaacttataacaatgaaaaattggccaggtgcagtggcttacacctgtaatcctagcactttgggaggccgaggcaagcagatcacctgaggtcaggagttcgagaccagcctggccaacatggtgaaacctcatcttcactaaaaatacaaaaattagctgggcatagtggtgcacgcctgtagttccagctactcaggaggctgaggtaggagaatcgcttgaacctgggaagtgggggttgcattgacctgggatcacaccactgtactccatcctgggcaacagagtgagactccatctaaaaaaaaaggaaaaattgaaaccaacccacatatgttacagtagtgcatgacaatattaatgcactaggcttaagtaaattaggcagttcttaaaaatactggaatgatttggaaaagtcttttaatattaagcacagtcatatgctgcataacaatgctttggtcaatgacaaactgcatatattatacagtggtggtcccataagattataattctgtatttgtactataccttttctatgtttagatatgtttagatatgcaaatacttaacattgcattgcagttgcctacagtattcagtacagtggcatgctgtacaactttgtagcctaggagctacaggctgtaccatacagtgaaggtgtacggtagactacaccatctaggtttgtgtaagtctatgatattcccacaataacaaaacagactaatgacaagttcctcagatgtatttttgtcattaagtgatgcatggctgtataaataaaaaaatacaaaattaaaacctgtatcatgacaacagtaatgtcttcccccaccagacacagtaagaagaaggaaaaaagcaaatgagcaaacagtactatcataagcctagaaaaaaactgcactggaaagaaatataccaaactgttttttaaaaaaaaaaagtggctaggtttgggtactagaatttttcctaccttcaatgaaatttttttttcaggttttgcatcagaatgcacatatgccacaatagggaatgtagaaaaaaactctcacattcctgcctccgtttgcctgctgcctacccagctttgagattctaaatgagtttttattcttttctgtattttatgtgttttcaaaattagctttactgctttttggtgtaatctatagttcacataacaaatcatataaaaagctatttgaactaaaaacactagtaacattgctcttcctgtactcctatgagactccctcgtatgcttgtggatgagacattatgaggatgtgatgactgagaaagcagcggccattttgggaccacgaggtgacaagctcaaataagaaaagccaacaaaatggtgggggaaggggagatgttttaagaagcctgagttcttgatgacacaactgagctgttaaacaaactcagggaggaccacctgtttaaatttatttatttacctaattatttatttgagacaaagtcttactctgttgcccaggctggagtgcagtggcatgatcagagctcactgtaggcttgactttccgggctgaagcaatcctcctgcctcagcgtccaaagaagctgaaactacaggcatgcccagctactttaaaaaaaaaaaaatttatagagacagggtctcactatgttgctcaggttggtctcacactcttggcttcaagcaatcctcccaccttggcctctccaaatgctgggattacaggcatgagccaccatgcctggctctgatgtccatggtacatctatgctgttggaacagctggggaggctatcagaaggttctgctcaatgggagaaaggctttatctaaagacctgcccttgtgagaaggcaccagctaacccagtctcagggtgacaccagcatctcacctcctttcactgtggaaaccatttccccaccaagggatcaactgaagcattcttgcaaatagcctgaatctttgtggtgagctgaagctctcctggtttgtgcaatgcacagcatgacaccagtatcatgattaaaaaattttccccttcagagaggatcaggaaaaactaatgggtactaggcttaatatctgggtgatgaaataatctgtataacaaactcccatgacatgagtttacctatgtaacaagtctgcacatgtaccccgaacttaaaagtttaaaaaatgaaaaaagaaacaaaattcctcctcagtctccccaagtttatatcttctaataccccaaggctgcctgtaaagagaagagatggctgagaccccagaaggaggcagcggctacaagtcctgagttcagctcttcccggcagccatgggagctcacactctgcccagcatcctggggacccctgcagttgcccttgctgtccttttcttcactgaggccctctgcccccaggcccgctgtcccttgtgtgaatttgtcttttgctcttgtgcccctactgtctggccatggcttggaccccactgcccgagtctatctctaagacctccaaatacagaacatcagagggatttcagggactatttcccgaggaggatttttcttcctaagaggtttcagcaactctgttctccacctctgggagacagagggagagtgagtcccattctatggatgagaaaatggaggcccacggggattttgacaagaggtaggatctgggtccaattggttctcagtggtgtggccttggctgtccttatgaattcagatggaactccccaaggagagatgggatgggaaatagtttgctcagaaaactaaatttccagtaaagagacatagagacccagaaccaagacagccagagaatgagaaacaccaagagaaagatgcagaaattaaaatgtcagggaaaagaagaaatgccagcttccttctggatctctttgtccctatatccccaccccaagcggtgatatctcccagttcttcctgactctcaaggaaagggaccaggagcagctggcttgccttgtgaacaatgacttgggatctttctgtcctgtctcttgcagttggtaccaacaaagagctctgctgcctcgtctatacctcctggcagattccacaaaagttcatagttgactattctgaaaccagcccccagtgccccaagccaggtgtcatgtaagtgccagtgctcctgcccacccctcgggagggaggatgggaggtttggggtgaggtcccctcagagtactcagctctctaaggcccatcaaggtaaaggactccaggggaggcccctgcagtgttttgtgacctggcctggggcctgcagagtcctgaagggcctgcccctgggcagagggaagagagcagacatgacaacaggaagtttgcttcctgaggaaccccatctgagacatttggggaaggcctgtgaaccccgaagttaaggggaaattttacgggcacgaggacaggccctgagatgcctgggacagagaaggacgcaggggccacaggattcccctgatgaattcgtcagttcttaactcttcctcccttctccacagcctcctaaccaagagaggccggcagatctgtgctgaccccaataagaagtgggtccagaaatacatcagcgacctgaagctgaatgcctgaggggcctggaagctgcgagggcccagtgaacttggtgggcccaggagggaacaggagcctgagccagggcaatggccctgccaccctggaggctacctcttctaagagtcccatctgctatgcccagccacattaactaactttaatcttagtttatgcatcatatttcattttgaaattgatttctattgttgagctgcattatgaaattagtattttctctgacatctcatgacattgtctttatcatcctttcccctttcccttcaactcttcgtacattcaatgcatggatcaatcagtgtgattagctttctcagcagacattgtgccatatgtatcaaatgacaaatctttattgaatggttttgctcagcaccaccttttaatatattggcagtacttattatataaaaggtaaaccagcattctcactgtgacgactctgttgattttgtttcactaatcggaatcacagactgagaggaattctgggggaggagtagggaaatatgaaaaggggcagaaacagcaagatagggaccaagtacttctacagtcataccagacatttccctggagatactttcctgaaaagttgaaacagacaccattagtttataaaccatattgtaactgaaatgtgatagaaaaattttctacttaaatgaatatcaagatgacgctgcaatgcatatttacgcacacaagctcattttcataaatgaagctttcctcagaatgatggctaacatctgttgaggtcttaccaagtgctgggttttgggctaagtacttatattagtaaaagtctagcaaatactgcccatagtctagcaaggactccttacctggaagttgctgaaagccttggtaatgttatctttgttctccactctgcttttggggaggatgttttccatgactatacgagatgaggcttggggctgggtggccagagttagcaaataaaaatacagaatggatactattttagtgtaagtatatcccatgcaatatttgggacctacttgtaccaaaaatgatttgttctttttctgaaactcgaatttaacagggtatcctaaattgtatctggcaaccctctgaagaaggaatactgcttatagaggtgtctgtttcctgttggagatgtctgttgattttggcttaagtgtagaacagggctttggcttaagtgtagaacagggctttggcttaagtgtggaacacggcttctcaaccttgaattcacattagaatcacttaggagagcttttaaaaattctaatgccaggtcctcacctccaaagttatgaatttaattggattgatgtgggggcctggcatcagtaatttaaaaactccccaggggatgttaatgcacagccaagtttgagaaccactgttggtgtggggtcacaggctgtttttaaccagcattaaggtttcagaggcactgcaactccgttctaatttttgaaggcatctgatctagttatttttggttcattccattggatggttaatcataagcagaaaatctatcagatacagttatttctagaactgggtttttaacacgtctcttccagcacagcactgggagctctgtggtcatcccttccgccgcccaccggctcccccattgtattgactccacattgccccctgctggtgaaacaagtgcgaaggtcagcgtctttagctccctgcctctgatgaatacagctgcaccttcacaaagagcacagctgttcattgtgatggttaatgttacgcgtcaactggactaagctaagggatacccaggtagctgataaacatcatttctgagtgtgtctgtgtggtgttccagaagagattagcatcagaagactaaagaagatctgccctcaccaatgcaggcaggcatcatccaattcactgaggtcccaaatagaacaaaaaggctgaggaagggtgactttgctgtctgcgtttgagctgggacatccatcttctcctgccctctgacatccacgcttccgattcttgagccttcagactcagacagggacttgtaccatcacctacccttcttgaccccttctcaggtctgtgaacttggaccaggactgacaactttggctgccctggttctcaggccttcagaccaaatcacaccactggctttcctggttctccagcttgcagatggcaggacttcttggcttccgtaattgtgggagccaattcccctaataaatatctcggtatttatatctatatcaacattggtatccaatctatatctatagagagaaatagcctactgtttctgtttttctggataactgactaatacattcattttatcatcaagataaatatttacaatgtgggatctgagaaggaggtggatttggctgcttcgggacctgctttcctgtcctgcctaatctctcacctcctcatttttgcttatattaacattagcttggactggaaaattctgctcttctagtcctgcaagctccagatcacaggattcttaattagcttggttttcaggcagcaagcagaaagtacatttctttaaaaaactactttttttccccttctctgctatcagaagaatcagtttcaaagtaagttaatttctttcttagtgggccttactaagactgatgcaagaaatagtctccaataccctgaattttcgtttttgataaaactttggctcgaagatggacttagaatatataacaggccatgggggtaaccggcaattttggtaactagaggtatccccactgactttgaccttagctactgccttcagccagttccacgtttggggacccatacttacaacattgcagtctatgttagttagggatggtttaagtcacagtgtcagaaaaataactcaatctggcttaaatgataaagggaacttattagttcacataactgaagcttcaagaaatagaattagtttcaggcaaaacttgattcagtggtccttgtttcgctatggactatacatgtctttctgaatttctgatctccctgcatttgagagcttcatcctagaaagaagttactatattcatcctagttactctattggcagaatagcttccagaaacttccagagcaaattgggaagacaatgtctgtatcctcgtattttgagccaagagcctgagttccacttttattggtctggctggcttggattaagagcccatctcttaacccaggggccagcaaactatggccattgggcccaatttgacctactacctgtttttgtatggcctgcgagctaagatgtttttacattttaagtcattgaaaacatccaaaagaagattattttgagaaatatgaaaattgtatgaaattggagttttagtgtccataaaaaagttttattggaatgcagttgggtttatttgtttctgtattgtttacagcccacagtctagcaaggactccttacctggaatgaatcatattttcatacgacaaagcagagctgagtagttgtgaaagacactgtatgacccacaaaacctgaagtagtttccatttggtcctttacagagcaagtttgccaacctgtatcttaattcatctttgtggccagagaagtggatttactgatttgtttcagctgatcaatgtctataacaagcaatgttgatgggctgaaaaccacacagactaccagaggggttgcttttccgaagaatcatgtaaggataaaagagaaagaaagagagaaagaccttggaacccaactagtatctaccaaatgtatgtaactttctcatattaattctgtctttatatgtgaagatgaccaatcccctgcctgtgattacatcacatcaagcatgttcttcccaaattgggggttcaattcagactctcctgttatatgccagttgtcttagggattttctcactttattcaacactatactcaatttttacattaataatgcagtaataatatacccctttgccattctgtattttcctgtataataataattattattgttattattattattttttgagacagtttttgttcttgtcgcccaggctggagtgcaatggcatgatcgcagctcactgccacctctgcctcctgggttcaagtgattcttgtgcctcagcctcctgagtagctgggattacaggcacgcaccaccacgcccagctaatttttgtatttttagtagagatggggtttcaccatgttggccaggctggtctcgaactcctgatctcaggtgatctgcccgccttggcctcccaaagtgctgggattacaggcgtgagccactgtgcctggtctttcctgaattattttaccggttttgtaaaaagattttgatcgggatataccctgttgccccacaaatgatggctagttcccaaatctgagactaagttttcattatagactttatattctaaactaagtcactaacaactggggccagacaatccttccagggcattgtagacataggaaaaggaaagaaagtggccagcctagtgggttccacctttgtgaaggagaggtctttacttctaactgctcttgaagcccagtgaaggggtctccagagggtaacttgtacaaactggaagtacctgcaaacaaggcaactcattttccagttggatgtcagcttacatggtgaacctcatgatttgcctgagccaaaatgagcaggggagaagaaaacagaagataggaaccaaagcagggaaaaggattgctggaggctgctctcccaccacatggaatgagctttccattggccgagtgatcctgtggaagggagctgggctcgagccatcctcccagtgacactccgcaaaggttgggggaatcacatgtcccattttgtctgggaaatgacccagtttatgccagttgtgccagcatagttattaatagtaacccctttgagtcttaaagtgctcatcctaccaataggagatccactgcttagcttacaaggatcttaacagcagtagctgatggggtggtctcagggccgctgtctacaaaggcccctggatgtgtgggcaagagggtgctgaaagccagtctgcccatcacctgtaaggtcttgcactcacacagggctaggtgtgctccatggtgcttttttgtaacatgctcaatggtgtcttccaggctagcaaaggcccagggtatgctgccagtggtgtgagcagaagagagaggtgaaagatgttgggcaagggtgggatctctcacctaagaaactatgcagagagaggaccctcaggaatgcccatctatccgagggaaatatacatgcattgcccataacttcaatatttttttaaaagatgcagggataacctagcagtgggggcagggactacatctgtaggcagttaaaagaattctttcccctctctcttttaaacatttaaattaaaaaaaattcttttagagacagggtcttgctctgtcacccaggctggagtacagtggtgtgatcacagctcactgcag

SEQ ID NO: 3879 - protein, 89 aa, Homo sapiens
MKGLAAALLVLVCTMALCSCAQVGTNKELCCLVYTSWQIPQKFIVDYSETSPQCPKPGVILLTKRGRQICADPNKKWVQKYISDLKLNA

SEQ ID NO: 3880 - DNA, 536 bp, Homo sapiens
  misc_feature (436)..(436): n is a, c, g, or t
  misc_feature (450)..(450): n is a, c, g, or t
  misc_feature (490)..(490): n is a, c, g, or t
  misc_feature (528)..(528): n is a, c, g, or t
tttttttttcattttgtaattttcaacactatgaatttagacagcagctgtgattatctgttagtttaaatcaccagaaatcattttgacacaacacagaaacatttataaaagaaaaaaaacagctgtctagctgttctttgtagctgataggtgcattcctttgattgttcgatagctagagtagagcttccaaaattaatctgtaaatttctccatcggccttcttcacctcctaaacctacttaaatccttcaagtaagctcactattaaaatttgtgggcatttaacttctttttgttattattccaccacggtttggggcccaactcatggaaatcaaagggtcctagagggaatctacttcaacacagtggatattccaagggacagccgagtttactatattaggcattggcacaggtaaaacaattntatatggacatttncgggtttcctttttcccctcccttttggtttctttaaaangttggggtggaccttggaagggtttttccggtcccacnggggaatg

SEQ ID NO: 3881 - DNA, 1630 bp, Homo sapiens
aaaagcagaaagagattaccagccacagacgggtcatgagcgcggtattactgctggccctcctggggttcatcctcccactgccaggagtgcaggcgctgctctgccagtttgggacagttcagcatgtgtggaaggtgtccgacctgccccggcaatggacccctaagaacaccagctgcgacagcggcttggggtgccaggacacgttgatgctcattgagagcggaccccaagtgagcctggtgctctccaagggctgcacggaggccaaggaccaggagccccgcgtcactgagcaccggatgggccccggcctctccctgatctcctacaccttcgtgtgccgccaggaggacttctgcaacaacctcgttaactccctcccgctttgggccccacagcccccagcagacccaggatccttgaggtgcccagtctgcttgtctatggaaggctgtctggaggggacaacagaagagatctgccccaaggggaccacacactgttatgatggcctcctcaggctcaggggaggaggcatcttctccaatctgagagtccagggatgcatgccccagccaggttgcaacctgctcaatgggacacaggaaattgggcccgtgggtatgactgagaactgcaataggaaagattttctgacctgtcatcgggggaccaccattatgacacacggaaacttggctcaagaacccactgattggaccacatcgaataccgagatgtgcgaggtggggcaggtgtgtcaggagacgctgctgctcatagatgtaggactcacatcaaccctggtggggacaaaaggctgcagcactgttggggctcaaaattcccagaagaccaccatccactcagcccctcctggggtgcttgtggcctcctatacccacttctgctcctcggacctgtgcaatagtgccagcagcagcagcgttctgctgaactccctccctcctcaagctgcccctgtcccaggagaccggcagtgtcctacctgtgtgcagccccttggaacctgttcaagtggctccccccgaatgacctgccccaggggcgccactcattgttatgatgggtacattcatctctcaggaggtgggctgtccaccaaaatgagcattcagggctgcgtggcccaaccttccagcttcttgttgaaccacaccagacaaatcgggatcttctctgcgcgtgagaagcgtgatgtgcagcctcctgcctctcagcatgagggaggtggggctgagggcctggagtctctcacttggggggtggggctggcactggccccagcgctgtggtggggagtggtttgcccttcctgctaactctattacccccacgattcttcaccgctgctgaccacccacactcaacctccctctgacctcataacctaatggccttggacaccagattctttcccattctgtccatgaatcatcttccccacacacaatcattcatatctactcacctaacagcaacactggggagagcctggagcatccggacttgccctatgggagaggggacgctggaggartggctgcatgtatctgataatacagaccctgtcctttcaaaaaaaaaaaaaaaaaaaaaaaaa

SEQ ID NO: 3882 - protein, 437 aa, Homo sapiens
MSAVLLLALLGFILPLPGVQALLCQFGTVQHVWKVSDLPRQWTPKNTSCDSGLGCQDTLMLIESGPQVSLVLSKGCTEAKDQEPRVTEHRMGPGLSLISYTFVCRQEDFCNNLVNSLPLWAPQPPADPGSLRCPVCLSMEGCLEGTTEEICPKGTTHCYDGLLRLRGGGIFSNLRVQGCMPQPGCNLLNGTQEIGPVGMTENCNRKDFLTCHRGTTIMTHGNLAQEPTDWTTSNTEMCEVGQVCQETLLLIDVGLTSTLVGTKGCSTVGAQNSQKTTIHSAPPGVLVASYTHFCSSDLCNSASSSSVLLNSLPPQAAPVPGDRQCPTCVQPLGTCSSGSPRMTCPRGATHCYDGYIHLSGGGLSTKMSIQGCVAQPSSFLLNHTRQIGIFSAREKRDVQPPASQHEGGGAEGLESLTWGVGLALAPALWWGVVCPSC

SEQ ID NO: 3883 - DNA, 485 bp, Homo sapiens
cggcgattcgcaccggttcgtcccagcagcagcggcccgcaggctccaggatcagcgtcgccgccatccgagcaggaaccctaatgatctgaccaacctgcctcagctgtggagaccccaggaactgcgccgaactcttcaggctccattggtacagccgggacgctcgaaggacagcaggagatgaggccattttgaattcagacctgagaacaactgaatgggggtggggagaaagaagcttgttagacatcctctcgggctgccgtcgcaggctaagcgcccactagggcagagctgtctgctaacgtgagcggggaaggccagagtccagccgatcagccagaccaaatatagacacactggaacttgcttaaagtctcctgtgttgaaacctccactttatgttggaaagctacttcctaggtttgcttttcagaagcttgctggcctgcggaatgggctggaccagggctggttcttaa

SEQ ID NO: 3884 - DNA, 292 bp, Homo sapiens
ttttgaagaacaggaagagagcattgtgcatttattaaaacaacatataacacaaactcagttaccaccccgtatgtctgggataggcactgaaatacagcacatcgtccctgtgagtgctaccccatcctcctgctcaggaaaggaagtgggcagctgtatcaacctggcttccttcccctctttctgacaatcgcaggtcacccaacgaccaggcattattatacaaaagttcctttacaaaaagcaccaaattggcatacatatacaagtatatacaaaaatcacattt

SEQ ID NO: 3885 - DNA, 397 bp, Homo sapiens
tttttttttttttttttttttttttatagcataaatgggtttattttaaaaatgacaaaatcaaaatcgggttcattaaagagacaaatagacaacctaaggcaatatgaaatagcaaaactgaaatggaggccttaatacagatactgacaagatttttcaaattataaaaaaatactatgaatatatcagggtaaaagtttgagaaatatgtattttccattataaggttagtatagctctgataccaaaaattcaaaacaaattgcaaaagaaaacaaatctcattgttggacacagattaaaagaatctgaaataagatgttggcaaatgaaaaattcagcagggtttatagaatgatgcataatgaccaaatagagtttatccaaaaaaatc

SEQ ID NO: 3886 - DNA, 359 bp, Homo sapiens
tttttcatcaaggaccacacaagctttaatacaaagattgcacaatgagcgcggggcgcggcacacaataagaagctctggaaacgcacactctctgacacctcaaagttttagggacttggatggctgcaaaaaaatattggcaaagggattttctggggaggcaggaagaaaacggccgccctgcgaggcgacaaccaggcgcgggggaccaaaggaaccgttggacccacgcccaggccgggtcggcggggtcggcaatcctcaagggggaaatggggtccgaggcacgccccaggcagcgggccccgctcttcggcagctccactcaccaggaactggagcatgatgtcggtggg

SEQ ID NO: 3887 - DNA, 309 bp, Homo sapiens
ggcggttgtcgctgagttggcgaccgcgggagacgctgctgaggcggcttcggttgcgggtcggaacggcgctgctctgcggggccggtccaggctggcagctgccggcgcttggcggtgagggcgggctcccgagtggccccccaccgaagcggtgggaccagcggctgaggccaggatgccgtccaggcggcgcggcggctcctcactcatcccagatgttggttatctttctgaagtagactgtccatggcctgacattttccgaaaatcattttgagcaaaatatctgtttaataccaggtaccc

SEQ ID NO: 3888 - DNA, 529 bp, Homo sapiens
gagagtacataaggtagaatcgtaatcatctcctctcgcataaatgtcttcatcataacaaaagaacgaagtaggagtacctcaaagatgcttatcttctgtaccttttatttgagtcagagttataatgcctttgggtcagtcaaggttccttgtaaaccaaacccgagggatcatgtatgtcacagatcaggcagcaagacaatccaataactaaacatgacagaaactgacatgccagttggtggaaagtggaaaagagtctaacagtgaaagtgaagggcagacagatgagtgcagtgcaatagtcaggactggacttaaatggtataacaaggaaaaacaagctttttcactttcacaagcaagagacctcacaataaataagaacggctcttccttacacgaataaatttcttcaaaaacaaggtatacagtcaaccagacatttcatgtataaataataaaacatgacacaagtataaatcactgtctacaaagtctcaagtatgggcctcatcaagtagac

SEQ ID NO: 3889 - DNA, 456 bp, Homo sapiens
  misc_feature (10)..(10): n is a, c, g, or t
  misc_feature (252)..(252): n is a, c, g, or t
  misc_feature (318)..(318): n is a, c, g, or t
  misc_feature (382)..(382): n is a, c, g, or t
  misc_feature (419)..(419): n is a, c, g, or t
gctggtcttntacttggcagatgcacttcaaattaacctgttaaattaggtcatgttctttgagttttgtttctaattcaaactaatcagaattctttaactaatgcttttgaaaagttatctggccatatgaccttggtaaaaagccacaaatacatttgcttaaaatccaacctcaagtcacaaacgaacaagaaagtaatgacatcagaggatgtaagccagtagtctaatactcagcccaccacggtnttactgggagtcgctgacttttaacatttaattatcaattttttttttgggacagtctcgctctgntcacccggggctgggaggtacagtggggtgtggatctcgggcctcactggcaacctctgcctcnggggggtttaatttaattcttgggcctcgaggggccnaaaatttccctataggtgaggtcggtatttaaattct

SEQ ID NO: 3890 - DNA, 462 bp, Homo sapiens
  misc_feature (212)..(212): n is a, c, g, or t
  misc_feature (332)..(332): n is a, c, g, or t
  misc_feature (369)..(369): n is a, c, g, or t
  misc_feature (462)..(462): n is a, c, g, or t
taagggtttggcttctgaaaggtattccaagtacaccggcaaaatatctactttctctatgagtttataaattgaagtggttcttcaggacaaacaaaaacccttttcatctaaaattttaattgagaccaatttcagtgccctgggaattagttccaaagtttgggctcaagttttctggcactgagcacagggctctggctcaggacttnactggggcaaccttacagctgaacctcagggctacttgccaagaagctggtctcatggcaacacttccctaatggcttaacaccagaacattgagcttggatacccaacctggctgaaancaatttcacatggactggcactctaatctagcaagcnactttgcaggagtcatctccgtggtaagcacttgtaacaccctctggacaatttcctggggagaaaaattaagacttaatggttcattgggtn

SEQ ID NO: 3891 - DNA, 768 bp, Homo sapiens
ccttcagcataaaagctgatccacaaacaagaggagcaccagacctcctcttggcttcgagatggcttcgccacaccaagagcccaaacctggagacctgattgagattttccgccttggctatgagcactgggccctgtatataggagatggctacgtgatccatctggctcctccaagtgagtaccccggggctggctcctccagtgtcttctcagtcctgagcaacagtgcagaggtgaaacgggggcgcctggaagatgtggtgggaggctgttgctatcgggtcaacaacagcttggaccatgagtaccaaccacggcccgtggaggtgatcatcagttctgcgaaggagatggttggtcagaagatgaagtacagtattgtgagcaggaactgtgagcactttgtcgcccagctgagatatggcaagtcccgctgtaaacaggtggaaaaggccaaggttgaagtcggtgtggccacggcgcttggaatcctggttgttgctggatgctcttttgcgattaggagataccaaaaaaaagcaacagcctgaagcagccacaaaatcctgtgttagaagcagctgtgggggtcccagtggagatgagcctcccccatgcctccagcagcctgaccctcgtgccctgtctcaggcgttctctagatcctttcctctgtttccctctctcgctggcaaaagtatgatctaattgaaacaagactgaaggatcaataaacagccatctgccccttcaaaaaaaaaaa

SEQ ID NO: 3892 - protein, 164 aa, Homo sapiens
MASPHQEPKPGDLIEIFRLGYEHWALYIGDGYVIHLAPPSEYPGAGSSSVFSVLSNSAEVKRGRLEDVVGGCCYRVNNSLDHEYQPRPVEVIISSAKEMVGQKMKYSIVSRNCEHFVAQLRYGKSRCKQVEKAKVEVGVATALGILVVAGCSFAIRRYQKKATA

SEQ ID NO: 3893 - DNA, 851 bp, Homo sapiens
gagagagggggcgcggaaggaaggaggcgggacggtattacaaacaaaaaaatacggccttctcgagaagcgacggcggagggcccgctcctcccagaaggcggtgcagcctgcccgtggcgagccacgcacgcagagggttgtggggcggatagctcccctccagatggaggctcacgaagtagggtgggcgggggactccatatcccagctgtgcccctgctggctgtggcccgtaccgtgcctgcgactcctgggcttggccccggccctagctcgtcggctgtgtatttggggcgcgtggaggctgcagtcacggtggcgcccgcggggacggaggagggaatgagtgaagaggagcaaggctccggcactaccacgggctgcgggctgcctagtatagagcaaatgctggccgccaacccaggcaagaccccgatcagccttctgcaggagtatgggaccagaatagggaagacgcctgtgtacgaccttctcaaagccgagggccaagcccaccagcctaatttcaccttccgggtcaccgttggcgacaccagctgcactggtcagggccccagcaagaaggcagccaagcacaaggcagctgaggtggccctcaaacacctcaaaggggggagcatgctggagccggccctggaggacagcagtccttatactcccctagactccttcactggctgatggcattccgggttatactggtagcagcagatggtaacccaagttccatctgggaggctaaccaaggagccccccatgggacctggaggcccctggatccctcaagaagctgaatgcaacccggtaggagctcggagcgacctggg

SEQ ID NO: 3894 - DNA, 3200 bp, Homo sapiens
caggaagggccatgaagattaataaagatttggactcagggcaaatatttacttagtagcaataactcaaagaattactgttgaataaataagccaattaagcagccaatcacgtactatgcggatgcacacaaatgaaaccctcacttcaacctgaagacattcgcacatgagttacgtagagggacctgcaggaagcggtagagaaaacataaggcttatgcgtttaatttccacaccaatttcaggatctttgtcactgacagcagcactaagacttgttaactttatatagttaagaagaacaaggctgagcgcgatgactcacgcctgtaagcctagaactttgggaggccaaagcaggcagactgcttgagcccaggagttccagaccagcctgggcaacatggcaacaccccatctctacaaaaaaatacaagaatcagctgggcgtggtgatgtgttcctgtaatctcagctactcgggaggcagaggcaggaggattgcttgaacccgggaggcagaggttgtagttagccgagatctcgccactgcactccagtctggacgacagagtgagactcagtctcaaataaataaataaatacataaatataaggaaaaaaataaagctgctttctcctcttcctcctctttggtctcatctggctctgctccaggcatctgccacaatgtgggtgcttacacctgctgcttttgctgggaagttcttgagtgtgttcaggcaacctctgagctctctgtggaggagcctggtcccgctgttctgctggctgagggcaaccttctggctgctagctaccaagaggagaaagcagcagctggtcctgagagggccagatgagaccaaagaggaggaagaggaccctcctctgcccaccaccccaaccagcgtcaactatcacttcactcgccagtgcaactacaaatgcggcttctgtttccacacagccaaaacatcctttgtgctgccccttgaggaagcaaagagaggattgcttttgcttaaggaagctggtatggagaagatcaacttttcaggtggagagccatttcttcaagaccggggagaatacctgggcaagttggtgaggttctgcaaagtagagttgcggctgcccagcgtgagcatcgtgagcaatggaagcctgatccgggagaggtggttccagaattatggtgagtatttggacattctcgctatctcctgtgacagctttgacgaggaagtcaatgtccttattggccgtggccaaggaaagaagaaccatgtggaaaaccttcaaaagctgaggaggtggtgtagggattatagaatccctttcaagataaattctgtcattaatcgtttcaacgtggaagaggacatgacggaacagatcaaagcactaaaccctgtccgctggaaagtgttccagtgcctcttaattgaaggtgagaattgtggagaagatgctctaagagaagcagaaagatttgttattggtgatgaagaatttgaaagattcttggagcgccacaaagaagtgtcctgcttggtgcctgaatctaaccagaagatgaaagactcctaccttattctggatgaatatatgcgctttctgaactgtagaaagggacggaaggacccttccaagtccatcctggatgttggtgtagaagaagctataaaattcagtggatttgatgaaaagatgtttctgaagcgaggaggaaaatacatatggagtaaggctgatctgaagctggattggtagagcggaaagtggaacgagacttcaacacaccagtgggaaaactcctagagtaactgccattgtctgcaatactatcccgttggtatttcccagtggctgaaaacctgattttctgctgcacgtggcatctgattacctgtggtcactgaacacacgaataacttggatagcaaatcctgagacaatggaaaaccattaactttacttcattggcttataaccttgttgttattgaaacagcacttctgtttttgagtttgttttagctaaaaagaaggaatacacacaggaataatgaccccaaaaatgcttagataaggcccctatacacaggacctgacatttagctcaatgatgcgtttgtaagaaataagctctagtgatatctgtgggggcaatatttaatttggatttgattttttaaaacaatgtttactgcgatttctatatttccattttgaaactatttcttgttccaggtttgttcatttgacagagtcagtattttttgccaaatatccagataaccagttttcacatctgagacattacaaagtatctgcctcaattatttctgctggttataatgcttttttttttttttgcttttatgccattgcagtcttgtactttttactgtgatgtacagaaatagtcaacagatgtttccaagaacatatgatatgataatcctaccaattttcaagaagtctctagaaagagataacacatggaaagacggcgtggtgcagcccagcccacggtgcctgttccatgaatgctggctacctatgtgtgtggtacctgttgtgtccctttctcttcaaagatccctgagcaaaacaaagatacgctttccatttgatgatggagttgacatggaggcagtgcttgcattgctttgttcgcctatcatctggccacatgaggctgtcaagcaaaagaataggagtgtagttgagtagctggttggccctacatttctgagaagtgacgttacactgggttggcataagatatcctaaaatcacgctggaaccttgggcaaggaagaatgtgagcaagagtagagagagtgcctggatttcatgtcagtgaagccatgtcaccatatcatatttttgaatgaactctgagtcagttgaaatagggtaccatctaggtcagtttaagaagagtcagctcagagaaagcaagcataagggaaaatgtcacgtaaactagatcagggaacaaaatcctctccttgtggaaatatcccatgcagtttgttgatacaacttagtatcttattgcctaaaaaaaaatttcttatcattgtttcaaaaaagcaaaatcatggaaaatttttgttgtccaggcaaataaaaggtcattttaatttaaaaaaaaaaaaaaaaaaaaaaaaaaaaaaaaggcca

SEQ ID NO: 3895 - DNA, 513 bp, Homo sapiens
  misc_feature (354)..(354): n is a, c, g, or t
  misc_feature (479)..(479): n is a, c, g, or t
  misc_feature (505)..(505): n is a, c, g, or t
  misc_feature (508)..(508): n is a, c, g, or t
  misc_feature (512)..(512): n is a, c, g, or t
cttttttttttttttttttttttttttttttttttttttttttttttttttttttttttttttttttttttttttttggctttccagcttttatgaaaattaataacattaatagctcacagacatatacttacacacacattgctatgtacacaggcattaagttattaatgtaggctctgtaaaaaaaaggtttctacattagtgttccgggctaggccccatcagtccttggcatattcacagtggcagccccagggcttggccccacaggcaggcaaaagggaggcaggaggccacaaagcaaccggccccacagtgagcacagcaagtgtcctgggccacctccttaantcttcaattcccttcctaccacctgcagtccaactggtcagcaagccggcagacaggtcctgatcccttctgtggccttctgcatggtggcttcgggcaacgtggcgggccctaaaggatgctanccagctctgtggaatctgtttctgancanccana

SEQ ID NO: 3896 - DNA, 373 bp, Homo sapiens
tttttttttttaatgttaatattttatttcacccaatacatccaaaatattatcatttttgacacacaatataccaaaactactgaaatagtattcttattattcatattaaatctccagaatctagtgtgattttatgcttataccaattataacagcacatcttgatttaaactaaccccatcttaagtggttgatggccacatgtggaaagtggctacgtggtggatagcgcatgtctccaggaatccaactatgaaatggtcttctctggttctcagaggagaatctagttcagtgagttctatttaaaaaaatttttttcaaattgaatcccatttcagtaacctgacccatttctaacatctatagg

SEQ ID NO: 3897 - DNA, 457 bp, Homo sapiens
  misc_feature (11)..(12): n is a, c, g, or t
  misc_feature (14)..(14): n is a, c, g, or t
  misc_feature (425)..(425): n is a, c, g, or t
  misc_feature (437)..(437): n is a, c, g, or t
atacaacgtanngngtaggtgttgaggggggcaggtggtgaaatctacagctccttttcttgtccataaatgctcagagtattcaaacaggcctcagacatacaccagagccatggcaatgcatagtttaagatattaaatttctcttaagtgatttcgactcattttgcaagcccttgacaaacccttcagatgcgaagatttaaggaattgtctagcccttttgtgttacacggaaatgacaaaactttagttcactcttactgtaactgtcatctctctgaaggccaaagggaccgtactttgagggtacaacatttattatttttaattaaggaaagccctttgctggggtggattctaggctcactgcccttccaacaggtcattgaggtccccacatttggactggaggttgttggggnctttagggtttngaaaggaggctggcccccaa

SEQ ID NO: 3898 - DNA, 263 bp, Homo sapiens
gagaagtgtaaaaataagtatttacatagaaagaaagactgaatggatgcacggtgaatgcatgaatgattgaacgacagaaaagatttgcattgaccgwwdaggagggcattgtagacagggatgagggtcattgatcctgggtgcagatctccaaaagaatgacagawagawagagggagtggtggaaagaaacaataggatgggaaaaaatgaaaatagaaaaaaggaagtgaaagagataataaataattagatcattt

SEQ ID NO: 3899 - DNA, 716 bp, Homo sapiens
ggtggtggctgtggccttgaaaacagtcatgtgaaaactcatcaccttaaggtgttaagtgtaaggatcttcatgatgaaatttctgtaaatggtgcagtcagcctcagtttccaaagccggaaaaggatcctctagtagccacggtgtggcagctgctctgaaccaggacctggacccggacccaaagtgccatgtctttaatgttagctcccagcgatgccagatgggatcagcacagccctgcctctgctgctaatgttcctctaaagtaatcgccatgcgttcttgggcttcatctttaaaggaatgaagcaactgagattattctggaaaacctttggcagttagtgaaattagagtacaactaagaacattttcagacctccactgtggatgacctgggtataatctcacaaatcgatgggactgcaaggattgtcaactgaaatgaacatgattatactctgttggaagagcctaagaggaaactgatgccatgagtttcagagagtaattgcttaaccccagttacacaggatgccgtcttgtgtttcctcttgtttagttacccactaccagtgatttcgtcgatctgctaatgggttgccacccacaaccattgctttagcacttttacttcacatcatgaaggcttgctacccgttctcctggctgtctcgcagagtgctttcaggaacgatctttgcttgaatt

SEQ ID NO: 3900 - DNA, 652 bp, Homo sapiens
aggaaccccagacccagggcgagagaagggtggagtgggccccaggtgtcaccgtgtgcaccagggccgtgaggtgccggggtcattcagctcagactctgtaaccggggtaagctggcacgtgaaggtagctgcctcaggtgacgggctcgtgagaggggacgggtcaggtagcctttcccaagccttctcctcagaccgacacccatggccatcggaggctaggatgccagagacagtcattgtgcagaaatcaggcacagtgactgcagctcacgtccagtcaaccaagcatggggccgcaagctcaggaagtcccttcccgccacaccacagcctaattcttactgggcacggaggcaactcggtctacgctgggcacggacgacaaacagcgagacgccacgtgtggaatgatgcaacttcggagcacggggtgactttgcttgggaccgtgcccacgtgacagccccttatgcagaggaggaagagagaagtcgccgagtgggacggggaacctgtccagatagtcacacggtgtgtgggtgacacagctggggtgagtcgaggctggcccctgaggcccatgctccctgaactgctggggaccactgtcggtagcagggtctcaggaaaggctggtctcacctcc

SEQ ID NO: 3901 - DNA, 714 bp, Homo sapiens
  misc_feature (294)..(294): n is a, c, g, or t
agctcttcccgcaagtatacagaattgccccatggggccatctctgaagaccaggctgtggggcctgcggacattccctgtgactccacaggccagacctcaacctagaaagatggccacaggacttgcaactcagggtggtgtctgaagagcagagagtggcctggccctggagcctttttctagtcttttcagaatagatcatgggcctgaggcctccacttcttgaggtctgaggcccagcagcctctagaaggtagcctcctggtgtttgttctcccagtaaaatggttntgggcgataacttctagattattcctggatggccagggaggctctctgtctcagcaggtgatgacgggggtaccagggtgcctctgagacccattctcgtgtttccctgttgtaccttttgcctgcagggcagagagatctggtttctagcaaattcccagtaggatgtcatgtaagttccttccccctcttagagattgaaggctgtaagagtccagatggtggagccaggctgtctgggttcaaatgccatctttgacacttgcaagctaaatgacattactcaaattaatcgttctgcacttcagcttcctgtctatcacataaaaagaatagtcctgccaaaaaaaaaaaaaaaaaaaaaaaagaaagaagaaaaaaaaacgggggtttttgggggggggaaagggtaaaggacag

SEQ ID NO: 3902 - DNA, 1762 bp, Homo sapiens
cacgagcggcacgaggatttccagctcagcgatgcccccaggtccctgggagagctgcttctgggtggggggcctcattttgtggctcagcgttggaagttcaggggatgcacctcctaccccacagccaaagtgcgctgacttccagagcgccaacctttttgaaggcaccgatctcaaagtccagtttctcctctttgtcccttcgaatcctagctgtgggcagctagtagaaggaagcagtgacctccaaaactctgggttcaatgccactctgggaaccaaactaattatccatggattcagggttttaggaacaaagccttcctggattgacacatttattagaacccttctgcgtgcaacgaatgctaatgtgattgccgtggactggatttatgggtctacaggagtctacttctcagctgtgaaaaatgtgattaagttgagcctcgagatctcccttttcctcaataaactcctggtgctgggtgtgtcggaatcctcaatccacatcattggtgttagcctgggggcccacgttgggggcatggtgggacagctcttcggaggccagctgggacagatcacaggcctggaccccgctggacctgagtacaccagggccagtgtggaagagcgcttggatgctggagatgccctcttcgtggaagccatccacacagacaccgacaatttgggtattcggattcccgttggacatgtggactacttcgtcaacggaggccaagaccaacctggctgccccaccttcttttacgcaggttatagttatctgatctgtgatcacatgagggctgtgcacctctacatcagcgccctggagaattcctgtccactgatggcctttccctgtgccagctacaaggccttccttgctggacgctgtctggattgctttaacccttttctgctttcctgcccaaggataggactggtggaacaaggtggtgtcaagatagagccgctccccaaggaagtgaaagtctacctcctgactacttccagtgctccgtactgcatgcatcacagcctcgtggagtttcacttgaaggaactgagaaacaaggacaccaacatcgaggttaccttccttagcagtaacatcacctcttcatctaagatcaccatgtacacctaagcagcaacgctatgggaaaggaatcatagcccatgccaccccacaatgccagataaaccaagtgaaattcaagtttcagtcttccaaccgagtttggaaaaaagaccggactaccattattgggaagttctgcactgcccttttgcctgtcaatgacagagaaaagatggtctgcttacctgaaccagtgaacttacaagcaagtgtgactgtttcctgtgacctgaagatagcctgtgtgtagtttaacctgggcaggacacatctccctgcattttttttttttttttttgagagagaggtgtgatgagggatgtgtgtgtgcagcttattgtagaccattactactaaggagaaaagcaaagctctttcttattttcctcataatcagctaccctggaggggagggagaactcattttacagaacttggtttcctttgccgatcttatgtacatacccattttagctttcccatgcatacttaactgcacttgctttatctccttgggcattcgtacttaggattcaatagaaacatgtacagggtaaacaattttttaaaaataaaacttcatggagtaaaaaaaaaaaaaaaaaa

SEQ ID NO: 3903 - protein, 376 aa, Homo sapiens
MPPGPWESCFWVGGLILWLSVGSSGDAPPTPQPKCADFQSANLFEGTDLKVQFLLFVPSNPSCGQLVEGSSDLQNSGFNATLGTKLIIHGFRVLGTKPSWIDTFIRTLLRATNANVIAVDWIYGSTGVYFSAVKNVIKLSLEISLFLNKLLVLGVSESSIHIIGVSLGAHVGGMVGQLFGGQLGQITGLDPAGPEYTRASVEERLDAGDALFVEAIHTDTDNLGIRIPVGHVDYFVNGGQDQPGCPTFFYAGYSYLICDHMRAVHLYISALENSCPLMAFPCASYKAFLAGRCLDCFNPFLLSCPRIGLVEQGGVKIEPLPKEVKVYLLTTSSAPYCMHHSLVEFHLKELRNKDTNIEVTFLSSNITSSSKITMYT

SEQ ID NO: 3904 - DNA, 437 bp, Homo sapiens
gcggccgccttccactcgggctgtccggcggcggctgcctccgcccgcgtgtccgtcaagggtgccgcgggatgtgtgtcagtttacgcctctgagatcacacagctgcctgggggccgtgtgatgcccaaggcaagtcttggttttaattattattattatcattattgttacgcttggctttcgggaaatactcgtgatatttgtaggataaaggaaatgacactttgaggaactggagagaacatatatgcgttttgtttttaagaggaaaaccgtgttctcttcccggcttgttccctctttgctgatttcaggagctactctcctcctggtgaggtggaaattccagcaagaatagatgtgaagacaagccaccaggactcaggagggaaacgctgaccattagaaacctctgcataagacgttgtaaggag

SEQ ID NO: 3905 - DNA, 290 bp, Homo sapiens
cacgagggtagctggaggcgcgcaggccggctccgctccggccccggacgatgcggcgcgcccaggatgctgccgtgcctcgtagtgctgctggcggcgctcctcagcctccgtcttggctcagacgctcatgggacagagctgcccagccctccgtctgtgtggtttgaagcagaatttttccaccacatcctccactggacacccatcccaaatcagtctgaaagtacctgctatgaagtggcgctcctgaggtatggaatagagtcctggaactccatctccaactg

SEQ ID NO: 3906 - DNA, 721 bp, Homo sapiens
  misc_feature (497)..(497): n is a, c, g, or t
  misc_feature (572)..(572): n is a, c, g, or t
  misc_feature (598)..(598): n is a, c, g, or t
  misc_feature (605)..(605): n is a, c, g, or t
aggatccttaattaaattattcttccccccccgcgcttccgctccctcacagctcccgtcccgttaccgcctcctggccggcctcgcgcctttcaccggcaccttgcgtcggtcgcgccgcggggcctgctcctgccgcgcgcacccccggggcttcggctccggcacgggtcgcgcccagctttcctgcacctgaggccgccggccagccgccgccatgggtgcctacctctcccagcccaacacggtgaagtgctccggggacggggtcggcgccccgcgcctgccgctgccctacggcttctccgccatgcaaggctggcgcgtctccatggaggatgctcacaactgtattcctgagctggacagtgagacagccatgttttctgtctacgatggacatggaggggaggaagttgccttgtactgtgccaaatatcttcctgatatcatcaaagatcagaaggcctacaaggaaggcaagctacagaaggctntagaagatgccttcttggctattgacgccaaattgaccactgaagaagtcattaaagagctggcacagattgcanggcgacccactgaggatgaagatganatagaanaagtagctgatgaagatgatgtggacaatgaggaggctgcactgctgcatgaagaagctaccatgactattgaagagctgctgacacgctactggcagaactgtcacaaaggccct

SEQ ID NO: 3907 - DNA, 542 bp, Homo sapiens
ttttttttttccatggtaaacaatttatttttctacctcggttgcttacaggggaaaaaaaataaaacgtcatcagggagaagcacagatgaactatttacagagatgaagaaaattcacaatggctaaaacgtttgtgaggcaagcatactaggacaagttcaccaaagcaaagcaattcatagcaaaacaaaatatggagatggggaaaagccatacagatttgttctttgaaaaaaataatactcatggaaaagcctgcaggaaaataaaaggaaactaaccaattattacatcaagcatctttaatgagatgagccaaactgcacatgtagggtctcaaggacaatgacattcaaatgtatggattcactcacatcaaatgcatcaaatggaagcgtgcgggtcacttctcacaaactaccagcacagacaaagcagtgactcttgagggtccaactgagtggtacgtcattattccaagagagtgggtgtatttcagttagggaaatgaaggaagtcaagccatgggaaaagatcct

SEQ ID NO: 3908 - DNA, 2313 bp, Homo sapiens
acgagcatccggactagttattgagcatctgcctctcatatcaccagtggccatctgaggtgtttccctggctctgaaggggtaggtgtgatggccaggtgcttcagcctggtgttgcttctcacttccatctggactacgaggctcctggtccaaggctctttgcgtgcagaagagctttccatccaggtgtcatgcagaattatggggatcacccttgtgagcaaaaaggcgaaccagcagctgaatttcacagaagctaaggaggcctgtaggctgctgggactaagtttggccggcaaggaccaagttgacacagccttgaaagctagctttgaaacttgcagctatggctgggttggagatggattcgtggtcatctctaggattagcccaaaccccaagtgtgggaaaaatggggtgggtgtcctgatttggaaggttccagtgagccgacagtttggagcctattgttacaactcatctgatacttggactaactcgcgcattccagaaattatcaccaccaaagatcccatattcaacactcaaactgcaacacaaacaacagaatttattgtcagtgacagtacctactcggtggcatccccttactctacaatacctgcccctactactactcctcctgctccagcttccacttctattccacggagaaaaaaattgatttgtgtcacagaagtttttatggaaactagcaccatgtctacagaaactgaaccatttgttgaaaataaagcagcattcaagaatgaagctgctgggtttggaggtgtccccacggctctgctagtgcttgctctcctcttctttggtgctgcagctggtcttggattttgctatgtcaaaaggtatgtgaaggccttcccttttacaaacaagaatcagcagaaggaaatgatcgaaaccaaagtagtaaaggaggagaaggccaatgatagcaaccctaatgaggaatcaaagaaaactgataaaaacccagaagagtccaagagtccaagcaaaactaccgtgcgatgcctggaagctgaagtttagatgagacagaaatgaggagacacacctgaggctggtttctttcatgctccttaccctgccccagctggggaaatcaaaagggccaaagaaccaaagaagaaagtccacccttggttcctaactggaatcagctcaggactgccattggactatggagtgcaccaaagagaatgcccttctccttattgtaaccctgtctggatcctatcctcctacctccaaagcttcccacggcctttctagcctggctatgtcctaataatatcccactgggagaaaggagttttgcaaagtgcaaggacctaaaacatctcatcagtatccagtggtaaaaaggcctcctggctgtctgaggctaggtgggttgaaagccaaggagtcactgagaccaaggctttctctactgattccgcagctcagaccctttcttcagctctgaaagagaaacacgtatcccacctgacatgtccttctgagcccggtaagagcaaaagaatggcagaaaagtttagcccctgaaagccatggagattctcataacttgagacctaatctctgtaaagctaaaataaagaaatagaacaaggctgaggatacgacagtacactgtcagcagggactgtaaacacagacagggtccaagtgttttctctgaacacattgagttggaatcactgtttagaacacacacacttactttttctggtctctaccactgctgatattttctctaggaaatatacttttacaagtaacaaaaataaaaactcttataaatttctatttttatctgagttacagaaatgattactaaggaagattactcagtaatttgtttaaaaagtaataaaattcaacaaacatttgctgaatagctactatatgtcaagtgctgtgcaaggtattacactctgtaattgaatattattcctcaaaaaattgcacatagtagaacgctatctgggaagctatttttttcagttttgatatttctagcttatctacttccaaactaatttttatttttgctgagactaatcttattcattttctctaatatggcaaccattataaccttaatttattattaacatacctaagaagtacattgttacctctatataccaaagcacattttaaaagtgccattaacaaatgtatcactagccctcctttttccaacaagaagggactgagagatgcagaaatatttgtgacaaaaaattaaagcatttagaaaaaaaaaaaaaaaaa

SEQ ID NO: 3909 - protein, 322 aa, Homo sapiens
MARCFSLVLLLTSIWTTRLLVQGSLRAEELSIQVSCRIMGITLVSKKANQQLNFTEAKEACRLLGLSLAGKDQVDTALKASFETCSYGWVGDGFVVISRISPNPKCGKNGVGVLIWKVPVSRQFGAYCYNSSDTWTNSRIPEIITTKDPIFNTQTATQTTEFIVSDSTYSVASPYSTIPAPTTTPPAPASTSIPRRKKLICVTEVFMETSTMSTETEPFVENKAAFKNEAAGFGGVPTALLVLALLFFGAAAGLGFCYVKRYVKAFPFTNKNQQKEMIETKVVKEEKANDSNPNEESKKTDKNPEESKSPSKTTVRCLEAEV

SEQ ID NO: 3910 - DNA, 114411 bp, Homo sapiens
aagcttgtcaagtttttttttttttgaaaaaaaaaaaaaatacatacatatatatatatataattttttttcccctcactatgttgcccagattggtcttgaactaccgggctcaagtaatctgcccacttcagccttgcaaagtgctaggattacaggtgtgagccaccttgcctggctgcttgtcgagttttattttgaaatctcactcatatcctacactagtctaattgcggctaaatcctatgtacatgtttcagccctttccttccttgccccctctgtgttatctgcaccatttaaccctccattccttttttttaagacttgagttttgatcttgtcacccaggctggagtgcagtggcgcaatctcggctcactgcaacctctaccttctgggttcaagcgattctcctgcctcagcctccctagtagctgggatcacaggcacctgccaccacacccagctaatttttgtatttttagtagagagagggtttcacgatgttggccaaatgatccacctgcctcggcctcccaaagtgctgggattacaggcatgattcaccacacccagcccaaccctccgttcttaaatgatcctgtctcctcccaaacttccagaacaccactctgacctgactgtcctctacctctccagccacaccgcctcagtcttcttttgaaagtccctcaccctccatccagccttgaaatgtaggtgcactgcagagctatatctcaagacctccaaccacactacactctctcttagggctgatcttagccagctgctttaattaccagctgctaggaatgactcacagatgtctagctcagtccctccctctggcctgctttcactcccacgaagccagatgtttactaattaagactcttcacttggacaactcaaaagaacctgaagctaaatgtgtcacatgtctcttcagcaaagtccccacctcccccagactcaacccccacgctgttcttccgtgttcccagcctcagagatgagaatcagggttcgctcaggtgcccaaacagcagcctactatgtcttgactgcctgtgctcttcatccccacgcccaccatggtaagccagaccatgactagattactaaaaatctctcaacttcactctttgcccctagtctgaccctctcttcagtgacttctcactgtccttttgataaaggataagctttttttttgagatggattctccctctgtcacccaggctggagtgcagtggcacaatctcggctcactgcagcctccacctagctgggatttcaggcgtctaccaccacgcccagctaatttttgtatttttagtagacatggggtttcaccatgttggctggactggtcttgaactcctgacctcaagttatccgcccacctctgcctctcaaagtgctgggattacaggctgataaactctttaagtaggttaaaagacttgattccagtccaatttggctggaatctgaactcagaccttcctcaaagtctgggttcttcccttgctagttgacttttagcatgccacttgacccctcagggcctcgattttctcttcaggaaaatggggagaatattacccatctcctaaggtttctgtaaaaattaaataacatgttgtattaaggatcttagcacagtcctagctattcctcattccctacctccaattccacacttcagccacttacttcacatttgctgttctctgtccaacagtcctctttgccaactggctgcctaaatccaacctttaagttttgtctcgaacattattttattttatttttgagacagagtctcactctgtcacccaggctggagtgcaatggctgaatctcagctcactgaaacctctgtctcccaggttcaagtgattctcctgcctcagcctcctgagtagctgggatacaggcatgcgccaccacgccaggctaatttttgtatttttagtagagatagggtttcaccacgttggtcaggcgggtcttgaactgccgaccttgtgacccatccacctcagcctcccaaagtactgggattgcaggcatgagctgctgcacccggcctgtcttggacattattacctcttggaacctcccctgaccctcacaatatggcttaagagcacagacgctgaaaatagcctgggttcaaatcaattcttagtcacttattgcccccagaaccttaggttacataatccctctctgtgactcagtgtcttcctctgtaaaatgaggacgataacagcacctacctcataggtgaggatcaagtgaatttaatctcctgtttaacggagtttaatcaagtgaggatcaagtgagtttaagctcctaaagcttctagaatagattcttagaacagcaatgtggccgggcgccgtggctcacgcctgtaatcacagcactttgggaggccgagaggtgcggattgtctgaggtcaggagttcgcgaccagcctggccaacatgatgacaccccatacctactaaaaatgcaaaaattagccgggcgtggtggaacatgcctgtaatcccagttactcaggaggctgaggcacgagaatcgcttgaacctgggaggcggacggaggttgcagtgagccaagatcgcgccactgcactccagcctgggccacagagagagactctatctcaaaaaagaaaaaaaagaacagcacctcacccatgaagtccctgataaatgtcagcttttagcattatcgctaattgtcctgatacgcagatctcgagttgccctaggctatctgcaccgaatgaatataccatgagggtctgttgatctcaggagtctccagtctggctctaaagtgtctttcctgctctaatcctatcctccaatgtaaaggaaacattcttttaagcctgaagaatatccccaatcctgttcgccattaccccaaaacacacacagggacaaaacgggacatcactagattctccccctccccccgccaactccatcggactccagggccctgccaggcctgagggaccccagattagccttaccgccgtgccccaactcaatcaacaggcctccggtacttgcacagccccactccattcccccgccctgcccccagctccatcagcccccgggccctgcgcccgcccgcccgcccgccaggccaggccgcccgctgaccggtcctggagctgtaggtcgggtcgctcccgaggctcctcatagaagctgatgcccgggtgcgtggcgagggcccgccagagaaactcctgcgtgcagggttccaaaggcagcgggaagggcggcactcgcgtctccagccggctccacagcgctggcagacacaggccatcgagcccctccagagcgacttcgtccaacaacgactccagcgcgtccattgctacttcagtcggcggcgcccggggcgcatgcgcaacgcaccgccaagggccttggtccatcgcgcctgcgcacaacgatccggggcccggggaggtgggtcagacccagggttcggaggaggagttccagcgcgccggcatgacgtcactccccgggggcgggctcagtaagtggagctccaccgtcattggtccggggccccgcagtaaccaggggaactgcaaacagtgtagaggccgcttccggttcgagctcccggaaccgccgcctctagggatggacggtgagtgtctgtgggcccctccgggaggtcgggctgttattctcccatccctcccgaccgcgctttgggcagaatcctaggccatgaacccctggaccaccacttcctgacccaagggggtctccgaaatgagggatagggaggcttagtggtctggaacgcggaggagagcctgggggagtggtcagtgctgtgaccattctgctcggctgtggtcgtgaaggaaaccggtactggccgggagctcagtgaagggatgtagggtggggaaggagaagtagaggtctgaggagggtcttgtgaatgttgggatgtggaactgtcggatttgggagttgatatgaaaacaagcttgatcgtgggagtgcaatcgtcaggtgctgggaaagggaattggtgtggggggtgaagggagtttaggaaatactccctttctgtgccttggcgttaataataatagctccctttaacaaagtgctttccagtaccaagaactctgtaagtactcttgggcaacacctcgctaagcttcataccagccttttgagttcagcgttgttccattttacagatgatgaaactgaggctcagaggtgttaaggaacttgcccaaagtcaaacaaccagcatgtagcagagtgagtgagaaacccagacaccctgtctctggagctgaattatggagcttgagatttggaccggttttgagggtccctttattccagaggttgtaaatgcagatgtctgcagaggagagtctagtgagccggattgaggctgtaactgaaaatcaattcctcacctgaaaggaaagctgctcaccaagcaccagctgattgtcctcttggggtacttctcaaaaacagggttggccagtcactctgaaggccagagacagcttgtgggcccccatttagggatccctgattagagtcatggtattgacaattggaagcaaatggaaaataggctattctgatatctcactttgcagatgggaagactaaagtctagagagactggtagggtctgggctagagtccagatcatttttctaattacagcactgtccctcacttctcgggaatttgttcctggggaatccacattctttttatattcactgaatgtagtgtggagaaaatgtttttaattgaacattctgtcatatgcttaaaatatatcttttccctttgtactttagaggtactataaaatgtgctttaccattttgccttctggaaaggtcaatgtaatgttgctatagaacatcagtcctcaaaccttttaagccttgggacccctgtatgctcttacctcaaagagctttgtttatttatatttatgatatttaccatatcgaagatttaaactgggaaaatcttaagatgtccattaattagttcctttaaaaataataaaaattgggccgggcatggactcgtgcctgtaatcctagcactctggaaggccaaggcaggtggatcacttgaggtcaggagttcgagaccagcctggccaacatggtgaaaccttgtctctactaaaacttagccggacgtggtgacacatgtctgtaatcccagctacttggaaggctgaggcaggagaatcatttgaagccgagatcttgccactgcactccagcctgggcaacagggcgagactctgtctcaaaaaaacccaataataataataataattggccaggtgcagtggctcataataatcataataataattggccatgtgcagtgcctcacacctgtgatcccagcagtttgggaggctgaagtgggtggattgcttgagctcaggagttcaagaccagcctgggcaacatagctagaccctgtctcaaaaaaactccaacaacaataaacccattacttctgaacataaataatatttttaatggaaaacaattacatttgcctccaaaaaattaataggaagagtagcattattttatgttttttcaagtttattcaatagaaatagaaaaaactactctcatttctgcttcaggattcaaactgttttttgttatgctgttttggctggtgtgtatgaagaaaatttggcctcatacaaatatataattggagcagagagaaacattttaattgccttttcagataactgtagacactctcctttcatactatacaaaatttagcaaatgccagtttcttttttctttttttttttttttttgagaaaaagtctcactgtcgcccaggctggagtgcagtggcacgatctcagctcactgcaacctctgcctgctgggttcaagcgattctcctgcctcaacctcccgagtagctgggatcacaggtgtgaaccaccatgcccagctaattttttttatttttagtagacatggggtttccccatgttggccagctggtcgcaaactcctgacctcaggtgatcagcctgcctccatttcccaaagtgctgggattacagacgtgagccaccatgcctggcctgcaagtggcagttttttttttttttttttttttttgagacgggagttttgccgtcgttgcccaggctggagtgcaatggcctgatctcggctcaccgcaacctccgcctcccgggttcaagcgattctcctgcctcagcctcccaagtagctgggattacaggcatgtgccaccacgctcagctaattttgtacttttagtagagatggggtttctctatgttggtcaggctggtctcaaactgccaacctcaggtgatccgcccgccttggcctcccaaagtgctgggattacaggcatgaagaaccatgccaggccacaagtggcagtttcttaaatgttagtcacagtgtgtcatctgaagccttataggtgaacttttatactgtgttacattaaaatccattggtctatcttgccctttcattggctgctttacccatatatggttttataacatcagccattggtcgtttagaaaatgttggttcagtgagttatgcaaatctaaacgttgacctttcagatgccattatacggtatttaaaaaatcacatttgttaatatcaccacctatttcattttaaaaaggagtttaagtattaggaaactatcaaactcaaggtaatggaaacaagttttcaacttgttttcacttgacagcttgaattttaacattggcagcaaatattgtcagctgtttccttgaagtgacagactcacttatttcatatttgagaaaatttctgccaaattcccaagactgaataaccaaaatttgtctattattttatttactgccatgtactcacatttaaaacaaacaaacaattatttttatttaagaatgtcctgatggttgggttcagtggctcacgcctatagtcccaccgctttgggaggccaagacaagaggatctcttcagcccagaaattcaagaccagcttcgtcaacatagtgagactccatctctactaaataaataaataaaataaataaataaataaataatagtcaggcatggtagcatgcacctgtggttctagctgctaaggagactgaggtgtggggatcacttgagcccaggaggtcaagaccagcctgggcaacttagtgagaccccatctctgtaaaaagtaaaaaattagacaggtatagtggctcgtgcctgtagtcccagccactcaggatcagttgagcttaggaggttgaggctacagtgagccatgactgtgccactgcactccagcctgggcaaaaagaccttgtctagagagagagagagcagggggtggggtggggggagagaggagagagaaaggaaggaaggaaagaagggagggagaggagagagaaaggaaggaggaaagaagggagggatggaagaagggagggaggaaggaaggagggaaggtttctagtacattgtggtaacattgccttgattcagactgcaagcagttttacccaccattgctttgtgtcataagtacaaatgtcaacacagccagatggggtggctcacgcctgtaatcccagcactttgagaggccaaggtgggcgatcacctgaggtcgggagtttgagactagcctggccaacatggtgaaaccctgtctctactaaaaatacaaaaattagctgggcatggtggcacataactgtggtcccagctacttgggggaggctgaggcaagagaatcgcttgaacccaggaggcagaggttgcagtgagccaagatcatgccactgtattgcagcctgggcaacagagtgagactgtctcaaaagaaaaaaaattcaacacagtgaaatactcttcaaattatgattaaaatacttttgtctttgtggacccctccttctcccaggatctgcacctttgagaaacattgctacagtccattttcaggaaggctgctttgtgccttctaatgagcatctctgtacttgcagtcttaggacgttattgtagcctagtagaggggtatgttcattttcagattggcccccaaaaggaaaaatttattctcagaagtgtttaccctagggtcatatttgacctccaaagaatcccattttctgttctgattttttaaactttgatttacacttttttttttttttttttttttgagacagagtctcgccctgtcacccaggctgtagtacagtggcgtgatcttggctcactgcaacctctgcctcccaggttcaagcgattctcttgcctcagcctcctgagtagctgggattacaggtgcacgccaccacgcctggctaacttttttgttttttgttagtagagatggggtttcaccatgttggtcaggctggtctcgaactcctgacctcaggttatccacctgcctcagcctcccaaagtgctgggattatagccatgagccaccgcacctggccctgatttatacataattttataggcacatacctatttattggataaagtgaagcataccttattgtgattctaactaactaggtaagccaagcctggccttattagaaagatgtttacttcctacgttcacaaaagcttaaatgtctagcagatgccctccaaactggactgtaatttagtttattcggcatgtcttaatcaccatagcttttcacaaccctttccctggccttttgattttgactttgggcaggtcctatctgtttctgtgatgcagtgtaatgtccttaggtttgggggccagatagccctggatttgaatctctgctgtacactttgacctctctgagccttggttttcctgtcagtaaaatggacatgataatgaagcctaccttgttttgtggcttcaatgaaacaatgcatcaagtctggcatataaaaaaatgttcctggctgggcgcggtggctcacgcctgtaatcccagtactttggaaggccgaggcaggcagatcacctgagatcagaagttcgagaccagcctgaccaacatggagaaaccctgtctctactaaaaaaatgcaaaattagctgggtgtgatggtgcatgcctgtaatcccagccacttggggggctgaggcaggagaatcgcttgaatctgggaggcagaggttgtggtgagccgagattgcgccattgcactccagcctgggcaacaagagcgaaactccgtctcaaaaaaaaaaaaagttcctacagccaggcgcggtggctcatgcctgactttgggaggctgagatgggtggatcacgaggtcaggagttcaagaccagcctggccaagatggtgaaatcctgtctctactaaaaatacaaaaattagccaggtgtggtggcgggtgcctgtaatcccagatactcgggaggctgaggcagagaattgcttgaacctgggaggcggaggttgcagtgagctgagattgcaccaccgcactctagcctgggccagtgagtgagactctgtctcaaaaaaaaaaaaaaagttcctatatagtagctgttgttatcattatctgcaaataggcagacttattccacacagttgacagaagagggaagcgtgctgatgaagctctctagcagatgataacttttgtaattagcacactctttgcttaagagaaaatccaatgtttgacattttttattccatgaaggtacattggcagtgtgtgttttctgcctatgaaaatgttcgcctttctgttaaagttgaattttccccagtactttaaaaatatgaaatggtttaggaaaaaaaattctatttcattttcaaggaacataataattagacaaaagttcagcacattgatataattagaaaggatttggaagttgttcatttgcttttcactgctcccctagagcaaatattcaacatttcccttgtttatactgttcatttgcttagcaaactttctcaaataattaataatgccaagatgatatttagcctcacttgtccaaataatcccagactgcaaacaggtgatggttgaattaggaaggttttgctgagagtacaccatcggtttagctggtctctcctgtccttgtgtggtatttacctggcttcttggtgatttgtctgtttctcttactacttaaacccagcaaaaaaaataataaaataacaatcaaatgcaataaaacaaagcaagcattcagcaggtgaaataaacatacatcccatagactctttgtgtctgttctgttttcttcttgttccaatccttctatctgattagtttcttttctctcagattttttcagagttcgttcctcctgtcactttaacttataggaagtcggcccataatgttttgcttatttttccttatgagattcattccatgattcaacatttcagtgccttccgtgcattggaattcagagatgccaaaatgagtaagattgaatccaggtgaaggcgatatgggaattcattgtactattcttgacatttttctgtgaagttgatttttttttttttttttgaggtggagtctcactttgtagcccaggctggagtacagtggcgcgatcttggcttactgcatcctccgcctcccgagttccagtgattctgctgcctcagcctcctgggtagctgggattacaggcacatgccaccacgcccaactaatttttgcatttttagtacagacggggtttcaccatgttgcccaggctggtctcgaactcctgaccttaggtgatccaaccctaccccttggcctcctaaagtgctacggttacaggtgtggatttttttttttttttttttgagacagagtcttgctctgttgcccaggctggagtgcaatggtgagataactcactggtgcgtccatctcctggctcaagcgatcgtcccatgtcagctgtccaagtagctgggactacaggtgtgtgccaccatgcccagctaattttttattttttgtggagatgggggtcttgctatgttgtccaggctggtctccatctcctgagctcaagtgatcctcccaccttggcctcccaagttgctaagattacaggcatgagccactatgcctggctggaaatgaattctttatatcagagcttgcacaagtgggctgaaacagcccacatgcatgtttatttggctcataatgttttgttttttaaatttttgaattagttgtcaacattgaaaaatgagcagatttcttataaatacctgattgtggtattttcttgaaaatatcaataaagtctgttaacaccaaatcagaattctgcatggcaacaattgtcccaccacccgagttaagtggagactttgccctttaagagggaggtgggcctgtctaatgactggcttctctcattgtgtctgtcactcctaggcctgtcagcatttgtacttagaattctactttagtattaacttgtacagttgtgaaaactcctgtggacttccttgtatgccatactggactatacttattctttttgtttgtttttttgtttttagatagagtcttgttctctcacccaggctggagtgcagtggtgcgatctcagctcactacagcctctgcctcctgggttccagtgattctcctgcctcagcctcctaagtagctgggattacaggtgtgtgccaccacacctggctaatttttgtatttttagtagggatggggtttcatatgttggccaggctggtttcgaactcctgacctcaagtgatctgcctgccttggcctcccaaaatgctgggattacaggcatgagtcaccatgcccagtttctttttgttttaatctgaaaaaaagggaatatattatctgcctttagaaacttcatagtatggtgagaaagcagacataaacagatgactacatttcaacatgggagtccttagaagataatatttgtagaggtcttcccctttcccaaagcagtgtggcccactgcctgctattgtaaataaagttttattggaatgcagcagcaccctttcacatacatatagtccatggctgttttcttgcagagttgagtagttgtaaaagagacttatgtggcccacgggccaaaaatatttactatctgggcctgtacaggaaacgtttgctgactgttgccgtggcagatctgatttgattcctgagacagctcaatgggatactgtgattgtgtctgttttataccacacacctagtaggtagcagagccaggactcagtcgaataaggtctacacttggtagtatgttatggaaggcccatttcagccttgttactgccagtgtgtggccaggttctcacacctggagagtgagtctgtggggaagaactggccactgggctgatggaataatatacattttgaaaggtacccgttttgactacattcccagctccctcagcatctggtcccatgactgcttctctctttccaaatgggagtaggctaatgcagagcaatgtggttggttgcaaggaagaacttgaaactgtttgcagagcactttatgtaaaagtaagaaagtgtgactactgatgtcccatggggctttgcagctttaacaattgccctatggatcatatcaccttgaagtatagaatttctctggggaattagctcccctccagtctcatctttttagacacttgcctacctgctctcacacccagaggttttacactgcgctgtacagtgtctatcaatatgtttttccatattcaaaaatagtgatttcaggccaggcatggtggctcatgcctgtagtcctagcactttgggaggctgaggcaggaggatcagttgagcccaggagtttgagatcagcctgggcaacacggtgagaccccacctctacaaaaaattgttaaaaattatttgggcatgttgacacatgcctgtggtttcagctactcgggaggctgaggtgggatcaccttagcccaggaggttgagactacagtgagctgtgatcatgccactgcactctagcctgggcaacagagcaagaccctgtctcaaaaaaaaaaaaaaaatagtaaggtcatggtggctcatacctataatctcagcactttgggaggccgaggcaggcggatcacttgaggtcagaagtttgagaacagcctggccaacatggtgaaaccccgtctctagtaaaaatacagaaattagccaggcatggtggcacctgcctataatcccagcttcctgggagactgaggtgggagaatcatttgaatccaggaggcaaaggttgcagtgagcctagatcgcgccactgcacaccagcctgggcgacagagcgagactctgtataaaaaaaataaataaataaaaaatccaggtgtggtggctcacgcctgcaatcccaacactttgggagactgaggcgggcagatcacgaggtcaggagttcgagactagcctggccaacatggtgaaaccccgtctccactaaaaatacaaaaattagccgggcgtggtggcgggtgcctgtaatcccagctattcaggaggctgaggcaggagaatcgcttgaacctgggaggcagaggttgcagtgagctgagatcgcgccactgcagtccagcctgggctatagagtgagactctgtctcagaaaaaaaaaaaaaaaaaaaaaaggtaatttcacataagaacctggacttctcagtctcttgataaacagggtgctttgggccctcagcactttcttgtcacgtagctctggtcctctagcactgaacagtggccacccccttgacctgggacatgtgctgatgaccccttctggctggtgttacctgtcatctggtgctcacttcttccattgatcatattggcctcctttgcaggcatctgagatttcaatgccagcccgagacacttggggaggttggccatctctggagtacaccgtcttctttcgcacctcgctgccttgcctgtgctgtgttccctgccagctgtgcccttctttcaagtcacttccacactgtaaattgcagtgaccagcaccacctgcagaattagctactcccccatggcaggaccccatagctagtcaggcattgtgttgtatcacagggacgagctctatgcttttctccctctttgagggtagagactcacttctttcctttgtatgcccagcacctggcacaaggactggcacaggcagatcccatgagtgtttgctgggttgacactgtaaccaggaaagagattaacggatttgttccctagtgaattgctggacattctccataaagtagacaaaggaaagggccttgtagccaagcttccaggccaagcttccagggaccgtggctgcatcctttttgtcttttttttttcttttttttcaagacagagtctcgctgtgtcacccaggctggagtgcagtggtgtgatcttggctcactgcaacctccgcctcctgggttcaaacaattctcctgtcttagcctcccaagtagctgggactacaggcgcccaccaccatgcctgtctaatttttgtatttttttttttttttcagtagggacggggtttcaccatattggtcaggccggtcttgaactcctgatcttagataatccacctgcatcggcctcccaaagtgttgggattacaggcgtgggccactttgcctggcctggtcctttttctctagtggacacatatggtttccccagacaacccagtcctcatactattcccgctcctagcttcctttcctgttccccgcagctgcttcctctgctctcccattagcattcctgtcctggcccaatttcgtttcctagtgaagtcactttctctcccagctcccacttcacttcagagcccactgctaccttgaccacccttagcagtggaccctctgatttaacatgtcctttggggagaggaaagttatgggtaaacgtagcgcctggcaggaagtcagagcgctacagatatctggttacctgcagggcccaccacatttttctaaactctaagtgaacctgcaatgcagtgtgtggtgtgtgtgtatgtgtgtgtgtgttttccctgtaacgagtcccaaactatttagaaacatttcatgaactctctaatgtcacaaaagttagagttggaaggaacttgacagatgtcgcctagggtctcattttggggactctgaagtatcttagaaccgtgaagttcccttgcaggggtcacacatttagaggcctgcaggggccaggtaatgtaaatgactgtcctggccagagtttatttcattatgctgcttgtgtcagtttccaacacctaaatacacattgcatacccaagaatattcttcagtttcataaagaaatctgttgtcagccaggggcagtggctcatgcctgtaatccctgtactttgggagactgatgcaggaggactgcttgaactcaggagtttgagaccatcctgggcaatatggcagaccccggctttaccaaaaaatgttataaattagctgggcttggtggcacatgcctgtagtcccagctccttgggaggctgaggtgggcggatcactgaagcccagaaggttgaagttattatggtgagccatgaccacaccactttgactccagcctggccgacagagtgagaccctatctcaaaaaaataataatggtgataataataataggaccttcccataaggctgctaggagaatcaaatgaattcatccatctaaaacccttagaacagggcctggtgcttggtagactctcagtacaaattagctatgtggagaaggaacacatctctttccttaggattctgggagatctcatgagctacttccaacgtttctcaaggcagattggcagatcatttttgggaggtgcagatactcagaagacactttaattaggttacacatacatacccatgcacgttttcacaagtgcaaagtcttcactcatacactatggggaactggaatggctggatgagacttggttggagtgccagagtgggaatgggtttaggagcttgtctgatggatacagagatagactgaaatatatttcagcctgggaagcgtgttgtcacataagccgctgattagattacagaagtgtagcatttacttatctttactatttcaaatggaaaaaaaatcaatattttccaattatcttcaatggggtattaaactgactttgtcatatttcgtttcaccatcccagaaagagcagggggaagggatcaggaaagcacattgcaagagcagatgacatctctactgcagaacacggtcatgccttctgtccctttcagcattgtctattcagaaattcggtcatttactcgttcatccatttcagaaatttctactgatgcacactccattctaggcactattccaggtgtggagaattcactgataagccagatagcagcctctggtttcatggggcttatttttagttggggagacagactacaaacatattaataagaaaatgtcagtaagtgccatgcagaaggttaagacggaggactgagggctgggtccctctggagaggtgggtggttttaagctgaaatctcattgctaagaaggatccctcataagaccaagggcatgagtgctcttggcccagaggagagagctaaggccctgaggcaggaaggagtcttgggtctacggagcagaagagggatgtgggactaggtgcagtggtgcacgcctgtggtcccatctgtgcaggagtccacttgggtgtatcgcttgagcctgggaggtcgaggctgcagtgagctgtgatcacaccactgcagtccagcctgggcaatagagcaaggttccttctctaaatacaaagaagaaagactgcagggaagagggctgcagggaagagggaggagaggtccaaaatatcccgtgggccaggccatgcagagcctggtcagaatgaggcttggattcttttctgcatgcacagggaaacattagaagttcaggcaggcaagtggtagggtctggtttttatatggctgccataggaaaatccaggcaagagtggaggcagggatacctactaggtggctgttgaaaaagttggtcacatgcagtggctcatgcctctaatcccagcacgttgggaagctgagatgggtagaattgcttgaacccaggagttcgagaccagctaggcaacatagtgagacctcatctctagtaaattaaaaaaaaaaaaaaaaaaaaaaaaaagctggccatgatggcacatacctgtgtcctagctacttaggaggctgaggcaggaggatcacttgagcccagtaggtcgagactgcagtgagccatgatcatgcccactgcactccagcctgggcaacagagcaagaccctgtctggaaaaaagaaaaaagaaaaagcccagggggagttgacggggcctggcttggagagcgggatgataggaatgagcaggttccagatctatttggaagcccaagttcagttgaactggctgagatccatgaatagtcagcagtttatgggaactaataactgctaagtacctactgtatgcagggcactgttctgagagttttacatgtagtgccttaaccctgacaatagacttaaatggagtcaggactaataggactcccaaatgggtaatgagtagctaagagagacgggctgacccagagcctcccctctcagccgccacacagcattgtccccaggctcttacctaattatgaagctcccagaagaacacatggctaagcatttctaaaccaagcaaatgcgcgttaacggtgtgcaggttataaataagcatttctgtatgccagctgctgtttgggtttggaaaggaaaagaagatcttagcatgacttgtttatcccaggtaatttggcagtaaactgggccccagaagtcaagttacacagaaaatgcaaaggaaaagtgacaggggtatcatatcaggctttccaaaaaggaaggtaacttaaaggcccacatcagcctggaggcacacgtggggaatgaagggaaggggtgttgcagagccggtgtctgcctggcttgcttgcttgcttgcttgcttgcttgcttttttttgacggagtttcactcttcttgcccaagttggagtaatggcgcaatctcagctcactgcaacctccgtctactgggttcaagcgattctcctgcctcagcctccatagtagctgggattaaaggcatgcgccaccacacccggctaattttttgtatttttggtagagacagggtttcaccatgttagccaagctggtctcaacttctgacctcaggtgttccgcctgcctcggcctcccaaagtgctgggattataggtgtgagccaccacgcccggccctacctggctttcaaacagtcctgctctttgtctaatagatttctgttgttttagtgggatgtccttaaagaagtcccctcaaaacgggtccatggcatcaagataaagaaataataggagtccaggcgcggtggctcacacctgtaatcccagcattttgggaggccgaggcgggtggatcacctgatgtcaggagtttgagaccagcttggccaacatagtgaaaccccgtctctgttaaaaatgcaaaaattagctgggtatgatgtcgtacccctgtaatcccagctacttgggaggctgaggtgggagaatcacttgaacctcggaggcagaggttgcagtgaggcgagattgcgccactgcactccagcctgggcgacagagtgagactctgtctcaaaaaaaaaaaaaaaggaaagaaaagaaataatgggaaagtcaggcatgctgcttcacgcctgtaataccaacactttggaaggcaaaggtgggagattgctttgaatccaggagtttgagcccagcgtgggcaacatagtgagacccctgtctctacaaaagtaagttttagccaagtgtggtggcacatacctatagtgccagctattctggaggctgaggtgggagaatggcttgagcccaggagtttgagactgcagtgagctatgatcacaccactgcactctagccgggacagcagagtgagatgtctcataaaaaaaacaacaaaaaaacaaaaaaaaaaaacaaaggaagagtgggaaagtgggagatctgtctgcctagttatgtactgagttggaaactagaggcctgatttttttagcctgtacagagccttaaaattttttaaattattaatcatttaaaaattagaagactggatttatcacttctctggaaaatctaatccatcaaaaccaggcccacctttctgtatggaaaccagcagctgttttttttttttttttttaagagatggagtcttgctttgttgcccaagagctgctcccaccttaacctcccaaagtgataggattacaggcatgagccactgtgcccctcctgggcagctgttcttaggacaccttgtccccatcctgccaccttcctctgtttacctcactccaacacatgcgtatctttgcaaacactataggtagaagccagaatcaaggttcaggaagccggccaggcgtggtagctcactcctgtaatcccagcactttgggaggccaaggcaggcagatcacctgaggtcaggagttcgagaccagcctggccaacatggcaaaacccagtctctactaattcaaaaatacaccgggcgtggtggtgggctcctgtaatcccagctacttgggagactgaggcaggagaatcacttgaacccaggaggtggaggttgcagtgagccaagattgtgccactgcactccagccccaggcgacagagtgagactctgtctaaaaaaaaaggaagttgaaatgggggtatgggggtgggggtagtaatgacagggagtgctctccttcctggactggaagaacggtgtgcaggcagcagggtggggcaagcacgctgagcatactgggtcagccgttggactaatgggttgctaacccttccttgcttccttgttgtgtgaccatgggcagtttgctttgcttctgtgacccatgcggctttgtcattgcaaatggtaggaaatcccaagagctatcacccggggaagaagctgacaatggcaggtgctcagaaagcactggagaaactgactccctttgaaatcagatcgtcagacaacccatctgcaccttcctttatctttttttttctttttctttttcctttctcatcttctctagccatttcataaaaactttgccctcaaataaatgagcaggtcaccaatagcctattggcttcactaaggaactgttggttcaatttccagaaaccgtattttgtcatcgtttcattcttatctctcacacattactgattgatctcttaaaagaagtcagtttgtcctccaaaaatattgtgttctctttccagcaagatttggggtcctgaggttcacggaggctcctccatctccctctgacagaccacctgccccatcttaggtcttggatgggagagtctttagcatttctcattatgttatgttttttacacatttaaatcagcctttggacattgcatattttaagtttgttttagctttttgaataggaaatagatccaaatagatcattcaaaaataaaaataagaccaggcacagtggctcacgcctataatctcagcactttgggaggctgaggcaagaggattgcttgagcccacgagtttgagaccagcctggacaacatagcaagactccacctctacaaaaaggtaaataagctggatgtggtagcacacccttgtgttttttttctgtttgtttgtgtttttgttgttgtttgagaaggagtctccctctgtcacccaggctggagtgcagtggcacgatcttgactcactgcaacctctggctcctgggttaaagtgattctcccacctcagcctcccgagtagctggcattacaggcacctgccaccacgcctgggtaatttttgtatttttagtagagacggggtttcaccatgttggttggccaggctagtctcgaactcttgacctcaggtaatccacccgcctcggcctcccaaagtgctgggattacaggcgtgagccactgcacccagtggtggcacacccttgtaatcccagctactcaggaggctaaggtgggaggatcgtttgtgcccagcagttccaggctgtagtgagctatgttcacaccagtgcattccaggatgggcaacagagcaagactcagtctctaaaagataatagtaataggaaaataaaaataaaaacaatattaaaaaacataccttaagagtccttcacatgcctctctgggtagttctttatgcaaatagaaccaatatgagtatatattttgattttccctttttcttagagaaaaggttacatgcaacatatactttctggtcttgatttttttttccacctaaaatatgaccatcttttaaggatatataaggagtagaatatgagaagcttgctcattctttcagctttacagtgttcaattacattgtgcggattcatcatatttgttcagtgacttattatttctgatatttgctattacaaatcatgatacagcaaataccttgagcatatgtttgtttcctatttgtggacagatgtcttcacggctgattcctagtagtgatattgctagctcaaaggaaaaatgcatttgtgcttttgagggattacaggtgtgagcaaccgggccttgccccgggaataagaaataagtttttttttttgagaccaagtctcgctctgtcgccaggctggagtagtggtgcaatctcggctctgtgcaacctccgcttcctgggttcaagtgattctcctgcctcagcctcccgagtagctaagactacaggcacatgccatcacgcccagctaatttttgtatttttagtagaaacagagtttcaccctgttggccaggatggtctcaatctcttgacctcgtgatctgcccgcccgggcctcccaaagtgctgggattacaggtgtgagccaccgcacccggccggaaataagttcttaatccaaaactcttgtgatggggaggcccttacactggatttctttacctgcagatttctactgagttccttttattctccaaaacctgacctttcatgccaagactgagcattttaccagactcgatgggagtgagggtctaatgtcagtgctgggctcttacctccacccccaccactcccctcccacctgaagaggataaatagagggagtgattacaatatgaatagtttaattaggaatatcatgaaattatattctgcatatatatttttatcatgtactatatacatttccatatgcatcaaatatgcatgcatattagtctacagcagtggatttaaaaagctatgtcctgtagactgtactttacgggttgtttaagactctttatcaagggtaattttggcactgattttccctttgcctgatgacttcagaaactaacatccaagaagatgcgactcccctctaaatggtagcgatgaagattatcttcatctagagcaaagtgtcagaatgtgctaaccattgaaaacgaatcctatgtgcagataaaaccttgctgaaatcataagtgggagaatagtattgtagttacaaaattcaatgcagtcacttctttttttttcttttccccagacagacatctgttctataaagtgaagtatattggccttatttattgcttcatagctgaagcaggcaggtcaccctgcaaaattcagaggaacacccccttaattttgcaagtggcatatattgatattaatgtcacctttttccacttccttctttgagttgttgtgagaataaatgagatataggtaggaaaatgctcagagaagctaagtgcggtagacaggcacagtgtaatctggttacagcacttccatccttgacaggcaggagctgtcttcgcatcgagctaatctggaggagagagaaaggctcagtggtgtgaggactgggccaaccagtcttctagggagtttagataataaatgctcttaattgagtgaattatcttcgttggaaaataagcaaattattttccgatttaatgaattaaaaagcttctaattaactccagtagaaagatttgcttttatgttttattttattttattctttttgttttgtttgtttttatagagacaaggtcttgctatgttacctaggctggtcttgaactcctggcctccagtgatcctcttgccttggcctcccaaagtgctgagattacagacgtgagccactacatctgtcctactttcacattttagtagttaagctctatgttctttgcattaatgtaactgaacgactgaacgcaggtctcatgcttgctgcttgcagagttcggttaataagagtgaggtctggtaataagaaagtgaatttattaaccaaaactaataaagggaagtggtcagattcctatccaaagtaaccacttccattttgtggaggaagaaaactccagttttcccttacaggagtgagccaggcgcagtggctcactcctgtaatcccagcactttgggaggcctagacaggcggttcacctgaggtcaggagttcgagaccagcctagccaacatggtgaaaccccatatttactaaaaaaaatacaaaaattagccaggcatggtggtgggcatctgtaatcccagctacttgggaggctgaggcaggagaattgcttgaacctgggaggcagaggttgcagtaagcggagatcgcaccactgcactccagcctggacaacagagtgaggctccatctcaaaataaataaatacatacataaataaaaagggaaaacttgataaagaaggcatgcaagaattgggctgagtactatctgtgtgtcttgttcgggtggccatcttgggtcccagtctacctggacattgggctggcgtcatctctacaatggccaggttgttaactcgccaccgtgaagtcatctctgcaattttgcagctgggtctccaggcttgctccaagattagccgctggaacttctaagaaggcacataggcaaatactagtatacagttagagaaatgtgaagacagtatatacggtgagaaagggagggacacggagtctattttaaggctaagagaaaaggcttctgcagtttcctttaaggttcaatcttgaaatccaagagaaaggggaaaaaaaagttttcaaatgcattttgaagttaagctgcccagttacgttaatattttggtttttgtttgtttgtttgtttgttttgagacagagtctcactcctttacccaggctggagtccagtggtgcgatctcggctcactgcaacttctgcctccgaggttcaggtgaatcttgtgcctctgcctcttgagtagctggaattacaagcatgtgccaccatgcccggctaatttttgtatttttagtagacatggggtttcaccatgttgaccaggctggtcttgaagtcctgacctcaggtgatccacccgcttcgacctccctaagtgttagaattacaggcatgagccaccacgactggccacattaatgttttgtttttattgtccaccttaattttttaaactgttctttattagtataacataattttagagatgaaaagcaaccataaagatgattcagcctaactcttaaagaaaaaaaaaaaaaactatggcccatagagacctaatgacttatccaaggtcccatagctgtcacttgtccctcaggaccagatccccaggaggctgtgtggccagcaaagcaagggcctcagtcaggcgctgggatctgccgtgctcaccctggaggagctctgctccctcctgctgcctgctcttgccctgggccctgtggggccctgcagggccctgctggcatctcactggcctctgcactactcctgctgccaggacaccccagtctgtcagtggcccagaccccaacccgctttgtgcctagcagctcagggacagtcccttcgctctgcatgatgaggcctgactacctggcatgtcattttccctggccagccttagggctcactcggaatccttagactgacagccagagccgtgtggtcaagggtttctgggagctgctcattctagctcctatcccagagcagcaagcctcaggaggtcctgataaaattggcctaacaatcaaatctcttgatccctaaatcctgggggtgtgtgtgtgtgtgtgtatgtgtgtgtgtgtttaactaataaactggtttttagagcgttcagcaaaattgagcagaaattacagagagctcccatatacccctgtccccacatacatctccccaactatcaacaccccacactgggctgggtgtggtggtttatgcctgtaatcccagcactttgggaggccaagtggggtggatcacatgagcccaggaaattgagaccagcctgggcaacatggcaaaacgcccatctctataaaaaaaattttttttttttaaagaacaccctgtattacagtggtacattatgctggtctctttttcatccttaaatcctaggttctttgtcttaaggcaaaaaagaaaacacacacacacacacacacacacacacacacacacaatgaagacaaaggcaggcatgtagccagtttcagattagttcattctatccgggaatcctggcctctgttagtctaccccaaggcttgtggctggtagtaactcagcatgacagctcacacacggagatagccctgccctgtgtctccctcttctctgtctctcagaaccaattccaaattcctgggactgggattctgattggctgcagttgggtcagaggtccatccatagcacagcatactgaggttcagggcgtgggattatgtataatcatggctgcccagaggccccactgggtggacagaggggagaggaagagagaggagggcagtttagggtatcattatgagctgaccagataaaccaaaagatgtcttctcccataccatgatactgtatgatccatgccctcctgtaaattctccagtggcctcatttcgaaatccttttacacattggccttagagtctggccgtggccagcggttcttcctaggccttggctcttccctttattcacactttcttggcaaaagcatcatcccttgagctttatcaccagctgtgacccctcccctacccctcactcacgtgcagacttgctagaagtgaccatgtccaaagacgtgtcttttctctgagactcagtccccgttgctttcctcttgctaagctgtcactaagcattttttgcttctgtcttctgagtgctcttacctaaggggacactggttgtggcattttcacaaatagccactggggagtaaagttgggcagtttaggagatacattgacaataatgcagtgactcttgttttatattttcaaaccaaagcaatccattaattttgcatcaaggcattcctttataatggacacttccataaaagttgtgaaaactgcattcgaaacagcatatttaaacattatgatgtcactctgttgaatttatgcacaccttcaaatgttagtcttctagctcccccagaaaagcagtaattctctctgaaattgcctattatatgaaatgcaggtgattaccactaattcacatctgcactgtcacctatgtggtggatttgggggtttggtgcagcacgttggtatgctctcatcaaagggtatgtgtgtgtgcacagaggaaggcattcttgtggaaggcattttatgtaattccaaacaatttaataaaaatgtaattcaaaggggaaaactacagtccctcagccctttcagagtacagataatgttccagattaaaggctggagctttgttcattatagtcaaataatgtaagtgtgtgaattaccattttccttgccgttggtctatttcaaaagtgtgccattttcccattataataataggctgcattttcttaaaatcatttgattatgattggtcccatctattcagtttgcaaataaaaatcttttgtgttgataaactagctgttctaaaacagccttaatcttggttctgcttttgaactgcgacaggtcagactctgcgaaaggccgagagaagctggtcctgctcacgagagaaaaaggaggtaaatgtgtccctggcgagggctgatgggaggcaactctatttgaaaggacctgagggagcagggtggcgaataagtgtccctaaatatactcttttctcttggggtcccaagcttgaatcctggagcaaatgatagtgagcaactagacttaccaacccagtgtcacttgtaataatcacttgtaataatcacttgtaataatcatctctgagtgtatcagttaactttgtctgtgtaacaaatcatcccagattttagtggcttaaaacaacaaccatatatttagttctggatttggtgggttagcagtttgggcttatctgggcagttctgctgttggaccaggctccgcatggtgctcactcatgtttctgcagttcatggctgtgtcgactggggggtagttgagtgtcagggtgcctcagttctcctccacacctcacctcttaatggtatacatacttctcatctgccagcaagctaggcagattttttcacatggtgcttcaagggctcaagagtgcaggagtggcaactgcaggacttcttgagtcctaggcttacaagtcacacagtgtcacttctaccactttctattctttttttttttttttttttttttttgagtcgagtcactctctgttgcccaggctggagtgcaatggcgtgatctcagctcactgcaacctccgcctcccgggttcaagcaattctcctgccttagcttcccaagtagctggaattacaggcgcctgccaccaagcccggctaattttgtatttttagtagagatggggtttcaccatgctggccaggctggtctcgaactcccgagcccgcctcagtctcccaaagtgctgggattacaggcgtgagccaccacacccggccccactttctgttcttgaaagcaggtcacaaggtcccagattcaaggggtggggaaatagatctcacctcttgatgggaagagctacaaaatattgtggccattcttgaaatccgctaccttcccccctccccgcctctgagcccacctactctgtgccaggcaccagggggaccaggactagaggttaagtgaaacacagtccttgatctcagagtatgcactgtctagttggaagagagctacagtacaatagttacaatacagtgtgagaagtgctatcacagaaggacagagaaagtgagattttaatacagaaaccagtcacctgactcttccagcaatatcaagaaagcctttgcagaaaaggtgatgtgcaggctacttcttgaaggatgactaggagttttccaggccaaggaatcagtacagtcaaagtcagagagacatgaataaggaaggttgcaagatcatggtgcctaaagcaagtgggaagtggtagcaaggagccataggttactccagggccctttgatcatgtcccaggcttatgagaatataaaattgagtcttatttagtggaggtgggacaggagtgcaggggagataaattgtgtggctcatcagaaacactgaccaatcgagaaattcatccagacatatctaccaacacttttgattgtaaagtgtcatcattcctataatgaaagggcatttgtcaggctcagctgggtccagggcctcaaaaatggcaagaagacctggtctttctccttccatctctgggctgtcccggccagctctgaggagtaagctggggctgaactgcactcagcgtcgtgtgagttacatgaccttcaccttctcctgttgtttccttcatcagctgtaaccagaacagccagtttgcattttctttttctttcaatcagcccatctaggatgagggctggacgaagccttaggaacttcgctgctgctgaaaagatctaagtgtcgcccaagtgggcagtctaggggcaaagccagggtggattttcccactccttctggtaaggaatctttctctggaggcagaagcaagtgcctgtcttcccacagcatccttccagagaccctgaggtagaggagcagggatggaagtgagcccagacctgcaggccgccctcagttaactgacctggggtgaagaccagcctgcaagccaggaaagaaacctgaaacccacccctggcctttggtcacagaatagcagcatcctatttctccacattaagaaattaactgggaaaccatggagcggggcgggggaaactagttgagatactcttcccttctctctctgtctctctctagctacgggactcccctaattgctgctttcccagccactcccattgtgcccatcgcccgagagcatttcagatcatttctctcctgggaagtgcttgtagtgagaaacagagagtgaagctgtttatcacaatacccaggcttaacctggaaagatatttcacttggtttcaggccttttgaaaaaaggagagtgctaactctcttaacagagcttttgttcggttagaaaaacaaaacaaaaaaccaaccccaaacaattattttaaaaataaataattaaataaataaaggcttggcgaagtggctcctgcctataatcccagcactttagaaggccaaggtgggtggattacttgagcccaggagttcaagaccagcctgggcaacgtggtaaaatcccacctctactaaaaaacaattattaaaaacaaaaaaacaaacaaaacaaaacaaaaaaaaacagcaagctgccaggactctcgtctgacagattataacatgccttttccacccacctcttctttctgcatcctatgccctctctcctgacttcccaaccctctgtgccttacccaggatgccaggtatagatcaaactatgtcaccatgaaaggcaaggagaagaccagctgtctctttctcagagctggttagaacaaatgttgtatttctcaaggtggtaaggtggtgtggccagcgcactccctggagggtgaacacgtggtggtgaggtggtgtggccagtgcactccctggagagtgaacacgtagtttccagcctgggttgggatcgggtacttctttgagggatcttaagccaccatgacaaagggagggtgtggctgttgtcaatgaactcaccaggccaaattcagcccaaagatatgttgtatctagctcgtaccctgttataatttttaaaaagtaggtgtccacatttaaaagttgtggattttttaaaatgtttaaatccacatttaaaatggttaaatccacatttaaacattgccaaccacggtacttagcaacatctggatatttgaaagctcccaggtagccgagtgtggtggctcacgcctgttatcccagcactttgggagactgaggcgagaagattgcttgagcccaggacttcgagaccagcctgggcaacataagcaagaccctttctctacaaaaaaattaaaaaaattaaacaggtgtgaggccaggcatggtggctcatgtctgtaatcccagcactttgggaggctgtggtgggcagatcacctgaggtcaggagtttgagaccagcctggccaacatggtgaaaccctatctctactaaaaatacaaaaattagccggacgtggtggcaggtgcctgtaatcccagctactcgggaggctgaagcaggagaatcacttgaactcagaaagcggaggttgcagtgagccgagatcgggccactgctcttcagcctgggtgacagagtgagacttgtctcaaatgaaatgaaatgaaataaaataaaataatgaaaatcaggtgtggtgtcttgtgcctgtgatctcagctaccctggaggctgaggcgggagtatcgcttgagcccaggagttcgaggctgcaataggctatgatcacaccactgcattccaacctggacaacaaagcaaaaccctgtctcaaaaaaaaattttttttaataaataaaataaaagttcccaggtgattataacgtgtagcagtttgagaaccactggcataaagcagtcagcacagggcctggtgcaattcattcattcatacatttattcattcattcatacttatataactaacccaatgtccaggcctctttccaaaccagttaggtcaaaatatgtgggtgtgcaacctgggcatcagaattttttaatcccctaagtggttccaatgtgcagccatgcatgagaaccagctctttccatggattaagtagactctggcatacaaaaattagccaggcgtggtggtacatgcctgtagtaccagcagctcaggaggccgaggcaggagaatctcttgaacccaggaggtagaggctgcagtgagccaagatcacaccactgcaccccaacctaggcgacagagtgagactctatctcaaaaaaagaaaacaaaataaatagctctggctgtcgacccaggtgcttctttgtaccctgtgcctggcctctctggccctaaaggcacttcagttctccaccgctgccacagataccaggaggcaaaaccaaagaagagaatgataaacattatagatgagccccaaataaagctccagggagtgccagaggagggaaagacttcctgggagaggtggcctgaacggaggcattggaaaggttacggtcatttctttttttttgagacatagtcttactctgtcacccaggttggagtgcagtgacacaatctcagttcactgcaacctccacctcccgggtttaagtgatccttctgcctcagcttcccaagtaggtgagattacgggtgtgtcccaccatgcctgactaatttttgtatttgtagtagagatggggtttcatcatgttagccagtctggcctcaaactcctgccctcaagggatccgcccacctcggccttccaaagtgctgggattacaggcgtgagtcactgtgcctggccaggttacagtcatttctgaaaaatgtagctttgatggttggcttgaagtcagtaggtaatttcagttcagctggtaaaaatattcttagcctcatttctaacaagtattcatggttcctgcctgtggagattatatagtgtttatggcccttggacatgaattattaatgattttgaaattgtggtcattgtagtttactcaaaaatcattaggaagtaaatttatcatgcagtgttggaaaaaaggagatcacagaggaggaagaaatatttattcatcttccaattcatccctacagcatccacactggtgcccagggcactgtggggctcatgagcatggcgctggggacatgtccccttactgctcagagccactgtgaggccactgttgactctgtgaattaatacctccagtttgctgtgagggctgcagttcaggtcctgaggccaagcagctctgcctcaaatcccagctgtgtgaccttggacttgagccctctcaccttgtttgataatgtccactttggagagggttaatacagtcatgtattaacgtacctagcacagtgctgggcacaccataagtgttccatagatgttagttgttatattacttgaagtgtctaggatttaacagagagattcacaaggagaaggcagcacaattaattacactttcacagaaggggcctccctcactccagccagacttgaggctgattccagccttcctgcttcctggctgtgtgtccccaggcacctgggcccccaggcaggctagccccagggccctcattcttaaccactctgagagcctcccatgataacggaaggccgtttttgcagttgattggagattccaaaaaatgctcttgacagcacactcatctgctgaactgactttgcaaggattgcaaaagtcattgaactcacccaactagaaaatgttaagccttccctttgcatgcatgcacatgcacacacatacacacacacacaccttcctgctagtaacagagacttctggtacaaggctagaggcttccttcatttttcccaagcagaagaggagacaggtctgaggggaacacagcaatggagggagtacaggatccagggtgcctccagggacgaggttatctcgacagccctctctgtctcttcagtgtgcaaccacagacacacctctgctctcctctgggtcttctgggtctctttatcttgttgctatcttttttgtttttttgttttagacagggtctcgctgtgttacccagattggagtgcagtggcgctgtatcagcttactgcaacctctgcctcccaagttcaagtgatcctcccacctcagcctcttgagtagtggagaccacaggtgtgcaccaccagacccagctaattgttgtattttttgtagaaacagggttttgccgtgttgcccaggttgatcttgaactcctaggctcaagcagtcctcccctcttggcctcccaaagttctgggattataggcgtgagccacctagcctggtccttgttgctgtcttgatcctcctattagctcttcctcctctataagcccaggccacaggccagtgagagagtctggcctggctaatcaatactcaagagtattcagggaatacaatattcctgacaccagtcttcatttgccctcccaggaggcaacgactataatcaatttcttatgtgtccttctagaaatattctacaggtatgcagctatgcagaacatatgctttgtctcctttacccacccatccattcccctcatgcaatacacattgttttcttcttgattttttttttttttttttcatttaacaacatgtcttggagagcattcctcagcaggtcatagggacagacctctctcttttcatggctgcctagtactccattgtgaatttacaggaatgtaattctttactcgaaacatttaaggccaaatatatttcatttttttatatttaaaaagttataccatcctataaggacctggaaaagcactctataatcaaatacattaatatatgtacagaactcattgaggtggctgatgcttgttatcccaccagctacttgggatgctgaggtgggtggctcacttgaccccaggagtttgaatccaggttgggcaatatagtgaagccccatctctaaaacatatatatatataatgtatgtgtacagcaaaatatgaatatttatactaagtgggtaaataaaggctataaattttatgtcatttcaggtcaggttttggtcctaaataattgcataaatgtattactaattcttgattaatgaatatctagtcattaatagtcttttgctactataagaatactttaaagaatattctggagcagacatccctgtgcacataggaatagccaaaggttaaatgcttaaaagtagaactaatggatcaaagggtgtgtgttctatttaaattgatgtttccaattcatcttttaacagtgcatgaaagggatagagctattttttttcccccaggttatcttgtagcaagctgaccagattcaagtgtggctgtccttgaccgaggtgcccacaatggacccattcagtgaccactcctatagttccctagttcacttgtcttgtgggggtgagaggagggacgtttacttgagaaggacttgggggtatatctagcaccttgatttcttttgttttaccataggtttggggggaaccggtggtatttggtaaaatgaataagttgtttagtggtgatgtgtgagatattgatgcacccatcacccaagcagtatacactacacctaatttgtagtcttttatccctcacccccttcccaccctttccccctgagtccccaaagtccactgtgtcattcttatagcctttgcatcctcatagcttagctcccacttgtaagtgaaaacacacaatgtttggttttctattcctgagttacttcatttagaataatagtctccagttctatccatgttgctgcgaatgccattaattcattcctttttatggctgagtagtattccatcatatatacataccacagtttctttacctactcattgattggtgggcattttggttggttccacattgcaattgtgaattgcagcacctcgatttctgcaagccatctcttgcagccctgagctcgtaagatttgtcttggctgattacaggctgattacagaaaagacaggtgacttttctgtgagtttcagactccactagcgcgcaaactgcagatacttccttcccttttctccattcagttctccgtgttcttgcaatttcagtcttgttgccccgtccatatttacagatctcaattgctttgttttaaaaaaagtttttttaaaggaagaaaacaaaagaaaaggcaagttggtggtgttgcattacaaagagcctggtatgacagctgacattccaactctgcacttttacgggaatgaaaccttttagttcatatttctgggcagagaagaacaaaatctattttagattcaactgccaaatgtattcccacttgcgaaattattgttgtcagtctttctgcttcttgaggtcttggtctctctgcagctttgagaacttgaagagaggggccctggtaacattgacaacttctgatttatgcagggcaaataagacacagggcaggattagaagcagtgcagcagaggaattgagcttgcgaaccctggaaccaaacagcgtggattcctaggctagttctatcactcaggcaagtgacttaccttttcgtgattcgacttccccctctataagatggggatgatatgaaacctgcatttcacaggactgtggcaaggattcagtgaattcatacgtgtcaagtgcttaggatggaacctggcacatactcagagctcaataaatgtcaacaattataatttaggactggcaggggaaaatatcctatttacaaagctaatcccttgaaagtcacaggtggagaagtcttgctgagaaagagaaggacacagattgggcccctttggtatgatggaagaatggtgcataatccatccctgttggaattcctttgtatctgagtccccagcctgtcccaggacctctgcagttaggttgggcactgcaggagatgtgtacacaaacacccaagtttaacaacaacagggccaagactccagtgccgaaaagcaaagagaatcaatttctgataaaatgccaggaaggagattgacatgtctaaaaccttcctggtatcagcttagcttccagcacaagattaaactctaggaaaaatcccatcagagagctgcaatttgtgaccagacagagataatgttgacagcttccctttcccgagtctgttttggataaacaatgtgcccttcaacagagcaccatcaaagtgttctctatcctcagatcttaggcatgaaatagcctttaagatagctctctttacctcctccctccacccccagaagtcactgtatggaatatgattagaagagagaatggtgctaagaggaggttcctgcaagttactcaggaaaggtatgtctgcaggataaaaacaccccatgaaaactgtcacttactctggggacacttttggaggagcaagacacaggtcatgaaagtgccaggccatgggggcttcagtcctggctgctgtcactgaccatggacacacttgctttcccctctctgagcccgtatttcctctgtggtcccccaagtctgacaagagccaatgcttctgtgacttcagctttagtagtgtccacaggccatgtctgtcagcttctgtttaagtgatagaagccttccttaaaccagcttctgcaaaataagagaatttgttgcctcacctagctgaaaagttcaggggtggacatcaggcatggatggatctaggtgctctgacttagtccctcttgactctgccttctttggtggcaggtctgctctctaccaggtggcaagatggctaccagcagccttaggcttacagtgtagaggccagatggcatggtgggggaagcttaggtgctagatttaaaaggtttggggatgaatcctggctcatcactcacccaagcagctcagccacctcatagcttcagtttctttctatatagaatggggatagtggcagcacctgtctcactaggtggtcagggtgcctagaacagtgccctacaggttgtgaatccctgaatagtgattggtgcttcttcctccttctttgcttcctcctccttctccccttctccttcctgtcattttcggaattctctcagcaacttcagcaaagagtgagcgctctccaaggctaactcttcagccacggccccagatagagactcgctggcccatctagggttgtgcacttgtcctggagacaaaggttgggtggggtcaaccctacgtaaagcacatggttaggaagggatattttccaaaaggaaaatcaggatactggtgccagaaaaagggggaaaggcaaaaaacagcagctgtccccttcatggccactgtgtggtgggaatagtaactgacagcacaattgttaaaaattatattcaaagccgtgcatgggggctcacgcctgtaatcccagcactttggaggctgaggtaggtggatcacctaaggtcaggaatttgaccagcctggctaacatggcaaaaccctgtctctactaaaaatacaaaaactagctgtgtgtgttggtgggtgcctgtaatcccagctactcaggaggctgaggcaggagaatcgcatgaacccatgaggcggaggttgcagtgagccaagattgtgccaccacactccagcttgggcgacaagagcgaaattccatctcaaaaaaaaaaaaatcatgttgacatctgttgtcttgttgactcttcacaatgccctataaggcaaggaatattatccttatcttacatgagaggaagtctaggctcagagcggtgagacagcctgccctgggtaacacagcaagtacagggctcagctgatagcctgtgttatgtgcaccctggcaaagtggcaagaacatgccactccccctcctccctgtaggcccttgctactggtttacagccagacaggaggaccccaaactcctgtgaccacagggctgggcagaggcaatgactgccaggtaaatgtgagactcagtttcctcatctggcaaggggagctggtctgatacttacctccccaaactcaatgcaattaactacagccagattccagttagaagccactagacacaaatcaaaactacaatgagatatcatctcatcccagttaaaatggcttttattcaaaagacaggcaaaaacaaatactggcgaggatacagagaaaagggaatccttgtacatgtttgttgggaatgtaaattagtatgatcactatggagaacagtttggagattcctcaaaaaatagctaccatacgatccagcaattccgctcctaaatgtatacacagaagaaaggaagtgggtatatcgaagggatttttccactcccatgtttcttgcagcactgttcataatagccaagacttggaagcaacctcagtgtccaacagacacacgtataaagagaatgtggtacacacacacaatggagtcctgtgcagccagaaaaaagaatgagatcctgtcatttgcaacaacatgggtggaactggaggttattatgtttagtaaaataagccaggcacagaaagacaaacttcacatgttctcacttatttatgggagctaaaaattaaactcatggacatagagaatagacggatgggtcccagaggctacggagggtggcaggagaagtgaggatggttaatgggcacaaaaaaagtagaaagaatggctgggtgcagtggctcacacctgtaatcccagcactttgggaggccgaggcaggcggatcacttgaggtcaggagttccagatcagcccaggcaacatggtgaaaccctgtctctactgaaaatacaaaattaggcgggcgtggtggcacacacctgtagtcccagctactggggaggctgaagcaggagaatcacttaaaccaggaaacagaggttgcagtgagccgagatcatgccaatgcactccagcctgggcgataagagggagactctgtctcaaaaaaataataataataactaaaagaatatacttgggttgtttataaacacaaaggataaatgcttgaggggatggataccccttttaccctgatgtgcttattatgcattgtatccctgtataaaaacatctcatgtaactcataaatatatacacccattatgtacccacaaaaattaaaaataaaaataaattaagaatttcttaaaaagaagctactgaaggccagatgtggtggctcatgcttgcaatcctagcattttgggaggcttaggcaggaggatcacttgagcccaggagtttgaggccagcctggcaacatagtgagaccctgcctcaaaaaaaaattacaattaaaaataattaccaataaaaaaaagaagcaagtgaactgtgccttcctccccaccaccactatataattcaaaacaaaaactgaaataaggtcagatgcagtggctcacaactgtaatcccagcactttgggaggccaaggcaggaggatcacttgagcccaggagttcgagaccagcctgggcaacatggcaaaaccccgtatctactaaaaatacaaaaatgagccaggcacagtgttgcatgcctgtagtcccagctacttgggaggccgaggtcggaggatcacctgagcccgggagattgagtgtgcaataagccaagatcgcgccactgcactccagcctgggtgacaaagtgagaccctgtctcaaaaaaaaaaaaacaaaaaaacaaaaaacagaaactgaaataagtataaggaagttcaataaaattctggacttttccaacttcttcttctttttttttttttttaatatagaaacctaaactctttaaaaaatacattgtttgggccactcgtgctttattgaagtcctgggagatggcttggcactgaggtggaacggtcccgggcaggcaaggcaggaggctggggcagacagcctgggttcacatcctggctctactactagctgtgtagttttcagcaattacctaacctctctgcgcgtcagtttcctcagctgcagaatggagctgaaaatagagtacctcctcctggagttgttgagagaattaaaagactaatacatgtgaagcacttagaaccatatctgtaagggctgtttaagtgtttgctgtttattattcattgagtccctctgtcagatcctgtccacaccgtgttccatcagctggagtagctggggttggggtagggaggcagggttggtgtagtttacacctgcagatagccaggccagtgggccctgcattcgacatttaatttctttctgattccacaactaatgcatgctgattgtcaagaaattagaaaatgcagaaaggtacaaaaatggttcgttatcgtaccaacctagataatcactattacagatgctccttaacatacaatgggttatgtcccaataaacccatcctaagttgaaaatactgtacttaacctgctgaacatcatagctcaacctagcctaccttaaatgtgctcacggcacttaaatattagcctacagttgggcaaaatcatctaacacaaggcatgtttcatcatgaagtgttgaatatctcatgtaatttattgagtactgtactcaaagtgaaaaacagaatgcttgtttaggtacttgaagtacagtttccactgaatgtatattgctttcataccacaataaagttgaaaaatcctaagatgatccattggtatcatctatttatatttctttctagcttttttttttcttttcccttttccctttcctttttcttttcttttcttttcttttttttttttgaggcagggtctcactttgtcacccaggctggtgtgcagtggcatgaacacggctcaagtgatcctctcacttcagcctcccaggtggctggggactatgggcatatgccgccatctccagctaatttttgtattttttgtagagacaggatctcgccattttgcccaggctggtcttgaactcctgaactcaagcgaccctcctgcctctgcctcccaaagtgctgggattaccgctgggagccactgtgcctctagcattttttttctatgcaactacatatatttcagaaataggaccatactaagggacaatgaaaaatgcctactttgcattattctttttaaaatgtatttattgaggtataacttatgtgcaataaaataagcttaagtgtatagttttatgaatttttatatataaatatataaaatcagttattcacatcaaatgtagaataatctatatttaagaggttttcacatgtcccctcccagttaatacctctccaaggataaccactattttgactgttttttgttttgttttgttttgttttggagaaaggccttgctctgccactcaggctggagtgcagtggtacagtcacagctcactgtagcctcaaactcctgggctcaagcaatcctgcctcagcctcccaagtagctgagccaccatgcctggctccatccatgttttttaatgcatcagtagtttgttctttatcatcatagtgtaagaccttcaattcttctcggaaaaattaaatcgcaaaataatttgagtacattgttgttattaaaaatttttcaagtttgcacgttaaacaaaaatagcctgtcaaatttaccctcaatctcattccccttcccagaaataactgctgttatacattggatgttcatctttctggagctttttctatttatgcaactctattctttttttttttttttttttttgaaccggagtctcactcagttgcccaggctggagtgcagtgcagtggtgtgatctcacctcactgcaacctccgccttccagactcaagggattcttgtgcctcagcctccctagtagctgggagtagctgggattataggtgtgcaccaccactccagctaatttttgtatttttttttttttttagtagagacagggtttcaccatgttggccaggctggtttcaaactccccgcctcaagtgatctgcctgccttggcctcccaaggtgctgggattacaggcatgagccactgtgcccagcctatgcaactctattatttatttcaactaggagtagctttggccacaaatagcaaaatacccaactaataatggtctaaaccaggggtcaacaaacttttttctgtaaaggatcaggtaataaatacttcagtctttgtgggccacacggtctcttgtcacaactactctgccattgagcacaaaagcagccatagtcaatatgtaaatgagcatggctgtgttccagtaaaactttatttgcaaaaataagtggctggccagatttggcctgtgattaatttgcttacccttggcctaaataatagggatttgtttggcttatgtggtgggaaatctggaaatagcctcatgagaaaatctgaatttacactttacccaaaaacatctgagacagcctgtctttctaattgtatggaatagtaattaacagctttttatatttttgccagtcctctttgtctttattcctgtgttttggaaaaatgcctctgtttaatcttccagatcactaatgttctctctatctgtatctattctgcccttcagcatgttttgatttcttttacttttttattttattttattttatttatttatttattttgagacagagtctcgctctgtggcccaggctgcagtgtagtggcatgatctccactcactgcaacctttgcctccctcctgcctcaccctcccaagtagctgggattacaggcacccaccaccatgcctggctaattttgtgtttttggtagagacatggtttcaccatgttggccaggctggtcacaaatgatttattttgatgactaaatcttttatttgtgattttttttttatgtttcccaagttaccagcaatgtaattttttaattagttgtttttctgtaataggctgttcttgtttgatagatgcaatgtccttcctctcttatccttctgataatattaaatatattttaagtgtctctgcttgcattattatctgtttgattgttatttcctctatttattaaattagtccctgtctttcatggatgttggttttcctggaatgttttgtgatttgtggatatgtgctcttctgtgtagtatgatttcctgtttcctattttctttttctttctttctttctttttttttttatttatagagaaggtgtctcacatgttgcccagcttggtctgaactcctggcctcaagcattcttcctgcctcggcctcccaagtgctaggattacaggcatgagccactgatttcccatttccttctctgtagatgctatagattgctgccaatacttacgggcagagggtcagaacttgctgcgagaagtaagatgtaatacttggtcttgtgagcacagggtctcttttttctttctggctacgtcctgcttttctgtcccaaagacctgtagtcacagctcctgaaggctagtgggattgacaggctgcctcctggtatccccacgggagctctccatcaatctctttgacccttggcctggggccttctcctctccctggagaatgtgctgcctctaggtttggagcagcccgggcccaccttcaccttttgcggctgtccttctgttttggtctgtgtttttgttcatgaattcaattctgtctgccattcatttctcagggatttctcaacatttttaatctgctagtggcacccctttttattttccactttagcctcccaaagtgctgggaaataagcatatgctgccatagactttaaatggtgtcatttctgtggactcgggtaggagaggctgatatacggacttgctcttggttttccaaacttgattcattctcaaggagacttcctgtgtgagttttcaccttcctggtcaccttcatctggaaaagttcatctttctctaaaaatacactgagaaccaaatgggatattccagttttgaactgatcagtatagaatataggaatggagttgcactttctttcttttttttttttttgagacggagtctcgctctgtcaccaggctggagtgcagtggtgcgatcttggctcactgcaccctccgcctcccgggttcaagcaattctcctgccccagcctcctgagtagctggtattacaggcacgcaccaccacacccagataatttttgtatttttagtgcagatgtggtttcaccatcttggccaggatggtcttgatcttttgacctcgtgatccacccgcctcggcctcccaaagctgggattacaggtgtgagctaccacgcctggccggagttgtgctttctaatgaaaactgggttcaaataccatatctgctctctactaccttggtcaagtcacttcacctctctaagccttagcattctcacctctcaaatggggataatgataataatacttatctcctagggttaatgagagtgtcagtggaaatagcaaatgtcaagtgttcagcatggggcccggcatgtattagttgctaaaatatgttagcgcccttcatctgtcttagtctgagcaaatatttctcacgcactcattttgtgccatggtagtggtggttttggcagccataccataatgttagctcatactgagcacatcagctaaaagccctgtcttttgcctcctgaacttttcttaagcactcttccctcccaatgcctccccttgtagaggacctttaccttggccattatgcattttttcaagctactcttgctctatccgtaacctgaagaaactgatctgaacccagattccgtcatccagtttattctgtgtgcctcccatctgaatgtcatccgccaacataataaacagcttcaacagccagatccagccattgataaaattatggcctgggagacgaccaaggacagaaccccatgacatgccacccttccagggaaaagtaatttagatgactgggcatgatgattaatttgtctagttcctgtaatagtatgtctttgtggcttgattataatattagcaaccatgtattccatgttatttaccatgggccaggcactgaggtaagagctttgcatatattacttttttttttttttttttttttttttttttgagacagagttttactcttgttgcccaggctggagtgcaatggcctgatcttggctcactgcaacctctgcctcctgggttcaagcaattctcctgcctcagcctcccaagtagctgggattataagcatgcatggtaaagccctgtctctacaaaagtacaaaaaaattagctggatgtggtggtacgcacctgtagtcccagctactcaggaagctgaggtgggaagatcacttgagcccaggatgtcgagactgcagtgagctgagatcacgccactgcactccacccagggcaatagagtgagaccctgtctcaaacacacacacacacacaaccagatgtggacacaggagcatatacaggagtgtgggggaccagcatgttgttcattgtgatagaggcaccatcacgcccggctaattttgtatttttagtagggatgggtttcaccatgttggccaggctggtctcgaactcctgacctcaggtgatccacctgcctcaacctcccaaattgttgggattacaggcatgagccactgcgcccagcttattatttttatttcttacagcagctctacaaggtaagtatttatattactcaggacgtggttaaaaaaataaacttagtctagtttagcagaaggggaacttcattactttctcacaggctctgaagcagtggagcttcacagaatcatctggatgtgaagaacagatggagccctccagggtcctgggaggtcccctctctgtagctcttatctatctacctctctgcttctgtgtccttctcactaggtacaaatcgactttctttctttctcagttcacctggcagaaaatggttcccaccaatgactcctaagttcacttacccacttaaagagagtagccagatctgccctaaaccccttaaacacccaccccccaccctttttttttttttttgtctgagacggagttttgttgttgcccaggctggagcgcaatggcgcaatctcagctcactgcaacctccacctcccgggttcaagcaactcttctgcttcagcctcccaagtagctgggattacaggcatgcaccaccacgcccaactaattttatatttttagtagagatggggtttctccatattgatcaggctggtctcaaactcctgacctcaggtgatctgcctgccttggcctcgcaaagtgctgggattacaggcgtgagccaccgtgtccgtcctaaacttttttttaggcagggcctccctctgttgcctaggctggaatgcagtggcatgatcataactcactgcagcctcgacctcccaggccaagcgatcctcctgcctcagcctcccatgtacctgggaccacaggtgcaccaccacacccagctaacttattttatttttttgtagagatggagtctcaaactcctgagctcaattaatccttctaccttggccttccaaagggctaggattacttcaggtgtgaaccacggcagctggcccagcctaaacgttttcatccaaacctctcaggattattagccctacttaggtcaggcaccttctcctgatccaggtgcctatggttagtggtggggtcacactgtcccaatatggcatccaggaatctcagtgctgtgaccttgtggctgatggggcagtgacatccagaatccagctgcacattttacaaataaaagtgaggccctaagtcacacagctaaaaagaaaccagggcttgctcaagaccagcctgggcaacatggcaaggcctcgtctgtacaaaaaaaaaaaactaaaaattaaccgggcgtggtggtgtgtgcctgtagtctcagctacttgggaggctgaagtgggaggatcactcgagcccaggaagccaagtctgcagtgaggtgtgttcatgccattgcactccagcctgggtgacagagtgaggccctatctcaaaaacaacaacaaccagggcttgttcctggtctgtctgatgctgaagctcatgttgttaatgctctgctccttacgctgggccacactgtcccaggatggttttggttgtggtgtccgtgactcacgtctggccagtgactcaggctagagagcccagggacccaccttgtgtcacctaccatggtccagtccccatcaagggctctgagattcctggtcggtttacttatttctttggtgacttgaaagtcacctcggccctggctgaagtctcagatctcacaatttcatggtggaacctgacactaaaggtgacaagcagagacactggagttcaataaagcttggtgttttttgttttattttgtttttgtagagacagggtcttactgtcttgcctaggctggtcttgaacacctggcctcaagccatcctcccaccttagctgcccaaagtgctgggattacaggtgtgagaccgtgcctgtccaaagctaggtttaaattctagctctgtgacttctcattggatgactctctatgcctccgttgaggaaaaatagagataatcataatagccagtttatcagttgctgtgatgggtctgtaagataaaacatgcaaaccactcagcacaaattagttactcagcacagagcaatcagtttatgaactctgaaacaatggggaaaaaagaggagtccagaggaggaagtctttactcagctaacaggacaggcagtgggaaggggactggccagggtttcaggaggaattggcattgaagcctgaatagatgatggcaggattggggtaaggcccagcggataagaacagatgtgggccgggcatggtggctcacgcctgtaatcctagcactttgggaggcctaagtgggtagattgcatgagaccaggagttcgagatcagcctgggcaacatggtaaagccctgtctctacaaaagtacagaaaaagttagctggatgtagtggcacacacctgtaatcataactactcaggaagctaaggtgggcggatcacttgagcctgggaagttgaggctgcagtgagctgagatcacgcctgcactctatccagggcaatagagtgagaccctgtctcaaacgtactcacatacacacacagaaaaccagatgtggacacaggaggatatacaggagtgtgggggaccagcaagttgttcattgtgatagaggcaaagaaaagaataggtattgggagcaaatgagcatcaccaagtctggtcgtgtagatgggggccctatagaggaaactttgtgcactcattctttcatttatttggcaaatgtttatcaagcacctgccatgtgacaaacattgtcccaggccctggagagtcagcagtgaacaaaataaacacaaatccatgcccctgtagagcttatgtgccagcggctggaggcagacactaagcaaataaagaagcaaaatataaagggtgtcagagaagaaataaagcagggaagagggctggggacaacggaggagggatgtgacattaaatagggccctcagaagggccttgctgagaatgtgagcagagactacaggaagtgagaggaagccacgcagatctctgggaaaggagcatttctgcagagggaacagcaagggcaaaatcgcggggacaggggacatccgtgtggctgatggaggaggaacgagggtggtgggagaggaggacagaggggtcaaggccaggtcgtgtagggctttgtgtcatttgtagggtctgggcttttactctgggggcagtgggagccaggggagcattttgagtagaggaggaccgtgacctagcaggctttaacaggacgcattccctggccatgtggggagaatgaccacaggcgaaggtgaaaggaggcagtggctgctgcacaatctccgtgagagatgacgtggcttcctttggggcagcagctgtgggggtgctgagaaggggcctgatcctgggtattgtaaagagagaggcagctggacttgttggattagatatgggtgggagagagagaaaaaaaacaagacctctaagtcttggtctgagctgtgagaatgatggctgctttatctcctgagatgggagagagagtgagagcaggctttagggggaacatcaggaattcagcttaaaacctaggaagaccctgtaggcagctggagatgggaatccagggctcagggagaaaagctgtattaagctgagtctgtctggagtgtgggaccattgacaacttttttcttttttgtacacagaggtagagtgggctgaggtcattagttatgcaagtaatgcatgaaaacagctttctttagaaatggtagctcacactgttttgcaataggctgttttcgtgcattacttgcccgagcccaggagttagagaccagtctgggcaacatagcaagaccccgtttccacaaaaaataaaaataggccaggcatggtggctcacacctgtaatctcagcactttgggaggccgaggcaggtggatcacttgatgtcaggagttcaagaccagcctgggcaacatggtgaaaacctgtctctactaaaaatacaaaaattggctgggagtggtggcgtgtgcctataatcccagctactggggaggctgaggcaggagaatcacttgaacccggaagacagaggttgcagtgagccgagatcacaccactgcactccagcctgggtgacagagtgagaatgtctcaaaaaaataaataaataaaaataattagctggtcatgatggtgcgtgctgtggtcccagctactcaggaggctgaggcaggaggattgcttgaacctaataattcaaggctgcagtgagccatgatcacattgctgcactctagcctgggcaacagagtgagatcctgtctctaataaataaataatataaaaattgtcaccttctagataaggctaaaatccattttgctaatcccacccctccctaaggccagtcttcccatcctggagtagctgttgccatgagctaggcatgcatgcttccaggcctttctctgtgcatttgtatacctgagtgtatccataaaatatatgtggtattttttaatgtattttcttttctttttttttttttttttttttttttttttaccagaaatggtgttacactgaatgtactgttttgcaacatgcttttgtaacttgtaacttgcctattctccctgggctatgtgtcttggagatctgtgcttgatgttatctgctcttttatttcttaacctgttgcatcggattccctggtattcagctgttctccagccggaggacattagagttgctttcaactagcattttgtccattcttctcaggcacctgcgtggctttctctaggctggattgcaggagggaaatggctgggtctgagtagatgaagggtctgtgggatttggtgtcttgtctcagtggatactgccacattgcttcccaaagtgcctctgtccacttctctgcccagccctcaggttttgaatgaagaaagccacagagatctgggttttagagcaaagcacagggaaggggctatgggttggaaggtgggaccaggaagccaagaaatcatggactttgtgagctgcagttccactcttaagaacatgcatttgggccgggcatggtggctcaggcccataatcccagcactttgggagactgaggtgggcagatcgtctgagctcggaagttcaagaccagcctgggcaacatgacgaaagcccgtctctacaaaaaataacaaaagttagctgggcgtggtggcgtatgcctgttgctccagctacttaggaggctacttaggaggctgaggcggaagactcacttgagcttgggaggtggaggttgcagcaaactgagaatgcgccaccattgcactgcagcctgggcgacagagcaagactccatctcaaaaaaaaaaaaagaatgtgcatttggagagaacatgagctactttaggggctgaccagactctcccaatcccctccttccctcttgaaaacagagcagcacaaatgaaaaaccgtctctctcctgtctgcacatctggcttcttcccgggcagctggttgctattcctaaaccagcttcatagcccagagttgcggccacaccccatgtggctactcagccactgaaggaagactcaggagttaagggccttatgtcacatgctgccacggtgaccatatttcagaattaaaattggggcctgtgacctgaggagttcattggactttggggattcgggtctggcctgtttgaattcaggaccactgtaggaaatcctggccatcaggatcatccattcggttcacagtacatttacaagtgccttttgatgttaaggctcagcctgccctgggagctgatggtcaaggaggaacgatgtgctatctaagcgttcccaggatgcagactctgagcaggagatatacatgcaggggtttattgggagggctcttggatgacacctgtgaggggtaagggtagcaggcttgggcagaaggaggagttgtgcagttcaggctttggggagcccacagatcctgggtagaaacaggtgggccttcagagatgtcccagttgagacaaggagctggggtctttgcacctttgccattaagcaacatcagagatccagcataacctggggaaggatggatttcttcctgggaagggatacaactgtaagccaccagccatccacactcccagcagctggggcatgtgagcgatctgggccccgcagcccaacacctgctgcccatgcaaagcccacagccactgcctttgataatgcttcagcgaggggtgtgtggaaatgcttcaggaacacagctgagggaggggagaagccagcctgggatggaggccagcagggaggaagtggaccttaactgtgcctcgaagccctaaactccgaacccgtacaccagaaactgctcctctggatgcttcgaagattcctcaaggcaaggcaatgaccttgcaagggcagtcaacacacgggcaatgaccttgagaagcagccagaagagctgagtggctattgagatgggggtggggaaggtgggaatgaggtcaggagagtggtgagagcagattgcattcatgcgccaggccacactcagacctgctctccctccagcctttgctccatgaatggtgccccgtccctccaatgatgcaggccagaaaccctggaatcatccttatagaccctctcccttgtctcttctttccagcctgtcaccaagtcctgtgccttcaccttggaagcctctcttccctgaccctccacgtggctgagtcctctcatctaagcacctgcggtagcctctcacctgcagcctggcacccattctccaccacccaacccctttcttactccaacttccgctgtccgctccaggagcaccatgtggcttcccagtggtctggagtctcagggcagaactcctgccgtgggcacgcggtgtttgtggtccatccgcctcagtcccgtgtcagtctctgtcccacgtgcctgccttgtcccttctgctctgtgctcatgtgcgtctgctgccttagcacgcctccactttgctttgagcactctcccctctcctccacaattaacccattcatccttcaggttttggttctgttatcctctgcagcgaagcttcacctgcccccttttaaagccactcatcgcccccgcctcccccaccttccgagcactgacgtcatacatttggtaggtcatttgattaaaatctgtcttcctcactagaccaccagctccatgaggctggggacatgccctggcatggattaggaggtgtttagtaaatctggaagaaggtaggaaagaagtggggtgaggagggaggagggaaaggaacgcagtcccacatggtcggggaggggaccagggtcagagagaatgagcatttgctgtcgcctttaaattcctagatgaacattgtctcacatggcaaaatcttgactgcagtatgtgagagttaatccagtttgaggcccatgaaccccactgcactgccctacacttgagaatgatatttcagcacctgccgttagcacaaacaggctttgcccttaagcatacctgggatgtcagaagcaaagactctctagccgtcccctgggatcagccagcaggctttgatcactctccaccccagcccaagacaggctcctggagtctcctggcatctgcttttacaaacactcttcccttctggcccctgctccgccctcccccattctcctggtgagctcttttacaattcggtgtcttgttttctcttctgcaaagcccacccagccccgccagtaatcccaggccccctccactccacccactgcccttgtggcacagctgcctcctctttttttttttttttagacggagttttaatcttgtttcccaggcaggagtgcagtggcgcaatctcggcttaccacaacctccgcctcccagattcaagcgattctcctgcctcagcctcccgagtacctgggattacaggcacacaccaccacgcccagctaattttttgtatttttttagtagagacagggtttcaccatgttggccaggctggtctcaaactcctgacctcaggtgatccacccgcctcagcctcccaaagtgctgggattacagaagtgagccactgcacccaacctcagttgcctcctcttgatagcatctgccacactgcactggagcaattgttccatttctatctctctactccaagttccttgaggccagggatttttgtcttcctccctttccttctgttcctccgtgttctttcctttctgcaaatcctttataagctccttgtacatgccaggaactgggagacacagcagtgagcaagctcgcattgtccctgctctcgtgggtctggcgtcctgatgggggaggccatgtgtaaatgaacagagatactttcagagagtgagaggtgctactgggtgaggaggcagacagggacagaggttgttgggagaggcccctggaagaggggatgctgctaaacaagcttaccctagagcaaggagggaaacattgcaggcagggggaacaacagaggcaatgacctttatttatttacttattatagagacggggcagggggagtggggcgggtgctctcgaggtatttcccaggctgacctcgaactcctgagctcgagtgatcctcctgctttggcctcccaaagttctgggattacaagcatgagccactgcgcccggccggcaatgaccttgagaaagagccagaaggaccatgtggctattaggatgaaggtggaaatgaggtcaaggagggtggcgaggccagattacacttgtctgtctatctctggcccttgcccgatgcccaacccataggagaagcacaaggaatatgtgtaggatcaataggaagggagtgccctcccctcttcagggggccggcagcagccctggggtgtgggggaatgatcatctactcagacagccctgcctgctgggctggtggtgatagatgccctgtgttgggaggtccatttcattagaaggaaaagttcttggatggaaatcaggtggatggaggcaaagattggcggagggtggctgcctctctcctcccatcaggcctggtggccagtcctgcaggattgagaggctctgacaggtaaaagtggccctaaatcaggtccactaacagcaccagcctgagagggcgaaagcagcttgtctcttctcaattattagaggctgtttatgctgccccaggcctgagccccctcctgggctgtcctcaggcaaggagggtaggggcagcctcaatccttctacctgcaggccctgtggaaaccttctgagcctccctcagcccttctcaactcaggactcgcttaaaatccagttgaaaggatgtcaggtctgccccaagccctccagtagcttcccggccgcctcagcatcaggccagagtctgcaaggcctggcagcctcagggtctgtcccactccatctcctcccactcccctgccttgttcagtctgttccagccacactggcctctgagctcttccccagatgtgctgagcctcctggcctctgcactcgctgttcctgccatctgaaagccccttttatcccaataccttgtaactgcccaacgggttcattctgcctgctgcccagatacagccaatttatcaaaacaggggacttcaaacagaaacagagtttaatacatgtagagccagctagacagcagaccagagttttatgattactcaaatcagccttcctaaaaagctggaggctagagtttttgggttttcctcttcttcttctttttttttgaaacagattctcgctctgttgcccaggctggagtgcagtggcacaatctcggctcactgcaacctcctcctcctgggttcaagtgattctcctgcctcagcctcccgagtagctgtgattacaggcgcccaccaccacacccggctaatttttgtattttcagtagaaacagggtttcgccattttggccaggctggtattgaactcctgggctcaaagtgatcctctcatctctgcctcccaaagtgctgggattacaggcatgagccacggcacccagctgatgccagggcttttcaaggatagtttggtgagcaaggagctagggtctgggtgcccttgattggttggaaggtgcaatcacaggggtgtggcttgggccatctggttgtcagaaatgcaaaagcctgaaaagacatctcagaaggccaatcaggatccacaatcatgatctgccttggggcagagtacttggggaagttgcaaatctagtgacctctggaatgatggctggcaatcattgaactatgcctagattttagcagaactcaggcccctttcatcctcctaacctggtggcctttcattggctttacaaaggtaatttagtttggggaagggctattattatttaaacgataaactaaattttctcaaagttagcttggcacacgcccaggaatgaccaagggcattttggaggtgaaaggcaagatagaattggttatattcagaattttctctctagtataattcttacaaaggtgattttaccctcagggtacacctccccagagaggccctctcggagccctgagccccaccacccccaactgcagtgaagggaagagggagcccctccccttcctcctgcattcttctgccccttcctactttcttcttttttagagatggcatctcactatgacgttgcccaggttggtctccaacttttgggctcaagtgatcttcccaccttggtctcccaaagttctgagatttacagcacttcccacttcctttttttttttttttttgagatagagtgtccctctgtcgcctaggctggagtgcaatggcacgatctctgctcactgcaacctctgcctcccaggttcaagcaattctcctgcctcagcctcccgagtagctgggattataggcacgtgccaccatggctggctaatttttgtatttttagtagagactgggtttcacaacattggccaggctgatctcgaactcctgacctcaggcgatccacctgcctcggccttccaaagttttgggaatacaagtgtgagccactgtgcctggccgcccttcccactttctattctccatagcacttattgtcaggtgacatacaatatattttaatttaaaaaactgattgattgaaacagggtctcactctgtcacccaggctggagtagagtggtgcagtcacagctcattgcagcctcaatctcctgggctcaagcgatcctctcgcctcagcctcccaagtagctgggactacaggcacatgccatcatgcctagctacttttaaaaatttttagtagagatagagtctcactgtgttacccaggctagtttgaattgctggactcaagcgatcctcccaactcagcctgtgaagtagcttggaccacaggcacacaccaccacgcccagctactttaaaaaatttttagtacagacagagtctcactgtgttgtccaggctggtcttgagctcctgggcacaagtgatcctcctgcctcagcctcccaaagtgctggaattacacttgtgagtcaccgcactcgactgtcttactttttggaaatcatctgtcttcctttcgctagaatgtgaactctgtggtagtagagactttgctgggctcactgttgtatctccagagactagttcagggcccagccagaggaagtgttcagccaatactgaagaaatgcatcattgtgtgaaataaagtcaacaccacccacctcctagggttgtgtgaatgtggaagttctgactctgtgtttcccagtgtgtgttttgcctacctctgccaccttgtaggtggcaagtaaacattttctcttttagtaggtctgtatttatgtctatggttaccttctggcaagcaataattattttccatttatggcattaatataaaccttcctttttaaagtaaactcattcaagttttgttgttgttgtttggtttttgagatggagtctcgttctgttgtgcaggctggagtgcagtggcgtgatctcggctcactgcaacctctgcctcccaggttcaagcaattctcctgcctcagcctcctgagtagctgggattacaggcatgtgccaccatgcccagctaattttttatattttttttagtggagatggggtttcaccatgttggccaggctggtctcgaactcctgacctcaagtgatccacccaccttggcctcccaaagtgctgggattacaggcgtgggccaccacacccgacctcaagattttttaagtcttctatctttgtgagtctgaaagataattgataaataacaccttgcaattttagaagaaaatttttctgagaataaaaagaaatgctcgttattttccactggacatggattgaaaatgatgttttagatagctatgtaagaaaaacatttttataaaaatacaccgtaactgtgtcctggggtcctagattctggatctgccttggcagtctataaaacctgagactgaatagaaaatctcaaggtatgtattggtagcaataaagaatggtacatagcaggtagggtagtaataaatgtaactctaaggtattcgaaaaatagcccaaacgctccctttgattatccatctggcatgcgcgtaggatgtaatattttgttaggacacctatcctagggcgtgagaaactcaaatgtttgctgcagtgttttgtgctgtttcattctacctctagggggcagtatcaaccgttgctttaggtctttgttgcttggcttctgctggtgtgatgggtgcattgactgcagagtatatttctgttttcgaggatgggaatataactgatgtgttagcaaatgcagtcaaaagcaggctcaggtcaggtgcggtggctcaggcctgtaatcccagcactttgggaggccaaggagggtggatcacttgagttcaggagttcgagactagcctggccaacatgacaaaaccctgtctctattaaaaatacaaaaattagctgggcgtggtggcagacgcctgtagtcccagctactggggaggctgaggcaggaggattgcttgaacctgggaggtggaggttgcagtgaactgagatcgtgccactgcactccagcctgggcaacagtgcgagactctgtctcaaaaaaaaagagaaaaagaagcaggctcagatactttctcatttaactcatgtgcactgaggacgggctccacagcgctgggacacacagactcactgggagaatagaggaactggcacttggggtgggttttgaaggaaggctgtgacttttgtactgtaagatacatttggatcatctcttcttgtgggcttagggccattggagcattcatcaaggtatatttagtcctctatgaaatgcttctctgagcccttagacatggcaggaactttggattcagacaccgtctagtatttgttctaccactgtaccacccagtacccactcgggtataaatctctctcatacacacacacacacacacacagacacacacacacatacacacacacacatacacacacacttcaaactggcccaaggaaagaaagggatgtatttgctcaagtgagtaaaacgttagtgctggcttcgggcatggctggatatggtggattaaccaccattaaaggatctagttgctatttggcctgtctctcattgtcttccattctgctgtctctatgtttgtgtcatcagtcttggacagatttttctaactttttttttttttggtagaagtgggatctcactatgttgcccaggctggtctcgatctcctgggctcaagcgatcctcccacctcagcctccggaagtgctgggattataggcatgagccatcgtgcctggcatcttgggcagatttttccatggaacatttaaggttgctcataattgtgaacctaaaaagttggtaaaatgactccttcctttgtgtgtgaagaaatgacgtcttcctcccttccctagtagccctggctcatatcactagtaattgtagaggaggagagataaggacttttccaggagggtccttgggaggcatagcttgggaagcacacctatccctgaaccatcacatggccggggagatggaatgcactggccgggcctgcagtacgtgctttcccttgcagtgttgggagtgttatttccacccacgccacgtggactgagagtggacgaaaggtggttttcctagaggaaaatcaaggtgttatacccagaacaggaatggatgctggcgccacataaacaaggttgtctgctatctccacttagaggctctgagaccttcagacaatttgcttcagctttcaaggcctccatttcctcctctgtaaaatgggcacaaggatcttagagcataggattgctgcgtgcgttaaataagcacccacagacagcactgataaacagcagtaaaggatgcctgaaaagctggaccccagtaacttcaagcattagcttgtcacccataactcatcccttagttagggtgtgcagcctatagggaggcagcggggaatcaagtgacttgggggtgtggaagagctctgtgaccctagacagtcagtgtctttttttttttttttttttttgagatggaacctcactctgtcacccaggctggagtgcagtggcacaatctcagctcaccacaacctccgtctcccaggttcaagccattctcctgcctcagcctcctgaatagatgggattacagtcctgcatggcgctaaccatcatgtccggctaatttttatattttcaatagagatagggtttcaccatgttggccagactggcctcgaactcctggcctcaagtggtccacccgcctcccaaagtgctgggattataggcgtgagccaccacacccggccacaaacagtggcttcatggtctcagtgttatcccgtctaagtgatggttctctggtgagacctgcagtcagcacggttgggtatccagcattctcaagccctagaaaccagcactgcactctcagctgctcctgaatgcagctcaggcttctgcattcactcatcagccctgttgaggagaattccaatatggtggcctcagaggaatacgtgatccttgaaatatggactctgtctttaagtataactgattcttggcatttcattccaattctagtttttttttcccctagagaaaattaataacatggccattggtaaaattcttttttttttttttttttttttgagacagcgtcttgctctgtcacccaggctggagtgcactggtgcaatcatagctcactgcagcctcgacctcctggactcaagccatcctcccacctcagcctcccaagtagctgggactacgggtgcacgccaccatgactggtgaatcttttttttttttttttttttgtatttttgtagagatggggtcctgctatgttgcccaggctgatctcaaaccacagtcctaacttctcccttacgtctacagtgcctaactcttggtaggaatttttttttccttaaagaaagggtctcactctgctgcccaggctggagtctggtggcacggtcatagctcactgtagcctcgagctcctgggctcaagctatcctgccacctcagcctcccaagtagctgggactacagcctcacactaccacacccagctaatttttaaaaaacacttttgtaaagacagtccttgataaaattctatgccttctccagggccagcattggggataaagataaggataccaataaggacattgaggctctgctttcgtgtcacatccaaactccttggaccttccgctgtaggtcacttgcgcctcctcagcacccggcaatctagccaattcttgattcccccttatccccctgcaagcgccacatcctaaccgagggatcgtttatgggtgacaagccaatgcttcaggtgactggggtccagcttttcaggcatcctctggcccgtccatgaacatttcatgtttcttcacacccccaaacctttgttcatgctggccctgctgcttggaatgcccttcccttttcttgttgcccaggtaacatttcaactttcagatccctgctcaaatgtgtcctcatggattcattcactcaacaatttcattggaatgcacaatgaacaaactagacaaagctctctgccttcatagaattctcattctagtgcaaggacaccccaataaataaaaggtgtaataagtaaaataaattagatgtgtgttagtgcagggagggacacaggagagggggcgtgcagtgtgtgcactctttgcaagtttcactatggtggtcaggggagacgtcactgagaagggaatatctgagttaagtcttttttttttttttttttttttttttttttgagacggagtctcgctttgttgcccaggccaaagtgcagtggcgcgatctcagctcactgcaagctccacctcccaggttcataccattcttctgtctcagcctcccaagtagctgggactacaggcacccgccaccatgcccggctaattttttgtatctttagtagagacggggtttcactgtgttagccagggtggtctcgatctcctgacctcgtgatccgcccacctcagcctcccaaagtgctgggattacaggcgtgagccaccgcgccctgccaagtcatttttttttttttttgaggtggagtcttgctctgttgccaggatggagtacagtggcatgatctcagctcactgcaacctccacctcctgggttcaagtgattctcctgcctcagcctcccgtgtagctgggattacaagcatgcgccaccatgcccagctaatttttgtatttttagtagagatgaggtttcaccatgttggccagtgggttaagtcttgaaggaggaaaggaatgtgggcattttcctgagagaagagcattccacatggaaggaatggggcctgaggtgggagcttggcgggtgttgaggacactggagtgaggaggaggagtggggtagtgggaggtggctcagagatgggggtcaaggcctagagtgcaggacctcatggccactgggatggccttgcccttgactctgagtgggacaggagcccccttggggtcctagcagaagagtgacatgattccactcacctctcatcaggccccccaggtggcagcagggaggacagaaggcagggaggaggcaagagcaggagtccagtctgggcccagaccagcctgggaggggagagcagggagaaatggtcagattttggatacgcagtagttttcatatggagctgacgggttagatgtgggatgggagacagagtggggctttgaagatgactccaaggattggagagaccttcctagggatctaattcagacacttggcattgcattttgtgtattttattataattctgtcctttgggaggggtccaggtgcctttgatagtccgaagaaagttatggactcttccaagaacacccctgtgcatgcaattaaatgggtgttctcaggaccccctgcagggatccctagacagtgtgtggttgcttgactggttgcagttgcagcccgcttttgtacaacatcagggggcacaattcacacgcacacatgattggggctgttcagtccagcacccccaaccaacaaccagcagttgattacagctgtgaaaggaaaataaatcttgatgcccccaaatcactaaactaaagggaaaagtcaacctgggaactgcttaaagcaaacctgcctcccgttctactcaaagtcacctctctgctcactgagataaatgcatatctgattgcctcctttggagaggctcatcagaaactcaaaagaatgcaaccatttgtctcttatctacctgtgacctggaagccccctctctgcttccacttgtcccacctttgcttcgagttgtcccgccttttgaggaccgaaccaatattcatcttacatatgttgattgatgtctcatgtctccctaaaatgtataaaaccaaactgtgctctgaccaccttgggcaaatgtcatcaggacctcttgaggctgcatcatgggtgcacgtcctcaaccttggcaaaagaaactttctcaattaactaagacctatctcagctattcgggatttacagagtctatacaggcaagttggtatctgaatatacagtgggtcagagcttttgttaagccctgatcgcatatgcaagggggccagccacacaataagcccttgataaatgtttactgagaaacagtgaagatgaacttggcattttttcagggttctcacacctttgctgggtgccttaagtattcatacatccattttgtaggcaaggaaataaagcctcagaacaacgagggttaactgaattaggcacaaaaaggggtagaatcttgcctggcacatagtaagtgctaagtcaaccttagcaattatcgtcatagagctggacagcggtgaagccaggactggagcccaggcctctaggcactcaggcgaaactctgtctccttccctgtgtcatgggtctgccctccaggaatttataatctgactggggagccaagatgagcaagaaagaaaatgatcccaaattacttccactttaatcctaggttatccatatagcagccctgtgaggtagaccttattggtatccccttttcgcagacaaggaaactgaggctcagatgagataaacagcagagttcagggctcacacccacacctccaaatccccagataattagtgagtagtatatgtagttaaatgctaacaactcagcacttaattatatccgatttcacactgtattgtatataatttaatactaattgcaggctttcagaaggaactgaagtgagtaggggagagaatggcaagggaagccttcatggggactttgggaaccgagctggcccttggagagtctgggagcggaggctagagggggctgagtgggtttctggaaaagggaataggatgattaagacatcaagttaggagtgagaatggggcgaggtgggactcggatggtgctgttttggaaatggagttccataaatgcacttataactaatgttcattgagagctttgtaagtgccaggtactgtgctaaatcctttccactgttactgcatccagttcacttaaccctgtgagggaaagaaaagttccaccagacaacaggtacaggcatcaccccatcttataggtaaagaaactaggtggcaaccttgtgacacagaaccaggctggactgcagagcccatgtacctcccagctcaagttcagagaccatatgactgtagctgggggtgttgtgaatggtgggaaataaagttggctagtctagggccttgctacccaaagtgtgggccatgagcattacctgggagctcatcagaaatgcagacttggggccaggtgtggtggctcacgcttgtaatcccaacacttttgggaggccgaggcaggtggatcacctgaggtcaggagttcgagaccagcctggccaacatggtgaaaccccgtctctagtaaaaatacaaagattatccaggcaaggtggtgcatgcctgtaatcccagctacttgggaggccaagacaggagaatcgcttgaacccaggaggtggaggttgcagtgagccaagatcgcaccactgaactccagcctgggcaagagaacaagactccttctcaaaaagaaaaaaaaaagaaatgcagacttgggcacttgccagtcctactgagtcagaatctgcatttcaaagcaggcacggtgctacatgcctgtagtttcagctactcaggaggctgaagtgggaggatcagttgaggccaggaatttgagaccaacctgggcaacatagtgagaccctgtctcaaaaaaaataaataaataaaaagaatctggggcatggtggcacactggcgcacgcctataatctaagaactttgggaggctgaggcaagtgggtcacttgagctcaggagtccgagaccagcccgggcaacacgacaaaaccacgtctctacaaaaaatacaaaaaaagaaaaaagaaaaaaattagccatgtattggcacctgcctgtagtcccagccactcatgaggctgaggtgggaggatagtttgagcccaggaagttgaggctgcagtgagccgaaatcgcaccactgcactccagcctgggaggcagagtgagaccctgtttcaaaaagaaaaaaagaatctgcatttcaccacgatccctaggtgatttgtaggcacatcaacatttaagaagtggagatggatggaagtttcagtttctcgagtctttctgatgacatctccctcctggcaaaggaggatcgatgcattccctggagagtttgaggtgaaagcccagggcagccagcaaaagctgagatttctttgaagtcccatatttcatctaaaaatgtcatccactgtttcatgccatacccataatatattaacggtcattttaatgtttcaaaatggttatgtaaattgccttggagcagcatctgtgttctgggaagatgcatgggagggtttccttgtgtcttaaatggggtaataatcactacttcaagggcttctgtgaagatcaaaggagaatcgtgtatatggaaatgctgggtaaactgcacgatttatgtgttattattctggaagaaggcgagaatcctccccagacccactctcctgaaatccagctctcccgagggctgaggcctcctgcgcttttcttgcactcaggatgaggcaggactcaggcccaggggaggacagagtagcctctgtaggcacctccagaagccaggaaagctagtttgttttttgttgttgtttctcgggttttttagagagacagggtctcaccctgttgccccagctgcagtgcagtgacacaatcatagctcactgtaaccttgaactcctggactcaagcaaccctcctcctcagcctcccacatagctaggactacaggcttgcaccaccacaccagctatttttttttttttccaagacagagtcttgctctgtttcccaggctggagtgcagtggtgctatctcagctcactgcaacctccaacccccgggttcaagcgattctcctgagtcttgctctgtttcccaggctggagtgcagtggtgctatctcagctcactgcaacctccaacccccgggttcaagcgattctcctgcctcagcctccaaagtagctggaagtgcccgccacctcgcccagctaattttttgtatttttagttgagatggggttttaccatgttgtccaggctggtcttgaactcctgatctcaggtgatccacctgcctcagcctcccaaagtgctgggattacaggcgtcagccaccgtgcctggccacaccctgctattttttaatttttatttttaagagacagggtcttgctatgttgcccagactggtctcaaactcctggcctgaagcagtcctcctgcatcagccacccagagcactgagattacaggcgtgagcatgcccggccttgtttttgtttttgttttaatttcttataatttcattatgtcaccctttcttattattacttacttcatgattggccaacttagccagaagcaaagtcccagtgaaactcagaggttgcagagatgtcagaataggagagaacatgagggtacatcatcctgttcctgagtgggtctagagagagggaagtcgggaaggaaaagtagaggctccaggggaagatggaagcagatggcaacaatctggggctctacagggaacaggaggagaaagggcatcagggtgttagccctggactaggcatgactgggctgcacatcaggctcttttccttgtaattggagggagaagtgaagatgggagggagaaaaacccaagactggtgaaatggagactcaggcagacactgaccttccacaattgagggcacagggtgaaggctagctagagaaggcacaggcagaaagctgcatgggaagagtggctcattcagcactgcagatgcagaggaagagaatttggcaagtaggacgttttttagagacagggtctcactctgttgcccaggctgcagtgcagtggtgcaatcatagctcactgtaaccttgaactcctagactcaagccatcctcctgtctcagcctcccgagcagctgggaatacaggcatgcaccaccacatctggccttttttttttttttttaagaaatggagtgggaatcttttttattattattattttatttatttattattatttttttttgagacggagtctcattctgttgcccaggctggaatgcaatggtgtgatctcagctcactgcaacctctgcctcccaagttcaagcgattctcctgcctcagcctcccacgtagctgggactacagacgtgtaccaccatgcctgactaattttttgtatttttagtagagacggggtttcaccatgttagccgggatggtctcaatctcctgaccttgtgatcggcccacctcagccttccaaagtgctgggattacaggcgtgagccactgtgcccggcctgtagtgggaatcttaatgattatcatgaggatgagagagagagaaaaggaatgcccatcattctcaacttggaatggcatgacagatgagcagattcccatggctcagagcaatggaaaaggatggagagaagacctattgcattaagttaaggtggtcctgggtctctcttgggtagggttctaatagaataatggggctagagccatattttgagaagttaagaagagaatagtagagatttctatttttctctctcttttcttcccaggataagcattaaggttcccacacaagttgcatttctgatacaaatgccctacttgccatttaaaacttaatccccataacttgctataacttgggaccagtaccaagctgatattgtatcgttaatcctccccttggcaacaaagttaaaaaaaacagcaaattggccaggtgcggtggctcgcacctgtagtaccaacactttgggaggccaaggtgggaggaccacctgagttcaggagtttaagaccagactggccaacatggtaaaaccctgtctctactaaaaatatataaattagctgggtgtggtggcacaaacctgtgatctcagctactcaggaggctgaggcaggagaatccgggaggcagaggttgcagtgagccaagattgtgccactgcacttcagcctgggcaacagagcaagactccatttcaaagaaaaaaagaaaaagaaaaagcaaattgcaaagcattgtttattgtatgatcctatttttgtttaaaagagtacatgaggccgggcgcagtggctcacacttgtaatcccagcagtttgggaggccaaggcaggcagattacatgaggccaggagttaagagaccagcctggccaacatagtgaaaccctgtgtctactaaaaatacaaaaattagctgggcatggtggcaggtgactgtagtcccagctacttgggagtctgaggcaggagaatcgcttgaacctgggagatggaggtttcagtgagctgagatcgcgccactgcactccagcctgggtgacagagcaagactctgtctcagaaaaaaaataaaaaataaaagaaataaaagggtatatggggctgagtgcagtggctcatgcctgtaatcccagcactttgagaggccaaggcaggaggatcacttgagcccaggagttagagaccagcctgtgcaacatagtgagatgccatctctactaaaaaaaaaaaaaaaaaaaaaaaaaaaaaaaaaaaaaatgctttttaaagagtatatatgtgtttatatgtagatatgtatctttgtatattataaacaaagaaaagcacccggaggaagatatatatatcaaattacaatagcagttttactggtacatgcatatatcactttaaatatatgtagtttattatacattactctcccccagccataataaattataccagagattatctctgatggtcagattatagtatattacttaaaattcttttggctgcaaatgacagaaactcagctgaaacttctaaggcattaactgaattgtctggatacttctttaggcataggtgaatccagggactcaaattatgtcattaggaatctgcctctgcatctcttggatatgctggttttttttattagcttcattctcaggcggttccaggcctgcttctcattggcacagcattcaaatgggaagagagcagctctttttccaagggtatcagcaaagtcccggggctgactcgggtcatggttcacccctaaagtggtaaatcactgtgactgggggaagccctatgttgattggcaaggccaaggtcatgtgaaccaagagaagaacaaagtcactttcaaggtcatctacggaagccagtgaactgcaagaaggggctgagcagttccccaaaggaaacccagggcccctttggcagaagaggagacacagaaccacagatgtccactccaagtgggcctccagtctgggtcatagatttctgtaatgactgcattgtttataattaacatacatttctcttgaaatggcagggggaaaataagattcccctcccctttttgttctttgagacactctgttgcccaggctggagtgcagtggcgcagtcatggctcactgcagcttcaacttccaagactcaggcagtcctcccccttcagcccccgccaagtagctgggaccacaggcatgcaccacccaggcctggctaatttttaaattatttgtagagataaggtctccctaggttacccaggttagtctgaaactcctgggctcaagcaatcctctcgcctcagcctcccaaagtgctagttttacaggcatgagccactgtgcccgaccaagatccccttttaaacaactgatttgggttgcctctggttatgacaattgagataactaaatagtgagtgttgagaaaacagtagagcccaaatcatgtcagaacccttgatcttagagggcatgggaggaacgaacagtagcgagaggcgggaattgaccttctccttttcatagatgattaaaggtgtgtatgcctaagacccatggggccatcagacagtctctggggctccaggtcgctggagcaatgcgcctggggtgttgggccttcgtcaaggtcagcctccgcctctcagcctgctgcgccggtgtgtgctgcacctgcactctcagtcagtgcttccctgcattccgatatcacactgctctgtttcttcatttcagggttacgctaaggacatggtgacagactttgatgagaaacatgatgagtatttaatattgcttcagcagaggaaccggtaagagaagccactcgacggcagcccttgatattagcgaagtaaaaatctatttagatttattaacagcaggcaggccctgcctcacataggaatgggatgcagagtccccctccactcagaggcttagaatattatctgcaaccccagctcctatttctccattcactgatttaattgcattttttgactgagctgtagcaaactgctcgatgtgtaagtaccgcctcttccctccctgctcctattctgggagaagataaggttgtcaaaaaaggcttggatttggcagggcttgtgcaagaaccacctgaagagcccagtctgtgattgtgcaggctttgacagtccctgaaatctgagcctataatcatgtcgtgttatgcaaaaatggagtcattttacattggcgtttgaagttggtcgataagtcatttgaagttaaagtaggactgattttgtctctggaatgcttgttcttgaaaaagcttgcagtaggtccagtgtgtagcgatcaaggtcaaaacatcatggtctggtttgaaagaggcatcattgccttggttcctttgtagggctgaggaagttcattttcagttcaccgcagtttgtcttcaggcctcaaactttgcaataagctggggatttgcaaattcagatgctgggagtggccaggcagtgagtggagctggctcagtggaacagtggatacctgagctcctgtctccaagctgctcagcccaggccagctgtctgtgagaccacagttcccccaggtcctgatcctcccaagtctgccagagaagctggagatctgcatttggcctgtgaaatctcctgagttttaaaatgttggtaatgaattcaagtgaaagcacaaagcaaacagaaaaacaacgcaggcccacagaactggtggggggaaggggaagaaaggggaatgggtacgaatgtgggcctctgtgttatcggagtgggcttagggtcttgcagataacagagtctggggtagggaggtgtcatcctgcatgtgacttcagctctggtctcactgactggactcagtgttatcaacaggggccttggtggcatgttgcatgggacaagtttttgtaatctcacgaattgcaggagtttagcatctctgcccaccagcccctttactaaatttcagtaagaccctaaattccatctatgacagcacccacccactttccagatacctacctactgaggcagcaccacccctggtagagatcttcggaacagacaatctctccagggccagccagaaacgccacaacagtgtcctctgtgcccagcagctctgtgctcatccccctccatccccacatcaacctcaaactagaatggcgaaggcttgtgctgattagaccgacgtgggtttccatcatcattaatgccacagagcaggatgtttttattcaatctctggcagactggatggtgccactgaacacctgggtgattgtttaatcatctgcatgtgacttgtctggggagaggctgtcacagttccttatgaacaaattgtttctcattaattgggggatcaataagtgtgcaatcaaagaggcactggccaatagtataaatgagaatttccagagacaaggttatagcacaaagacaattaaaagctatatcaaaactgagttgccataaaatttggggggacgtgttgtcaccaagatggagctgtcgtgatgacaggaaattagaaggtagagctggaaagaaacaccttccagtggagacttgtgaagaatgggaatccccctgagccatcgtcggtgaaatctcaaaggcaccttttgcagagtgccagccatatgcccggcacctcaacccatcattttactttgtctgcacactacccaatggggcagagtaactgcacccattttacaggcaaggaagtggaggctccgagcagtgagcaacttgcccgaggtctcacagccagaaagtggtggagccgggctggactctacgttttgcttgatgttgtcataaacaatcaagaggagaaaaaaaaacctgccggattgccagtggccctatgttaagtgaggaggggttttgtgggaagaactgcaatttacttggaaatctagttataggaccagatagaaaactagcctctgagctttacgctggacattgagggagatgaaaacccaggctgcttatctgggttgtctgtaacccgagaaggggggatgtaatcgttggagtgagttctgagcagagatctgcctagaacacagcttcccataagaagcagggcaacatttttcttttattcatttagcaggatttcactgagtaccttctaagtgcctggcattgccattaatgcaaagggaagcattgtgataaggaagacacagactgtattagtatgttttggctgtaagagacagaaactcaaagtaaatggacttaagcagctaggaaacactggctcatggaattaagaaatccaacattgagctgggcatggtggcttctgcttgtaaccccaactatgcaggaggctaaggcaggaggatcgcttgagcccagaagttcaaaaccccgtctctaaaatattttttttaaatagccaggtgtggtggcatccacctatagttctagctactcactacttaggaggctgaggtgggaggatcacttgagtctaggaattcaagactgcagtgagctatgattatgccactgcactccaggctgggtgatagagtgagacactgtctctaaaaaaaaaaagaaattcatcatgatactcttggcctcaggcatagctacatccaagtgtttagattatgtaatcaaaatcgactattctccattttctataccctcgttttcccatattagagccattctcaggcaggtacttcacttgcagtggccaagacagccaggaaaagcccctacgtacatcctacctagaagcattaggtatctttcctaatgcttccagcaaaagtgctgaggaaggttcccattggcctggcatgggcccaattccatcccaagctacgttaggccatttttgcattactataaagtaacagctgagactgggtaatttataaagagaaaggtttcattggctcacgattctgcaggctgtacaggaagcatggtgccgccatctgcttggcttctggggaggcctcagggagcttgtattcatggctgaaggcaaagtgaaagcaggcacatcacatgttgagagcaggagagagagggtgggggggaggtgccacacacttgtaaatggccagatcttgggagaactcactatcgcaaggacaacatcaaggggatgctgctaaaccattcatgagaactctgcccccatgattcagtcacctcccaccaggtcctacctcgacactagggattacaatccagcatgagatttagaggggtcatacatcctaactatatacaagccaatcactccctgtgtctggtgagatggcgcagtctactggccgttccttggccaccccactacattgtgcagtggagtcagtttcacccggtggagtcagtttcatggagtcaaagaaggaatggtgctgtacccagtggagatctgaggggctctgtttggaagatgggggagattcctggccaggcagagagagcaggtgtccaccacacagctcttacccttgaagaactccccagtagtggcagggtgagcgcaaggccacctataactatgacaaaagaagcagaaagtgattgtgtgctccaggagaagactgggggcagggagtagggggacagagtctggagatgtgacagccttgcctcactcctgcagaaaccctgccagctgcctgtcccagtggactctgagtgattcttgtcactcaacctcatgaaagaggtaatcatgcccgacaagattcataaaagggcaggcggagtgatcaaagggctgagtgatgaagatcgactgagaagatgagggcccttgtatctgaagaggtgacagcagagaggggctgtaatatacacctctagactgcagggggtagacccagatttgctctccaggtccaagaatccagcaatgctgtgatcatttggtccttgagaaaggtcattcaagggaaacttacaggaaaacttgcccacaaaagtgctgggcctgcagccccaggagaagatccaggcagaaagaaggaaggagagaaccagcatcactgggggcctcacctggacctttgtctgagccagcgctttaacccagtctatccttttgtcctcatggcagcccagggaggtgccggcatctttagtctcctgttacagaagaggaaacagaccccagggaggtttaggaacttgctcaaggtcatgcaagctggggaaatggtggagtctctggcaatgagctccgtcctccacactcacctcctccacctgcacagatgctcttatgtgcagctctgtggagcatcctaggtgacctacaggttctggggaggaatggcaggcttctttttacacccctgccctccctgtcttcacccttcaagactggactcaaatgccaccccctccaaggagcccccagttgcgagccagtgctctctcctctgacctcttcttgctcagagcctctgtgatgcctggtgctagaggcaagaaacagcaggaaggagcaggggagagcacaagcactgcagccccacgggccagaactcaaatccaggttggaggtttccttggctctctggccttgggcaagttcatttctaaaacaggccaacagaacctcagtcccaggatcactgaagggtgaagtgagacaaggcccttgaaggcccatagcaagccccctacccaacccagtattcatcatcattatcatcatcatcattatcatcattcagttattgactgattgattgattgattgattgagatgggggtctcactctgttgcctaggttggagtgcattggtgtgatcatagctcactgcactctccaacccctggactcaagcgatcctcttgcctcagattccctagtagctgggcctacatgtgcgggccaccacatccagctaatttttttaatgtttattattattatcatcctttcgatataaatgccttctccccaaattgacatccaggtaattcttgaatggctgatccttggggaaacccctcaggcgacctgagatgaccgagatctggaggaaccatgtggttcatctatagtgccatggcagccacaccactcagagaccactcagtcataagcctagtcacaattaagccgctgccctctgagaacacagtgacctgccctttgtgttcaaagggcccttgtgttcaaagggtcctcattgccagaggctctgccatttccccagcttgcatgaccttgagcaagtccctaaacctccctggggtctgtttcctcttctgtaacaggagactaaagatgccggcacctccctgggctgccatgaggacaaaaggatagactgggttaaagctctggctcagacaaaggtccaggtgaggcccccagtgatgctggttctctccttccttctttctgcctggatcttctcctggggctgcaggcccagcacttttgtgggcaagttttcctgtaagtttccctttgaaactttgtgttcaaagggcccttgtgttcactgggtcctccttgccatctaggtccctgccccggtggcccacgaggaggagactcctccccgaaccaccccagccccagccatgtcaggtccctagactgcctcatcacaccctgtactccccactcactccttcacttcctcatctgtgcaggtgatcccaaaggccaacatgggcataaaatggaaatgatgggtgtggtgtgcatcacgtgaatagtagctgtgagcactagggtattcatccatgtctcctgccccaacttgagatccttggggtcacttgttccagaaacaggcattgaggccagacgcagtggctcatgcctgtaatcccaggactttgggaagccaaggtgggtggatccactgagcctaggagtttgagaccagcctggacaacacagggagaccctgtctctacaaaaaaaaaatacaaaaattagccgggtgtggtggcacgcacctgtagtccctgctactcgagaggctgaggtgggaggattgcttgagcccaggagatcaaggctgcagtgagctgtgatcacaccactacactccagcctgggcaccagagcaagacccgggaaaaaaagaaaagaaagaaatagccattgagagctttcctcattcagcaggcaccatggcccataggacagaggctcagagtccagtgcgggggaagaagaataaacaaatacacagatacatccataatataacattagccagtgatagtgtgccattggaaaaagttgaaccggcaagccagtagagggtggcagggcagcaggagggaagagttcgattttagatagggcaggagaggaatctgatttatctgagtcccctctgcccaggacagctttttatgcaaagtaggctatcaatttttaaaaaacacttttctttgatgccacctggatattactgatgcactccattgcagtaggggagttcctttagcaattcctttccagtctgaataattatctcctaatttatcagtttcataaatctacattttcataaatcattctgcctaaggaggggcacccgtggactgccagtctcagatcctggatagctggatgccgtgactgttaacgtggcatcagaaggcagggagagaagttgaggcaggctgtctgcctgggtgatcagattccccactctgccccgccacaggcctcccaggacctaggctcctgctccctccctggagactgacggtgcctacattgtcccttgattgtttgctcttgcaagcgtagctattgctgtgtttggaaattgtctcttagttacttgtgtttttcttccgttttatgttgttgcccaacaatcaggcatctcccaggcttccaaggctggcaagagataagcagcctgtaataaatgttcctgccacaattggtgaaaagatgaatgtatcagctgctaaagaaacatttaaaaaataaacaaagaaatcacccacaatgccaccaccttccctcaacaactcatttcatgttacatttatcaccttccacactgggtccacaaacacacagttttccaacattacctttactacatatgcctttttcttttcatttcatttcttttcttttttctttctttctttttttttttggagacaaggtctctgtctgtcacccgggctggagtgcagtggcatgatcatgtctcactacagcctcaacctccccagttcaagccatcctcctgccccagcctcccaagtagctagaaccacaggtgcacgctaccacgcccagttaatttttatattttttatagagacggggtttcaccatgttgcccaggctaatctcagaacgcctgggctcaagcagtccagtctgcctgccccagcctcccaaagtgctgggattacaggcatgagccactgtgctctggcctctgtatcatttttattctgcctttttcatcaccactcccccgccccccactgaacagatcacagtcccccatgtttctatagagtcttcataatgataacatctgtgtaatagcagcttccacttctctggtgttggacatttgggttgcttccagagttttgttattactgaacactgactatcttcttgcccagagttcatatgcttaggaacaatttgccggaatgtgcttactgggcaaagaccaaacatatggcattttctatattttcatactacttctgagaaggttctatgaattaccagcgatgtctaagtttgccagtttcaacatcatcttgctagctttacaagttgtcttcgttttggtgtagactctggagccaaattgcctaagtttgcattctacccctgccacatactataatagctatgtgaccttgggcaagttctttaacctttctatgccttatactccttatctactaaatggagataataaaagtgattatggccaggcacagtggctcacgcctgtaatcccaacactctgggaggccgaagtgggcagatggtcaggagtttaagaccagcctggccaacatggtgaaaccctgtctctactaaaaacacacgcaaaaaaaaaaaattagctaggtgtggtggcacatgcctgtagtccaagctacctgggaggctgaggtaggagaatcagaatcgcttgaaccccaggaggtggaggttgcagtgagccgagatcgcaccactgcactccagcctgggtggcagtgcgagactccgtctcaaaaaaaaaaaaaaaagtggttaccctgtaggattattgtgaagagtaacttcttcatatcgttgatcatcattattctctgactttctgtctgtgaatttgtgtcatcattaaaactgatctgtaaccccacagtcaatacttgctgcatttttgcggtcacttgcagacacgtgcagagaggcaacatctttagtcccccgatacacacgttcccagctgatatagaacaaggcaattctctgcctctcatactataaacaagtgtcctttttgccttgtacgtagtgccatgtttttcacatttttgtgctttctgctggtgatttcgttgcttaaactggccttatacatagtgcagaaatgctgttcagtgttcctaagcatgaggctgtgatatgccttatgaagaaaatacatatgttaggaagctttgttcaggcatgagtgatagtgcttttggctgtgagtttggtgtgaatgaatcaacggcgtaataaggcatctttaaacagaaacacacatacacaaggttctgtgttgattggttcatgaaaatgtgaacaaagactcacaggcacctgaccctgtatttcctctagaagcagtagttccaaattctctaattcagaattcacggtgactttctagaccgctcgtactgcgaataatgagaatcgactttaggtttttagaacagagtttagcatacagtatgcaccttttatgtgattgctattattttttaaaatttaaattttgctaatttgattggcacttatttaattactgaagaagaggcacacttgttgctaggttggctggttgtctgtataaatgttgttgatgtaggagtgtctaaagctgtgtataaaatgcaggcgagtctggcgtccaatggaagcagttctctgggggctgaagaagacactgtactctgcatatggcagtgtgacatcaggattgggtaaaggaccaggcccaaggtgtaaggatgggcttcagtgaaagctaaattagggacctggcaacactcctgccttttagccaaaagatgtgataatcctattgttaaccttgaaccaacgcctgcattgatatattttttaactgcattagaatatgacatgatggcctttgaaatatcaggggtgagtgttttgagaacacatctattcactgaagcaaaacgttagcccacctggtctgacgaaagctgttttctgatttgtaaatgggtggtatgaaatctctctcacaaagcctgagagcctaaaaacccctttttgttacacatcaaacaaagtttcacacaaagtgaaattgcataaaattgggatcttttcagaaagcccaggctgtatgatagcagtgtgtaaacacacgcctcctctctgccttggccagcacggggcatgaactgggtgtgttctttttcgctaatgtgtatttgagcctcagaatgagagctgcagaaacttccctgtagggccccaaactgtctgcccctcgtggcttctctaagtgggtaatgggcctgtcagaggctgtttgtagacaaacagctgggcacacgccccctgggctctgattagagacgcttcactgtgggaacagcagttcactcctggcttgggggtacagcagcccagactctcaaatgatgaggaggaacaacccaccgtttctctttcaggatattaaagcatttgaaaagcaaggaccccgtgcaattgaggctggagcacttggagcaaggtttctctgtctatgtcaacggtgccaattcggagctgaaatcatcaccgcggaaagctattcactctgacttctccagaagtgcctcccacacggaggggacacacggtgagcacaggccctccaggctgagtctcagctctgttaatcaaaattaattaggggcagggtgcagtggctcacacctgtaatcacatcactttgggaggctgaggcgggtggatcacttgaggccaagagttccagaccagcctgggcaacatggtgaaaccctatctctactaaaaatacgaaaattagccaggcatgatggcatgcacctgtagtcccagctactgaggaggccgaggcacaagaatcacttaaacctgggaggcggaggttgcagtgagccgaaatcgcaccactgcactccagcatgggtgacagagcgagactctgtcaaaaaaaaaaaaaaaaaaatagggattatggaaccacatcctgtgcatgtgaacaacgaacacaagttaactacacccgcatggccagaaagagagcataagaatgagaaagagaaatcctgttttattcctgtttaaactagtcttggcctctactaccccagagcaaaggcagccaaagcagtaaatttctagcttttacatttcctgggtcttaagtcagtactttaaggaaatgtctagggaaattttggattatatctgatttttcacttagtatgttttaactttagtacctaacccctgtgtaatatttgattttaccactcatttctgtatttagttaatctatactgtgcatactttaaatggatttcacgtgccctataagaaaaccacaggaagcttgtgtgtaatagaaaaattcccaacccagcctagcatagacacggaaaatgattgggcagttgaatgaatgaaacagcagagcacgtggagtcaggataccatggggaagccacttagtctctctgtgcctttgtttgctcatctttaaaatgggactcagttagacatggtggctcaggcctgtaatcccagcactttgggaggccaaggtgggcagatcgtttgagctcaggagttagaggccagcctgggcaacatagtgagaccctgtatctgcaaaaaatacaaaagtagctgggcatggtggtgcatgcctgtagtctcacctactcaggaggctgaggcaggaggactgactgggcccgggaagtcaaggttgcaatgagctatgactatgccactgtactccagcctgggtgacagagcaagaccctgtttcaaaataaataaataaatatttaaaaaacaataataaaatgggactggcgagactgcttatcccaagtagctgtcagaatgcctttaaggtaggctgccttgttggagaggccagtgtgctaccaagcaagttacaagaagatctggaatgaggcagactggatttgaatgaaccctgttctgccactttctggctttgagaccttaggcagttaggacctctctgaccctcagtttcctcttgcataaaatgggaataattatgcccaccttgcaggcttgctgggaagattaaatgatgtaagaaatgtaagctgtctgtcacacagtaactgatttgtgttattctaatctatggcctcacagacatggtaagatcccaagccattaatatatagtaaaagtcaaaacaacaacaaaagggcaagaagagaaaatgattcctgaaatggtttcctaggagagccactacagttgaactcagagtgtagcttgagctccccagcccccagggcaaatagggaaaccagtggctctcctagttttcacagtggaggcagacctgctgctgctagtaaggagaattcagcttttcctggtccaggtttcagggaggaacagataacaggattctgtgtacttggaacaccagcagtaccttcattcattcattcattcattcagcaaagagattcaccctctacactcttttacacaaatggtgacctcttgtacctactgtcctgaaccttgtctctgtagcttagagactcttctctgtatatacagacctgcctgatccggccatatattatacatattattccatggcatggatatatatactggaacttatttacccattccttttttgctcaacatttagcttgttttctgatgtcttgttgccacaaccacgctgtagtcaatgtcctcatacacaagactttgggcacactgatacgcattttagacatgagttacaaaccaacccagtactgtgagcttgtcatcagtgcctcaccaagtctccttccctcgtctctggtgcagattatggacgaagaactctgtttcgagaagctgaagaagccttaagacgcagttcacggacagcccccagtaaagtccagcgccgaggatggcaccaggtctggagactgtggccccagcccacgctttagaatacagagtgtgggtggctgtgggaatagaaatacaatcagagcatttaaaacccccatgggccaggcacagtggctcctttatgcaatcccagcattttgggagggtgaggtgggaggatcactttgagcccagaagttcgagaccagcttgggcaacaaagtgagacttcatctctactaaaaataaaaataaaaaattcgccaggtgtggcagcacgtacctctagtcccagctactcaggaggctgaggtgggaggattgcatgagcccagaagtttaagcccgcagtgagctacagttgcaccactgcactccagcctgggcaacagagcaagagcctgtctaaaaaaaaaaaaaaaaacaccctatggggagtaggtgggtctggctgggcatggtagtgtgccctttctgcatgtggaactgacctttggagagaccgctctgctgcacggccctcccctttggatgtggccactccagccccacttgggggtataggaaggtcagactcagagtcccatcatgatgactcattcattcagctatttttttattgagtacccactatgtgccaggcacagttctggatgtcagggatacagtgggtgcatatgacaaagcccctgccccatggaactgagatgccattttgggttgcagctggtgtgctgatgtcaggagcttgcattttggagcatctaccccaggtaccacacgtaggctcagctcccatgtaactcgtctcctttgccctcccagcagaactgtagagtatgttccaatattgtccctctttataaggagctgaagagatggaggttcagaaaagttcagtgagttttccaaggtcaacagctaagaagtggcagaatcaagagtcagtcttagatcttttgccccaaattctgtgttcttgctcatatagttctggatattttacctcatagtcactcataccttaccggggaccagcaggtcccagccccgtcaaatgaagaatgacgaggttcacacacttggaaaggaaagctttatttctcagaaagggtggcagcctccctcccgggtggccattccggcaggctaggaaacacagcctcaggccagaagccagaaaactgcactttgaagttcagagggataagacggatttatgctgaataggtggcgcaatatacatattcagtaagctgtaggaggagttatgaatatttatgaaaggagaaatatgcgcatgtgcagttgagcttcatgcctctccatggatcccatcgtcaaaaaatggcggcattagcaggatctgagggtggaggttttggccttctgatgtcaaaaggcgaatcgggagacacggaaaccctcactgtgcatcctctatagaggggtcagaaccactccatggtcagtggtcccttaccaggaagaaatgctggtcagttgtgtagtaaccacagaagggaggggcagcaggcaggctggttgggaggggcagcaggctgttggttgataccagtggtggagtctttgaaaagggctgatttctttcttttttttttttctttttttgagacagagtctcgctctgtcaccctgggtggagtgcagtggtgtgatcttggctcactgcaacctctgcctcccggtttcaagcgattttcctgcctcagcctcccaagtagctgggattacaggtgcctgccaccacactcggctgattttgtatttttaatagagactgggtttcaccatgttggccagggtggtctcgaactcctgacctcaggtgatccgcccgcctcaacctgccaaagtgctgggattacaggcatgagccaccgcgcccggccgaaaagggctggtttctttttaacccttagaaaagaaagcctcctggcggttaaggagggaggggatataatgaggcatgtctggcctcccgtcccatcattgctgggaactcagttgtaaggtttctctggggtccccttggccaagaaggggttcattcagttggctgggatcttgagattttctttttatttctcagccctgactgtacatttaaatggcctagggaggttttaaaatatagatgctcaggccccacccccggagattctgacttgctgaggcttaagcagtgttattttttaaattactgtaattttttctctttaaaatttatttttgtactatattttttatttttttatataaaataaaaatttaaatacatttttatttatttttatatattttttattttttttttacttatttttattcactatattacccaggctagtcttgaacttctggcctcaagtgatcctcctgcctcggcctcccaaagtgctgagatttcaggcatgagcctccacgtcaggcctgttgttattttttaacttgtgttcaccaatattgggaactactaccacatacgatttcacactgtactaaatgtatgggtctatagttaaatgctttcataccctttatcagcccacccacaataatcctgtaggtcagaaaatgtcctcattgtgctactgaagaaatcaaggccaagagaggtaaggtgacttccttagagttgcatagctactaaggaagagggcaggctgggatttgaactctgggctgtggttataaacccagtgatctttctgcctccccacaggggcatcttcaagtcattgattaactggggaagggtgtccctgcctgatctcagtgctgaggagcaaggcctggaggacacacagcctggaggcctccttttgtcccctgcaatgaatattaatttgttgctaatgaggcctttcttcacttctcacttaagacagttcttctacttgttttgagagccttctattatcaggagccatatttgtgtcttagattgtggcttaatagctggccctagagtctgtgcaatttaaaaaacttggcctaagattaattagcatcctcctcagtctctccttgtggtcccacacttcacagggcctaatcatagctaatttcctgatttcctgatgcctcgagggctgtaattgtccttctacactgtatcagtcaggggtcagtcagtgcctaacagcagagaccactcaggctattttaagcagaaacaaatgcagtgcagggagtcgggtgcttacgaagtccttgggctagcatgaggaggggactctgggctgggcctctaggaatggtgcctcaaaagcatggccacttagcctgggcctgccaggagagcggctgcctaggacaccattgggaaggtggggtatcagcatcaggaaggtgtcaccttagctgcaatccaggaatcagggagttactgccccagctgttggcctcagagtgactccatgcctgctgggacagcgctatgaagaccctgccccgcagcctggctagccagtcaggaacattatggaagaactccatgccctgtgcttagcactgaaacagccaacatctatccccctcctctcctcacctcacttctgctttccctggctcgtgtgaggccatctgattggctgaacctaaatcacacccagaacccaagccaaaatgtaaccataataggtccattgcacgatgctggcaagtctatacacatagaccctgggtttcagcagagagagagatttaattgtagggccgccaaacgaggagatggaaggaaacctcaaatctgtctcccggaggagtttggggccagtgtttttaagggttttggagtaggctgatgtgtggagatcattgattggtggaagagtgcagggggaagtcacgggacagggagatgaagaagctgtgttctcacgcagatcccgttcttctgtggggggccttcaaactggctagcgtgagttgttttgctggaatttaagatctgaaaaacatcttaagcaattcttaaacaaaagccttaatgattctacagtcagaaatctataaggaataatgggaatgctaatggtcagtatccagtgaatttcagttacaaggaagtgggtcaaagtgcagtgattaatgctgaattataactatattctgtgagaattcttgttaaccctgtgaggacagctttagaaagggagtctgggaaatgcagtatttggctttctggcctctaccccacagaaaggctccccaggaggagtgtgggatgggtaccgagagccggccccctccagtctagagcatggactctgctccacacacccaggcttttgggaaccaaccttaaagatagacacaaaccagggagcattcaaaagtggtgaatgaactacatgtgtcatgaatgaaatcatctgttaatttaacagacatgtattgatacccagcagggcccaggcactgtgcaaggctctagggttcaaaaaaaaaaaaaattcaagaaggctcagttcctgcctttgaagctcgggctgtgaagacatggggactgcttaactgggaggagggtgtgacacctgacttcaaatacatggatggcgggcctggcggggtccagaagttaaccacttgaagcctgtgggtcaaacttgcccccagataatggttgttgggctcatacagcttttaaaagacttttcgaagcttgccaacatttaaattaacaagattttatattaaaaatatatctagccaggtgcaatggctcatgcctctaatcctagcactttgggaggccgaggaaggaggatcacctgagctcaggagttcaagaccaccccaggcaacatagtgagtcccatctctactaaaaataaaaaaattagccaggcatagtagcgcacacctctagtcccagctactgaggaggctgagacagttaggatcgcttgaagccaggagttcaagggtgcagtgagccatgaccgcaccactgcactctagcctgggggacagagcaagaccctatctcaaaatcaaaaatctagatctcttcttccctggaaaaaatggaaaagtctggcccccacgctgggccatcctcctccccactaggcagccagcagcaggagccaagtccagctactgcctttggatagggcatgagctttcctgtttgccaaagtccccaccactccccagagcttcagtggtgaggctgagtggtagctgtggtttattatcagatttaggctatgatttctcttatctcgtgtttccatttcccgtctggttctttggggcatttgaatttgtagcccctggagagtggaaggagtaggctttggactgctcactggctgtgtgtcctggagctggctgtgtaacctctctgagctatgtacgtgtaacctctgtgagctgtgtgccctggagctggctgtgtaacctctctgagctgtgtgccctggagctctctgtgtaacctctctgagctgtgtgtcttggagctggccatgtgacctctctgagctgtgtgccccagagctggctgagtaacctctctgagctgtgtgtctcggagctggctgtgtagcctctctgagctgtgcaccccagacctggccatgtaacctctgtgagctgtgtgctctggagctggccgtgtaaccactctgagctttggtttcatcatcaatgaaacctcccagggctgctggaggggagcatgtgcagcgtgcattacaggtggtctcagcaggggctgcctgctgcttcaggtgggaacaggtgacagacaagtccagaggaatggctaagagcatagaccctggaaccttccagcagccccagtgcaaagccttggctccgcctcctgccagctgcacagtggctaagacgcttaaccccttggtgcctgcgctctcatttgtcatgtgaggttggtaatggtaattaatgagggcaattaatgaggatcagtggggtctgtgtttggagagaagctgaagcagtgcctggcacaggagaaatagtgaatggtgctgcctgttgttgttttaatcacagaggggcagatggggagggcagctcagcctggaggcctcagggctcttcactctagtatgttcctttgctcactcatactttacttctttcattccgtgctcatgtattgagcacatactcagttttggcacttacagatgccgggttccaagcaataagtgaggccagccctgctctcctggagctcatgttgatggggagcgggtggggaggttgggaaggcaaaggaccaaaggcaagcaagggagtcggaagacagtgctacgaaggaaggacagaggacagcagcctgaaagagaagctgtcgggggagcgctccttcagcgaaggtgggcagcacagcctcccaaggggccgcatcgcagccagggcctgagagttacctggagccagccccggaaagatctgtggctgggggaggctttcaggtgaggggacagtgagagcagcgggcactgggcacaggctgagaggaggcagggcgatcaggacagggtggcagaaagggtggggatgagggtgtcagggttgcaagtaggaagaaccggccatgcagggcctagaagaccacaggaggaagtttggatttcaatctaaatgtgagaatttccaagagggttgaaacagtagagcgccacgtttgggttcatattttgggttcatgtgtgcagaaaggaccgcccatgggagcaaggggctacaggaggaccaggaagcctttgaagcagggctacgtctctctccaccaaccttccccagcccccgtccttgcacttctgttccctgtccctgagctgccgccaactcgtagcttcagtgttcccctgatccatcgtgccttctccacacacggttttacactccctccatatttgttagttgaaagtttccaagacagagacagtctgaatctctcagctcatccctttctcagggcatggcctgggctgctgctgcttagcctggatgaggcaccccctcctacctccatcggctatgactagagcccctcagagaccagttcatttggtgcaaaccctgcctgccctggccacatgagcaggaaccatgagtcctatagcttcttgtcaagaaggctggaggtagcagagtgaatagactgggggtgccagctataccattattaccgtcatgaggaagacaggctggattggtttgctctggctccaagaagtggagttaagtccaaagtttctccatggtagacagtccatggagacagagtcttgggtccatgggatggagaggaagacaatctttctatcctaacccttttggatgggctcctgccatgcttaggggcagccaaggtaggcagagtggtcaaggcagccaagtccccagtggccagtggccagttctcaaaagctgctccaccaagagagggaccacagtcctctcccggtcttggggtttcacttgtagggccatgccaaccaggaggtatcagtggggccacacggtcgccttgtgtattcacattggtcagcaggggacaccgtggtgggatgcagtggtcccagtgcacagtgagcacctgcagtcccagccttattcacagtccacacagcccccttgcctccccattcaccctctgtactctcctcctggctgtcttgctggatttttttttttttttttttttgagacaggttcttgctatgtagcccacactggtcttgaactcccgggctcatgcgatccacccaccttggcctcctaaagtgctgggattaacagacgtgagccactgcgcccagccctgaaactctcttgaatcacacaccctgtttctactgaccaagcccaatccattcaccgcctccaggagaacaggtttctcttcttacggtctcacccaacaataagaaagcacatttgggtagagctgccctgacaggaggggctgcgtcaggtacactggcctccagatcccttgaccagaaggtcacagagtcatcccaactctggctcctggccaagaagccgatgacttccacctgtaaaacccttcccaagcccctcagattcctgggggtttggggaggatcatggcgatggctgtgttgggctcccgagctgccaccttccctgtggaatgggctggtggtgatgtatggcctcttgttcatactgtccttttccccccaccacttctgggccttagatctttatgctgctatctgtggattaagatttatggcttcctcagccttgtaatacttgggtggacagcggcctaatcaacagagccgtcgtttaccaaaatgctgtcagatttgatgaacgtcatcggctcttagcattaaattgctagtgaagggattggccttccagcaatttactgtggggtgggcgttccttaaaggtctctaaagcaagttcattgcaattattaaagcagaggctttgctctcactcagccaccatatcctgtgtcctgttgtggcctgtgcagcttcagcaccttcagaaaatctcacaagtaaaaatgggaagtgttgggggccctgtctcttgttatcttccttctgagttctgaaacccttgcagtgaggacgacaaatgaaacaagccgtaaagcattggcctttccagtgaccttgcacaacacagactgtcagagtggggagcactgctatttctaagagatcagacaaatcagggatgaacacatcaagtcagccggacctcccaaccctagacctacctttgtcagtgttttagagctctcgtacctctagagggagccatttgcatactgcacaacccacacaaccatatggggcagcccccagccttgctctttttttctacttgacaataagctttaatgcacaccttttaaaacagtttgcgaagaggggtggcagatatgaacaaataactctaggcatgaactgggctgagtgtgggccaggtatgaaataagctggccttgggttgcaaaaaggaacatggatttggggatgtcactgcttttaaatcctcctcccccatatgattgatactgcaagggtctacccaggtctgggtgctgcaagtaggcaagaaagagcagccgctttgaaacacccactcaggtacagcagcgtgccaagcggggagctagccaggtgcacagtcatcatcccttgcaagggcgtggaggtgggaggcagggagccatgcacggcctggggggctgggttggaacctgccagcctgggctgctcactggaggtgagccttccgtgtgggcagggctgctttcaatctcctcccagtggtggcagaggagcctccctggggctgggggcgggagagcaggccagatggagggactatttattcccctctccagcacccactcaacattagaaactctttctggaccacattaattttgtcacatgttgcttcataaacacattctcccattatgtgtgctgtgtgacctccttgagggcagggcattggtttttaattttttttttttttttttgtatcttcctgtgttttcagaaccttgtatgcagtcggcgctcagtaaaagcttgctgattcagtgccttaatgccgactgcaaacctgggtcctgacacctctgcgaggtgagcagtagtgctaaagggaagacgggaaaaccacagacgagagagaggccgggcgcggaggctcacgcatgtaatcccagcactttggggggccgagatgggtggatcacctgaggtcaggagttcgataccagcctggctaacgtgctgaaaccctgtctctactaaaaatacaaaaacattagccggacatggtggtgaatgtctgtaatcccagctactcgggaggccgaggcaggagaattgcctgaacgcgggaggcagaggttgcagtgagctgagatcgcgccattgcactccagcctgggcgacagagtgaggctctgtctcaaaaaaaaaaaaaaggagagagagagacctgggctttccttgaacattagagctctctttcatgctttcagttcaaatccaaggctagcagaattgttcatcccgattcttggttatcttaagttcaggcacgtttgggtccaggagctcaaacgatataatgacctattcttcatctctcaaccccccctgtgccccatgtggtaccaagacaagccaccagcagctgcccacttaggttccgccaccctgctaccacatctcttccatgccccagaaccagtcacccaatcactggggggacaggggaatcgcatgctctgattggctaggcctgggtcacgtgcttccaccccttgggaggactcagtgccatgtgaacctcttagggcccgggcaggaagtggggagcaagacaccatctcaaaaagcgaaaacagggtgcttttaccaaacacaggggagtatgtgctggacaggcagaagcaacggcttccaccacaaagccttgtcgatctcctgatcttatgctattggaaattgaatgtgcgtgcgtgtaaatgacctgggatactgctcaggtttacattctgattcccaaggcaaaggaggggcctggaattctgcatttctcacaaattcccaggagataccaatgctgctggtccgtggaccacacttagagtagcagggccctagtccaggccccctttttctggacaaaggactagaaacccatggggaggccaggccgcaccctaggccctggccggtgctggtgagtcaggcagctcctcaggcctgggccccgtgccccgtggtccctcctccttgccccttctcgagccatctcttccccggctagaaggcctcctggtatttggatgtaaattgagtagtttctggggaggagggaggagcatgctctcctgggaggtatggtagaaaattgcggcactattcacaatagcaaagacttgggaccaacacagatgtccaacaatgatagattggattaacaaaatgtggcacatatacaccatggaatactatgcagccataaaaaatgatgagttcatgtcctttgtagggacatggatgaagctggaaactatatgtcctttgtagggacatggatgaatgctggaatcattctcagcaaactatcgcaagaacaaaaaaccaaacaccgcatgttctcactcataggtgggaattgaacaatgagaacacatggacacaggaaggggaacatcacacaccagagcctgttgtggggggcctgctgtggggcctaaaacttaaagtataataaaaagaaaaattcaaatcaatgatgaacttcaaagccgttacagcttcatcccagtcgaggtaggaagacctccaggaatctccgggcctggaaacccccggttttggttatatgttccgggtagtgctttccctccacagccctagcgccgagggtaacacatgtgctaagaccgagttgatagggcctgggaggaagctgcgccatatgtggagctggaacccagggcaacatgggacaccagggaagttctctaatcccagtccaaaggcctctatagcccaggctggacacattgttttttaatttttaaaaaatttttttttttttttttttgtggagacaaggtctcaccgtgttgcctaggctgctctcaaaatcctggcctcaaacaatcctcccacctcagcctcctgaagagctgggattagaggtgtgagccaccacacccagcccaggtgggacacatttattcttcaacacgcctgctgggggcagtacagcatggtgatttagaacaagagttcatccacaactacagcccttgggccaaatctagcctcagcccgtatttgtaaataaagtgttactggaacacaaccgtgcccatttctttagtcattgcctgtggctgcttttgagctgcaataggattgctgagtatcctaacagagaccatatagcttgcaaagtctaaaatccttctggccctttacaggaaatgttggcccatctttggtttagtgtcaggcctgtgattaggctgtgcaacttcctcgctgtgtggccttgggcaagtggcctacacccttgtgactcagtttcccccttgggttgctttgagaactaaatgagcggccaggcacagtggcttacacctgtaatcccaacactttgggaggccaaggcaggtagatcacctgatgtcaggagttcaagaccagcttggccaacttggcaaagccccgtctctactaaaagtacaaaaattatctgggcctggtggcgggcacctgtagttccagctactcaggaggctgaggcaggagaattgcttgaacccaggaggcagaggttgcagtgagtcgagatcaccccgctgcactccaggctgggtaacagagtgagactctgtctcaaaaaaaaaaaaaaaaaaaaaaaaaaagaactaaatgagtgaatgcacctgagtgcttggagtggcacccagtgacatggcacgtagtgtgaaagcgttgatgggtgagcggggcattgtgaacttggatcagaaaggagttctgtccaaactactagagtttggtaggtcagtaagactctgacatcattttcttcatcatctagataatccttatgtttactaaacctgcagggaattgaatattacaaggggtgaaaggttctaaccccagggcttcaagggaaatgcatgccctaattaccaccaccaccaccacccctttttcttttttatttatttatttttttgctgcttctaggaccagttctaggaaattgctttttctagggccaattcctccctagtccatcttccagagacataatctttttttttttttttttttttaagcagggtcttactctgttgcccaggctggagtgcagaggtgcgatctcggctcactgcaggctccacctgccaggctcaagcgattctcctgcctcagcctcccgagtacctggaactacaggcacacaccaccacacctggctaatttttgtatttttggtagagacagggtttcaccatgctggccaggctggtctcgaactcctgatctcaactgatccgccctcctcagcctctcatagtgctgggattacaggcatgaaccaccgcgcccagccaaagatgtaatcttgatcatgccgtccccagcccctcttagctccagagcctcctataataacagccctcgtgggcatctggctgggtgccagccccattcacaggctcccacggagaccttgtctctcaatttcctcctgcatcatttttcttttagtcacttgtccttctctgagcccttctttgctcactttttctttagagccaggatctcgctttgtcacccaggctggagcatagtgacgtgatcatagctcactgcagcctcgaactcctaggctcaagtgatcctcttgccttgccctcccaagtagctgggactacaggcacgtatcaccacgcccggctaatttatctatttatttttttagagatgtggtctcactatgttgcccagactggtttcaaactcctggactcaagcagtcctcccatctcagcctcccaaagtgctgggattacaggcaagagtcaccttgcccagcccctaaatacccttgagtaccccttttgtgagtcttggagttcatgcacatactctgtgtcctgttctatctttcagtaacagggccaggagagggtgaggtaagtaaggcacctggagcagaatattaaaggaggcctcatgctcagatttgtgcatggacaggttggtgcctgagagtgagactcccttaaatatcacaccctgggcaccttgctcccctcaagccagccctggccctgcttactgagtccaacacagccagctttacctgtggccttggagcaggtggcagtttctctggttcactaccagaggacatggttggctggcttttgggggctatgccgaatgaaacatacacctgagaggcagtctggtgacctgtgcagagttgatgccgtgtaaataggtacagccctgtggtgctgtgtgccaaagccccagccgagggctcacctgcgtcactgcgtgtcatctttgtggcagctctctgatgaagattcatgagtggtgtcttaacagatttggaaaccgggctcagggaggctagatgacttgctcaaggtcacacaaggagtaggcatcagagttccaggaatcacgtagcatgccggagtctagaacctgggcccttcaccacacaggagccacggtaacagaaacacaaaagtaacaagtgcccagagtgggttagcaagtgggatggagttgagctgcttgcaacagaaactagattgctgcatcttagagaacatggctcctgttttcctcatttgtgaacagtgcatttggaggcaggctggtggcatgggtgggtggtgccaccagtaacccagcttctctgttgcgctgggccatctttggtgtgtggctttcttcctcattctcacaagatgactgctgtgttcccaaacatcccatccacattccggtcaggaagaagggtagaagggtaaagggcagaagtcctgtctgcactgagtctctcctgattaccaggaaaacagagttttctctgaagctctgcctcgtagacttctaaccactagcattgccacacctggatctcgtggccatccctagctgcaagggcccccagcaatgtgaccgtcttagtggggcacatggccacctcagtagagtcaggcagctgacagataccaggtaggcagagagcattgtctccaaagctaggtagggtttggatgcatggaaaagatttgggaaaatggcattcagattgggagaatagcataagcagaggcacagaggtgggagagttcagggtacaagggagggccaagactgtcacaaataactttaatcctcttcacactggtgtaagcaaaaaggagaatgtttcagtggggctcgcttcaggtgcagctggatccagggcttctaaaacccatcaggactctgcttcatcctctcagctctctttgctctttctgttagggacaggatggtccccagcagctcctgatagacttccctctagcttcacatccctcaagaagagagcacctctttcccacggctctaacaggaatccagggctgttctcattgctgccttaggtccgtttctatccctggactggctggccatagcatgttataagggtggaataggtggattggccaggcctgcctcaaatccccaccatggggccacatgtggactgagagttgggaggaaattgggccccagaggaaaacaagggaggtgtttcctgaaggacacagcctggatgctggactgatgaagctgcagatcctcgcagccccagaagccctttgtttggcctaattatcaggtgtgtggttgtctgtgcagcaatcagggcaagaaggtgggctgtggccacatggtagggaaccttgcgtgccaggtacatcagttaaggtacaggtttggctgctccagcagggagacacaagtaacagtggcttcaacagcatgaaagctgttgtctctgacacaacactgcttagatgggagcactcgcccttgctccatgaggtcacccaggaacccctgttactctgaccatcctccagatgttgctttcctccccccagcaccagtcagctcactcccacctccccattgcagctggcagaggaagctgcagggcctggggaagctggcccctgccctttgaggaaacacctagaagatgcaatgcacatccctccctcccacccacagcttgtgagtcagaacgggttcacgcggttcctcttagctgcaggggaacctgggactccatgtgcacatctggaactacaggcagtagaagcaggggaaagtggacattggaggggagtctgtaatcagccacaccaggccaatgagtttccttcccaaagaacgatccaaaggatactagaagaaagagaggccccagtccagagtgtctgcagtccagaaagtttgggaaatgtcccatgctgtgtttcattttaggatatctgcagtgtgagtatgtaggccagggtttcccaaacaagtctaatcacaaagcccccccctttcttttatttaaagacagggtgtcacattgtcacccaggctgcagtgcagtagtgtgatcttggctcactgcagcctcgaactcctgggctcaagcaatccccccacctcagcctcccgagtagctgggacaacaggcacacaccaccacacctggctaatttttttttttttttaaatggagtttcgctcttgttgcccaggctggagtgcaatggcatgatctcggctcactgcaacctctgcctcccgggttcaagcgattctcctgcctcagcctcctgagtagctgggactacaggcatgcgccaccacacctgactaattttgtgtttttagtagagatggggtttctccatcttggtcaggctggtctcgaactcctgacctcaggtgatccgcccacctcggccatccaaagtgctgggattacaggtgtgaggcaccatgccccgccacctggttaattttttaaatttttttgtagagatgggggtctcactatgttgcctaggctgggctccaactcctggcctcaagtgatcctcctgcctcggccttccaaaatcctgagattacaggtgtgagctaccacgccttgaccacaagtcctttttgagaagtttagcacctactagaagtctactgataaagaatttccaaccgactgggcatagtggctcatgcctgtaatctcagcacttggggaggacgaggtgggtgaatcacttgaggccaggagttgaagacaagcctggccaacgtggcaaaaccccgtctctactaaaaatacagaaatttgccgcgtggtggcaggtgcctgttgtcccagctactcaggaggctgaggcaggagaattacttgaacctaggaggtagaggttgcagggatccaagatcgcaccattgcactccagcctgggcaacagagtgagatcctgactcaaaaaaaaaaaaaaagaacagaattgccaaccaaaaagttatttttaaaaattctcctgcacgttctttggacagcaagaaacagtagactcttgagcgaggcggcatggcccatccagtgctggcccggatgaggaggaggcctgtggcccatgctcatcatgacaccactgctgttgcatgcaggcacaccaccccatggtatctatgcccatagatcctggctgaacctctccagtgccagtccctgccccgcagaggaatgaagacctcattccaccttatctgaaatggcctgcatttttgtacagaaatctgtgcagatcagaacagaagctggcccacggctccacatcgaacctcctgtggactattctgatgattttgagctgtgtggggatgtgactctccaggcaaacaacacttctgaggatcgtccgcaggtagggatggccttggccttgtgctcgggacacctgaaggacggcgaggctcggtgctgcagtggcccctcggggcactttctgacagttatttattctgtccttcactcgccgctgtgttccttcactcttgcgttcatttcacacagtttgatgagcagaccttgggctagaggtcagcattcagaggcacccggtgaccaggggtcggtgaggctggggtctgacttctaagggtcactagcacatagtccctgtacagggagagaatgcagagaggttggggcagagcatggcgcagacagaggagggagaggatcccggaaggcttcctagagggagtgacttttgtcctgggtcctaaaagctgggtaagagtttgaggggcaagttggtgagggcaggcagcaattgctgatgctcagcctgtccacacgtgtatacatgcacctgataaatatttcgaataccacccgcagggcggcaggagccacatgtttaaaagcctagaggcctatgcagctttggcttggagtccatgtcggtttagcagcttacagggttgacaacaggacattttactccccatcctcagattgccatttcattcctgaagtcctttgaactgcaaaagtatatcccagtccttccttccacaagcatttgttaagcacctctcactgaccatcaggctctgtcccaggcaccagagattcagaaatgaacaaaactgaagaggtgcctatacttttttatttttgtattattttttaaagacggaattgtgctctgttacccaggctggagtgcattggtacaatcatagctcactgcagccttgaactcctgggctcaagccatcctctcaccccagcttcctgagtagctgggattacaggcatgggtcacacccagtgaggtgcctgttcttaagcaacctgtgctccaaaggggagacagacaatgaagaaaaaaggaagaaataaacgatgagatcatttcaggtatcagtaagttctctgaagaaaacagaagagaaagatgggatagcaagatggtgtgggagagaaggcagtgttagccaggatagagagagaaggaaggcctctttccagcatgacatttcagttgaaacctgatggattaggagtgacctggggccaggcgctgtggctcacgcctgtaatcctagcactttgggaggccaaggtgggcagatcacctgagatcaggagttcaagaccagcctggccatgttgaaaccccatctttacttgtaatacaaaaattagctgggcgtggtggtgtgcgcctataatcccagctgcttgggaggctgagacaggagaacctcttgaacccgggaggcagaggttgcagtgagccaagactgcaccactgcattccagcctgggcgacagagtgaaactgtgtctaaaaaaaaaaaggagtggcttggcaaggagcaatgagaaaggcattccagatagaggaagcagcaagcgtgcaacggcatgaggccaggcttgttcaaggagcaggatgcaggcacagtgtgaacaagggggataaagaatgaaggaagattaggtgcactggggcagaacaggcctgggccagggtggaggtaggagtggatggttggggtttactccaagggcattatttttataaatagaatgagtacatcatctccatagttatgtagaagcaaaattatccagaggtggtaggtcaaagtcaagttgctaagccagaccctgccccgcttgccagagtggcatttgttcaactctgggccccggctgcatattcagtgacgtcaccgcaaaggcagagtcttgcttctacgtatcgcttttatgaagtgagaaggactcttactggagatgggaatgctgtccaggaaatgttcctccgattttgctttcatgcttgtacttccttatttgctgataaaggaaagacagataaagagcaaggatcactttgtttcacatcttggttgtaaaatacccgagtatgttggaaatttttgtttccctaaaacagaatataaaagtcgttttctatggaatgatccaatgactttgtttctctgcccagtccattaaagtggggttaaacagtaggcaaaattgtggactttattacctttaaaactcaaatcccaaacaacacagacaatttgcttttgaactaaacagccccctgctcaggatcagtctgtgcaaaacagccatcaatttctcttaattgggaggctggtttttagccaagcataatatgttacagtcccagccccagatatgtatgtgcccttcaagcaagaggccatggtagtttgcctttggtcaagcattgggcacctctcgttaaattaacatatagcccttcctttgtgagctctcaagctccctacaacacgggacagcagcattaagtcccattagcatccttttgtgcacatactccgcataggcatggctgctgctccgccagcacttaattttctccactctgagtgcttgattatatttctctcttttcttttttttccccatcttgagggggcactccataaggcttcacagtcaatttcctcttggagttattttcctgcaaagtgtaagagtaaaatggcaatgccagttttcagcaaaggcagaagtcttaagagatgcaatctgaacagggaaaaaaaaaaaaggcacgtggctaaatatactcagccacctcacactgtttgcaagcgcaacctgaaatggagcaagaggaaatgcatgtccgcatatgtacttttcatctgaccttcactgttgaaacacaccagcctctcgcctttaatcacatcttccgtgaagttcaatttcatagcttctctgagttcacagactggcttgctgcagacatgttctgttgccctccaccccgttgacttgtacattgcttttaaaagatgtgaattactagctgacatttttatttatttatttattttgagacgttgtctcactcttgtcacccaggccagagtgcagtggtgcgatctcggctcactgcaacctctgcctccagggttcaagcgattctccagcctctgcctcccgagtagttgagattacaggcgccaaccagtacgccccactaatttttgtatttttagtagagatggggtttcaccatgttggccagactggtctcgaactcctgacctcaggtgatttgcccgcctcaccctcccaaagtgctgggattacaggcgtgagccaccatgcccaggcaagggttccacattcttatacactaacagtgaccagagctgaggaacagctgtccccttacttaggtgtgtgtgctccagtgtaccaccatcctgggtaccattccggacactgaggataaggcagaagagaaacaagtatataatgtgtcaggagacaacagggctgataagaaaaataaaataggaaggggatagagaaaaatggccaggggctgctattttatatggagggtgcaggggcttccccttgatgaggtgatacttaagtagaggagaggtcagagaagcagccatgggtcagattgcatggggcttgagggcagaaataaagatacgggattctccttaagtttgaggggaaaccatcatacctgttttacatctctggtgaaaggaagacaccgctttccagagagttctgccaaagtggcaagtcttagttatgttggctttcctgggcacatggttgtatgctgcaatggatgatatgttcaccgtttaagtggtattgtctcttgctgggcgctgtggctcacatctgtaataccagcactttgggaggtgaagggtcgcttaagatcaggggttcgagaccagcctgaccaacatggtgaaaccccatctctactaaaaatataaaaattagccaggtgtagtggcacacacctgtaatcccagctactcaggaggccgaggcaggagaatcacttgaacctaggaggcagaagttacaggagccgagatggagccactgtactgcaggggcagagtgaaactccatctcaaaaaaaaaaaaaaaaattatattgtctctgttgatgtatcaggaatgaaacaaagtttacgttttaaaaaattatgatacttattttcctgataatgcataattgatataaaaaattcaaatgacaaggctaccataagcgatgattatgccactgcactccagcctgggtgacagagcaagaccctgtctctaaaagaaaaaaaacaaaaaatcaaatgatacaaagaaaacaaaagtcctttcataatcccactgccccagagataattattgtgagtagatgggtagataaccatccggactaaaaatggcatatttcattatatccaagaagagatcattgatccagaatatcctggacctgtctcgttcccagtgagtggtatctcccaagtttagttacctctgaagtccctgagagcgtgatacgtgacaggaagacagggccaccctgaagtcttctggaatgccttctgagtgttctttccattgggtggatggtggcatggggtgagtctggttttttctcacagtaacagttcagtgtcttaaagtggttattgctgacatttataaacgactaaagaccaccatccttggccagcccaccccaaccctgcccccagccagactctgcagcacatcccttcagtcttccttcattcgttccagtgatgagacttagggcagtttcaatgcgtggggtttaccacagcaggaacttagggcagttcctgctgtttggggttaccatataaatgacctctgagtgggtgcctttttaacatttttaatggttattttcacataaatgggattataccatccatgctatttgattttcccacttttttttttttttctttttgagacaaagtctcgctctgccacccaggctggagtgcagtagcacaatcacagctcattgcaacctctacctcccaggataaagcagtcatcctgcgtcagcctcccgaagagctgagacaacaggaactcaccaccacatccagctaattgttggggagttttttggtagagatagggtctcatatcccactatgttgccctggctggtcttgaactcctgggctcaagcaatcctcctgcctcagcctcccaaatttccagatattacaaggctaagccaccatggccagccccatttacttatttatttatttaaagacggagtcttgctctgtcaccctggctggagtgcagtggtgagatcttggctcactgcaacctctgcctcctgggttcaagcagttcttctgcctcagcctgtcatgtagctgggactacaggcacgtgccaacacacctggctaatttttgaatttttagtagagatgggatttcaccatgttggccaggctagtctcgaactcctgacctcaggtgatctgcccgcctcagcctcccaaagtgctaggattacagatgtgagccactgtgcctggcctcccattttttaaaaaaactcaacaacataccttggccatctttctacactggtactcactcaactgccatacagctccatggttcagagcactgttttaggagttggtggcctgagtttggatcctggtccattgactggctgtgtgccagcaatggtgttgatgtagcagggatgagagtgatcagatccactttaggagcaagagcagagggtgatttaatgaggagaagatgggaggcagggagaccaacagaagagcgaggccccagcatgtcttcagggacaggaagttgtttttaccatgcccagttttctgtgcttgtccctaggataccaaatctcccaccagtaccaagccctgtggttttaacttctcccttctgaatgcatgtggacattctgacccttcaagcagcgtggacaaagaaaggatcctcttaactattcaggatgtgatggtaagatcagttttcagcatcctaacccctaagggctggggatcttttccgtagccaagcagctgtgcctgccttaagatggactccgtgagagagtctaggaaaaccacagggcgggcacggtggcttatacctgtaatcccagcactttgggaggctgaggcaggaggatggcttgagctcaggagttagagaccagcctgggaaacagcaagaccttgtctcaactaaaaatttttaaaatgtgcagggtgtggtggcatgtgcctgcagtcccaggtacttgagaaactgaggccggaggatcacttgagtccaggaattcaaggttgcagtgagctatgattgtgctactgcatgtctgcctggatgacaaagagagaagctgtctcaaaacaaatatacaaacaaaaaccgctgggctgctaccccctagaatggatatatatatatatatatatatatatatatatatatatatatatatatatattttgtttgtttgtttgtttaaagagatggagtcttgctctgtctcccaggctagaatacagtggtgcaatcatggctcactgcggctttgaactcctgggctctagtgatcctcccacctcagcctcccaagtagctggggttacaggtacgcaccaccatgtccagccaattatttatttatttatttatttatttatttttgagagacaaggtcttgctttattgcccaggctggtctcaaactcctggctcaagtgatcctcctgcctcaacctcccaaagtgctgggattacaggcatgagccgctgcgcctggccagaagatgtaaaacaattcacaagagatttgacttaatgatgttacatttaaataataagagctcacgttaaatgagcacttaccgagtgccaagcaccatgttgagcatgtaacatccatcacgacgttaaccctgtgagttaagttctagggattttcattcccatgttatggtttgaggaaactgaggaataaagaaataatgttgctcacccaggcctcagggaagcccctgctggaagcccaggctcatgactccttgttccttacaattcacagtcacaggcggggaatattgcactcatctggttttgctcagaatgtgccacagtctgttgtgaatattattgatgttatacccaggagcaaggtattcagaggtgaccatccatcagttatgcttaataatgttttaaacaatgatagagagaactctccttagccaaatatctcctcagtgaatccatgactgaaaatgtggatgaaaaatgtttttcaaaagcgaaatccagtgaggaaacagccagacaaacccaaattgagggggatactctaaaaacaactggcctggagtcttcagaaatgtcagtggcagccaggtgcggtagctgatacctatcatcccagccctttgggaggccgaggtggtaggaatgcttgaagccaggagttccagaccagcctgggcaacatagggagactccatctctacaaaaaattagttgggtgtggtggtgcatgcctgtagtcccagctacttgggaggctgaggtgggaggatcacttgagcccaggaggttgaggctgcagtgagctgtgatcatggcactacactccagcctaggcaacagagtgagactctgtctcagaaaaaaaaaaaaaaaaaaaaaggaagaaaaaaaagtcagtagcatgagagacaaagggcactgtttcagattaaaggagagtaaagaaataacacaatagcaaagacttggaaccaacccaaatgtccaacaacgatagactggattaagaaaatgtggcacatatacaccatggaatactatgcagccataaaaaatgatgagttcatgtcctttgtagggacatggatgaaattggaaatcatcattctcagtaaactatcgcaagaacaaaaaaccaaacaccgcatattctcactcataggtgggaattgaacaatgagatcacatggacacaggaaggggaatatcacactctggggactgtggtggggaggggaggggggagggatagcattgggagatatacctaatgctagatgacgagctagtgggtgcagcgcaccagcatggcacatgtatacatatgtaactaacctgcacaatgtgcacatgtaccctaaaacttaaagtataaaaaaaaaaaaatcctaaaaaaaaacacaataaaggcagtgtgatgagatcctaggggtgtgagggagaggaattgctacataaaaggagaattttggaaaatgaatgaaatttgagatgaactatattatattagataatattgtattgatgttaaattttctgagtttgatagttacattgtggccatgtaagagaatgtccttgttctctggagacacatgctgaagtgtgcaggcatgaggggctgtgcataaatgggtcaggatcaagaatatgtgtgtacatattgagaaggaaaaagtgggaggggagagaaggagagaaatgtggcaaaatgttaacaactggtgaatatacgtgaagggtatttgggtgttcattatactagcatgatacgttttctgtaggttttacattttttcaaaatagaaaaagctagcacattaaagaggagaggagctgctccagtagaactaagcatcaccaaaagaagaaatagagaaaaatggccgggcacagtggctaacacctataatcctagcattttgggaggacgaggcgggtggatcaccaaggtcaggagttcaagaccagcctggccaacatggcaaaatcccatctctactaaagaaagcatacctagttaaaaaacaaaaaacaaaacaaaacaaaacaaacaaaaaaaaaacaaggccagacgcagtggcttatgtctgtaatcccagcactttgggaggccgaggtgggtggatcacgaggtcaagagttcaagaccagtctggccaacacggtgaaaccccgtctctactaaaaatacaaaaattagctgggcgtggtggtgtgcacctgtaatcccagctacttgggaggctgaggcaggagaattgcttgatcccgggagtcggaggttgcagtgagccgagatcatgccacggcactccagcctggatgacagagcaagactccatcttgggaaaaacaaaaacaaaaacagcatagtaggattgtatcaatgtagtttcccaattgtgatgttatgctgtagttatacaaggtattaccattgggggaaactgggtgaagggtacatgggctctctctttatttttccttacaaatggcatgggaaatctataattagctcaacataaagagtaaaaattaaataaaaacacaaatacccaggtcttaccactcagaggatctgattctgggtttgcactcagccattgttcccttttttaacgtccttatgtgactataatttgtcgcaatgtttgagaaccatagttataaggaaaagataaagctgcagttctcaaagttggatatgcataagaatcgcttaggatatttgtttaagacgcattttttaggtctgaacttttaagctaatagaatttgtagataggaggtagcacatttttagcaaaagaactcccagtgattctgaaccagagacctgaagattagagcacacttccaatggaaggagcatcttttaagttactttggactttttggcttagatttgaggactgtaaaaaagggatattttaaaaaatcaaaattaaaagcttttctacattgtacaaagttaagatgaccaaccagttaaaaagcaacaaaaatacagagtttcaccaaggtcagaaaggtacaggatggaaggtggggtctgcccttctctttggaaccatattctgcacttctggaaacctggaggggagacgatgtcccttaaaaaaataacagatggaagtacagaagcagatagcccctaaaaatatctcctgtactataggtcaatttgttttttgttgttgttgttgtttgtttgttttttcagagtctgactcagctgcccaggctggagtgcagtggcatgatctcagctcactgtgacctctgccttccgggttcaagcagttctcatccctcagcttcctgagtagctgggattacagatgtgtgctagcatgcccagctaattttttttttttttcccagtagagacggggtttcaccatgttggccaggctagtctcaaacttctaacctcaagtgatacacctgccttggtctcccaaagtgctgggattacaggcgtgagccaccatgcctggcctgtaggtcaatttgtatccaaaatattgaccattaatatcaaaaaaagactgaattatgttcagcatagtcttttaagaagacaaggaagtattcatatattttcaaaatatttacatacagaataatttgtttaggttttttactatttaaatgggtaaatttggctgggctcagtgactcatgcctgtaatcctggtgcttgggaggccgaggcaggaggatcacttgaggccagaagttgcagattaacctaggcaacatagtgagaattcatctctataaaaaattaaaattagctgggcatgctaatctgcacctctagtcccagctgctcgggaggctgaggtgggaagattgcatgacaccaggagtttgaggctcccctaagccatgatcgcaccactaccctccagcctgggggacagagcaagaccctgtctatacaaaaaaaaaaaaaagtgaattttagataaatagaaaattaattttgcattgttattatattaagacagtactatgttatgaaaataaatatgtacccatcctatttggtttttctaagtttggttacattttaaaatgtggctcaaacttgagaaaaaacaatgcagagaaaatagaggcatgtaggagaggctttctgattaggtatgacttgaaaaaatatgctaaaatgcaggataaggatagaaatacactgaggaatgggagggagtgtggccaaactgagggctcagattcgtgactagaagggccagcttcagctcacagatgtgttctgttggccggtttggtggcacgccatggttatcattgttgctgtttgacttggacttagaaaacttttcttctgagcatgcacccccagtttggcctggtccccactacctattgtacaacactgtggtttatttgatagtttatataacattacgcctcctgaggatgtcggagtttgcgagtcttgttttagggaggagaaataccaagtgacagattccgcaagcctgggaaggtagcttgggtttttccataaacattctggggccttggctaagtcatactcctctggggcccccatttcctcctttaacaagaagcggtgaattaaatatctcctgcacctgccagctctgaaatcgtaaatcctaggtatggtttataagaaaatcttattcccatattacaaaatccgtggattggccggcagtggctcacgcctgttatcccagcattttgggaggccaaggtgggcggatcacctgaggtcaggagtttgagaccagcctggccaacatggtgaaaccccgtctctattaaaaatacaaaaattaaccaggcatggtggcgcatgcctgtaatcccagctactcaggaggctgagacaggagaatcacttgaacccgggaggtggaggttgcagtgagccgagatggcaccactgcactccagcctgggcaacagagcaagactccatctcaaacagaacaaaacaacaacaacaacaaatccatcgatgggagtagacgatacataatagtttgtggagctctggctcatatcagtacttttttttttttttttaagagatggggtctcactacattgcccaggctataatgcagtggctattcacaggtgcaattatagtgcactacagcctcaaacacctggccccaagccatccccctcaagtagctcaggatacaggcacacaccaccgcatccagctattgctctaggtcttttgcaagttcagtatttagggcctcaaacaccttcccccatcccagatctaagctt

SEQ ID NO: 3911 - protein, 74 aa, Homo sapiens
MDALESLLDEVALEGLDGLCLPALWSRLETRVPPFPLPLEPCTQEFLWRALATHPGISFYEEPRERPDLQLQDR

SEQ ID NO: 3912 - DNA, 1348 bp, Homo sapiens
cctctccccccgggctccgcccaccccacgccgggaacccacgcgggccactacaagcccgccctttcctacgtctggtccagtcggtcttcctccggcccgggccctggcccagctagccggccatggaaggtaatggccccgctgctgtccactaccagccggccagccccccgcgggacgcctgcgtctacagcagctgctactgtgaagaaaatatttggaagctctgtgaatacatcaaaaaccatgaccagtatcctttagaagaatgttatgctgtcttcatatctaatgagaggaagatgatacctatctggaaacaacaggcgagacctggagatggacctgtgatctgggattaccatgttgttttgcttcatgtttcaagtggaggacagaacttcatttatgatctcgatactgtcttgccatttccctgcctctttgacacttatgtagaagatgcctttaagtctgatgatgacattcacccacagtttaggaggaaatttagagtgatccgtgcagattcatatttgaagaactttgcttctgaccgatctcacatgaaagactccagtgggaattggagagagcctccgccgccatatccctgcattgagactggagattccaaaatgaacctgaacgatttcatcagtatggatcccaaggtaggatggggcgccgtctacacactatccgaatttacacatcggtttggcagtaaaaactgctgaacttggtctcaagatgtggaactgtggagaaattctaggacatgaacaagctatcctttcatcgaggacagcaaacattatggtacagttggcttggaattatgtctttctcttttaatttgattgagtggaaatctgagtgaatacaaatataaatgaacaacataaaaacttttgttttgacatgtcaaattgaaacttgataaagtgcgtacttgctaagatattcctgtggctcatgcgttacaacacgaggacttaagccagtaatcgtttttgttcagatagaggtgtggaggtagagccagcccctcatgtctgttttggatgttttgtgtctctccagctacattgtaagttccttgagggcagggccatggcccattgctctgtgaatctcaaatgcccataaaaggtgcccataaaatgttttcttgaacatttgaatgtgctgttgtctggaaaggggtaatattgtgagctgaatcagcaataagtattagtctttttggactatggtattgttaaaaagactgcagccctctcagacttgagcgttaattggcttatttatttatggctttaaataaaatcgatttaacgtt

SEQ ID NO: 3913 - protein, 205 aa, Homo sapiens
MEGNGPAAVHYQPASPPRDACVYSSCYCEENIWKLCEYIKNHDQYPLEECYAVFISNERKMIPIWKQQARPGDGPVIWDYHVVLLHVSSGGQNFIYDLDTVLPFPCLFDTYVEDAFKSDDDIHPQFRRKFRVIRADSYLKNFASDRSHMKDSSGNWREPPPPYPCIETGDSKMNLNDFISMDPKVGWGAVYTLSEFTHRFGSKNC

SEQ ID NO: 3914 - DNA, 716 bp, Homo sapiens
aatcacagcagtgccgacgtcgtgggtgtttggtgtgaggctgcgagccgccgcgagttctcacggtcccgccggcgccaccaccgcggtcactcaccgccgccgccgccaccactgccaccacggtcgcctgccacaggtgtctgcaattgaactccaaggtgcagaatggtttggaaagtagctgtattcctcagtgtggccctgggcattggtgccgttcctatagatgatcctgaagatggaggcaagcactgggtggtgatcgtggcaggttcaaatggctggtataattataggcaccaggcagacgcgtgccatgcctaccagatcattcaccgcaatgggattcctgacgaacagatcgttgtgatgatgtacgatgacattgcttactctgaagacaatcccactccaggaattgtgatcaacaggcccaatggcacagatgtctatcagggagtcccgaaggactacactggagaggatgttaccccacaaaatttccttgctgtgtagagaggcgatgcagaagcagtgaagggcataggatccggcaaagtcctgaagagtggcccccaggatcacgtgttcatttacttcactgaccatggatctactggaatactggtttaacccaatgaagatcttcatgtaaaggactgaatgagaccatccattcatgtacaaacacaacatggaccgcaagcatggtg

SEQ ID NO: 3915 - DNA, 485 bp, Homo sapiens
caagaaagctgggtacgcgtaagcttgggcccctttagggatactctagagcggccgcccttgttttttttttttgacggtagtttcccaagtttattgtaagtggttttaagttaagtctcatccaaacaagttatcacacagcacttaaccaagccctgggatttactgtcttgatgactacatggctttgcacagtctgagatgcttcagtgtgcaaggcagcatctggcggggaggagggggtcttcacagggacagctggcaagagacttcctgaggcacatcagctacgttggtcaatttagggcacggtctggttctgcagctctgaaaggtggattctttctattagcacactttacaagagggattgtcaaggattaactcagtcaccagaaacgaaacaccacttcagaaattcagagacctctgatcaacagaacagacattggcgctttaactgctaaagcagctacctactt

SEQ ID NO: 3916 - DNA, 235 bp, Homo sapiens
attttggagaataaagagacctgtggatttgaggtgccatttgggtagaaagaaaagacgtttacaccgagaaatagtctgtgttgccctgaaggagcagagggatgcatcgctggaggtgacctacagttgaagaagactcattatgacagaccttgtccttcttccttgtggaaagtgtttcctctgctgctactgctcatgagactcttccccctccctgtcccagggaacc

SEQ ID NO: 3917 - DNA, 510 bp, Homo sapiens
ttatttataataaacagaaatttatttggcttagttgtagaggctaggaaattcaagaccaaggggccagcatctgatgagggccttcttgctgtgtccacccacggcaaaggtgaaggcagaagggaaaaagagtgtgtgaggaaaagagggagccaaacttgcttttataaccaacacactcctgagataatgggattaatcttttcatgagggcagagacttcacctaatcacctcattaggccccatctcccaatactattgcaagtttcaaacacataactttgggggacatattgaaactattgaaggtgataaccattgacattctttacaggagaagaacaaaaattgtaaactgcagttggaggaccaaggctgaacagaaggaatttgtccttgaagaatgggaaatttcatgggctactctctgaaagcaatttttatttttatttttgagagatctcaaactaatggtttctagatttaatgtacacaggaatcatct

SEQ ID NO: 3918 - DNA, 3962 bp, Homo sapiens
agtcttccagcagggttctgaaagcagcctgctcccatcgcgcccctcggatgtggacacccagggtgggctgcagaccgcggccgggccgcactctctgggggcgagggccaggtcaggtggctgcactgtcgcccagcagcgagtaaagactcgaaactgagggagccagagccctagtcactctgctggtcgagggtcggaaccgctgggggaaagaggaaatgtggacgaaggcagcccttcctggagacagcttggaagagagggatgaagatgcaaaaagcaaaacccaacctatcaagtgccacctccccggtgacaggcccccagccttgctctgcgctttcgctgaatgaactcctgagcacgtttttcccgttgcctaggaagggttgggccgcaggtttcgccagtgctcgacaacccacctggagatagcgggtcggggagggagctgcgaggggggcggactcctgttgctcagtcttcagaccgcagcacagcatcatctgcaccgggacccgggaatggggggacacttggagactgagagagaggaggctcgaggaatgaaccttggtctgttctaagccacaacccctgtctcaggtcgtttggcttcctttccttctctttgtatttgaatttaaaaacattcctgaatctcaagtgcttttgcttgaagtaggggggaggaggagaaaagaatagaagcaagccaggcttcctaagcgagctctgaaaggagaaatccattcactgcaaacctcgttccccatttctgaaaacggatagactgatatcgtaaactaaaggtcatgagggtttttccccccggtttgggggatttgttctgttaaaaggaattttaaagcaccacttgagaaaataattttgcctcagtttccctaaactatctttaaaatgggttgccataattacaggtcttcttttctctcacctctataagccaccgttttcaggtcatctgaagtcaagatttccagccttttgaatggactgatgtgttctaagcccgaagatccagtagaatacttggaaagttgtttacaaaaagtaaaggaactgggtggctgtgacaaggtgaaatgggatacatttgtaagccaggaaaagaagaccttacctccactaaatggaggacagtcacggagatcctttctaagaaatgtaatgcctgaaaactcaaactttccatatcggcggtatgaccggctccctccaatccatcaattctccatagaaagtgacacggatctctctgagactgcagagttgattgaggagtatgaggtttttgatcctaccagacctcgaccaaaaatcattcttgttataggtggtccaggaagtggaaagggtactcagagtttgaaaattgcagaacgatatggattccaatacatttctgtgggagaattattaagaaagaagatccacagtaccagcagcaataggaaatggagtcttattgccaagataattacaactggagaattggccccacaggaaacaacaattacagagataaaacaaaaattgatgcaaatacctgatgaagagggcattgttattgatggatttccaagagatgttgcccaggctctatcttttgaggaccaaatctgtacccccgatttggtggtattcctggcttgtgctaatcagagactcaaagaaagattactgaagcgtgcagaacagcagggccgaccagacgacaatgtaaaagctacccaaaggagactaatgaacttcaagcagaatgctgctccattggttaaatacttccaggaaaaggggctcatcatgacatttgatgccgaccgcgatgaggatgaggtgttctatgacatcagcatggcagttgacaacaagttatttccaaacaaagaggctgcagcaggttcaagtgaccttgatccttcgatgatattggacactggagagatcattgatacaggatctgattatgaagatcagggtgatgaccagttaaatgtatttggagaggacactatgggaggtttcatggaagatttgagaaagtgtaaaattattttcataattggtggtcctggctctggcaaaggcacacagtgtgaaaagctggtggaaaaatatggatttacacatctctcaactggcgagctcctgcgtgaggaactggcatcagaatctgaaagaagcaaattgatcagagacattatggaacgtggagacctggtgccctcaggcatcgttttggagctcctgaaggaggccatggtggccagcctcggggacaccaggggcttcctgattgacggctatcctcgggaggtgaagcaaggggaagagttcggacgcaggattggagacccacagttggtgatctgtatggactgctcggcagacaccatgaccaaccgccttctccaaaggagccggagcagcctgcctgtggacgacaccaccaagaccatcgccaagcgcctagaagcctactaccgagcgtccatccccgtgatcgcctactacgagacaaaaacacagctacacaagataaatgcagagggaacaccagaggacgtttttcttcaactctgcacagctattgactctattttctgaaggcaaaaatgcatgtttgttagaatggaaacagaaaaacattaaaaagttcattccttaacacaatgtttcaagttaaaccttttgtgtcaccgcccccaccaaccaccacctcctaaatcctgacagcactgtttgcttcccagctagacctgtgtgagaggtgtctggaaatcatgcatggtgtatttgggactatatcaacctattctccacacttcagacaactgtctgcactcacggcacacacactttgtatcatgcaggccacactcagagctagtcagtacatgaacagtggtgcggtgccagtctgtgtccgttgtgatcacaggccttgctagaccctgatcatctggttctcctctcattaagcatccctaacccccagtcacaccttcctcttacatactgttccccaatggaggcccctggcataggggacagccctgggcatcttcctttggtgtctggctgttttgtcaactctcatccactggtggctcagagccataaggtgggttgattacacaatgccttgtacatgatatagaggcatcaagcaagtaaaatttgacagaaattttaaaatatgaagatgtatagctttcccaagatgatggtaaaacccaggttagtcatcagtaaccttctctattattattattttttagaaacttggaatactgtcgtcatggctaagagaacaaatctgataaattgtgtaacctagtctcttctctacatggtgatgcatttcagcaattataaattaatataaatgaccaaaagtaacttaaaagcatgagatatttgctatttcattcattgggcacatatcaaattataattttgattttaaatggtcacccatgtatttatttgttgccaagcaagtaaaaaaataccctaacaaacctgatgtgggtgggaggggcatgtcagtaagtggtgtgttcaatgtgtttgtttcatatgggccctttccaggagtttgcaaaccttgtcatacccatatgcaaaactgtgtttccttgcattaaaccagtgaagtttgggttctcttttgtgctatcaatcagttgtaaaatcagagctgcttatatattctactggaataactgcatcttccactcagtcactacaaaaaagcatagtttcagtttgcatgaatttttttttttttcttcaatggctgtgcagataaggatccatttctgggatagaattgtattttttaagtcatttttttttcttgaaatggatatgtacaaataaaataaatggaagacaggataaaaaaaaaaaaaaaaaaaaaaaaaaaa

SEQ ID NO: 3919 - protein, 536 aa, Homo sapiens
MCSKPEDPVEYLESCLQKVKELGGCDKVKWDTFVSQEKKTLPPLNGGQSRRSFLRNVMPENSNFPYRRYDRLPPIHQFSIESDTDLSETAELIEEYEVFDPTRPRPKIILVIGGPGSGKGTQSLKIAERYGFQYISVGELLRKKIHSTSSNRKWSLIAKIITTGELAPQETTITEIKQKLMQIPDEEGIVIDGFPRDVAQALSFEDQICTPDLVVFLACANQRLKERLLKRAEQQGRPDDNVKATQRRLMNFKQNAAPLVKYFQEKGLIMTFDADRDEDEVFYDISMAVDNKLFPNKEAAAGSSDLDPSMILDTGEIIDTGSDYEDQGDDQLNVFGEDTMGGFMEDLRKCKIIFIIGGPGSGKGTQCEKLVEKYGFTHLSTGELLREELASESERSKLIRDIMERGDLVPSGIVLELLKEAMVASLGDTRGFLIDGYPREVKQGEEFGRRIGDPQLVICMDCSADTMTNRLLQRSRSSLPVDDTTKTIAKRLEAYYRASIPVIAYYETKTQLHKINAEGTPEDVFLQLCTAIDSIF

SEQ ID NO: 3920 - DNA, 20083 bp, Homo sapiens
  misc_feature (2178)..(2178): n is a, c, g, or t
  misc_feature (2243)..(2243): n is a, c, g, or t
  misc_feature (2247)..(2247): n is a, c, g, or t
  misc_feature (2283)..(2283): n is a, c, g, or t
  misc_feature (2437)..(2437): n is a, c, g, or t
  misc_feature (2724)..(2725): n is a, c, g, or t
  misc_feature (3540)..(3540): n is a, c, g, or t
  misc_feature (4289)..(4289): n is a, c, g, or t
  misc_feature (4321)..(4324): n is a, c, g, or t
  misc_feature (4363)..(4364): n is a, c, g, or t
  misc_feature (4383)..(4383): n is a, c, g, or t
  misc_feature (4417)..(4417): n is a, c, g, or t
  misc_feature (4425)..(4427): n is a, c, g, or t
  misc_feature (4434)..(4434): n is a, c, g, or t
  misc_feature (4448)..(4451): n is a, c, g, or t
  misc_feature (4514)..(4516): n is a, c, g, or t
  misc_feature (4538)..(4538): n is a, c, g, or t
  misc_feature (4605)..(4605): n is a, c, g, or t
  misc_feature (4643)..(4644): n is a, c, g, or t
  misc_feature (4649)..(4649): n is a, c, g, or t
  misc_feature (4651)..(4652): n is a, c, g, or t
  misc_feature (4880)..(4880): n is a, c, g, or t
  misc_feature (4882)..(4882): n is a, c, g, or t
  misc_feature (5075)..(5077): n is a, c, g, or t
  misc_feature (5127)..(5129): n is a, c, g, or t
  misc_feature (5139)..(5139): n is a, c, g, or t
  misc_feature (5168)..(5168): n is a, c, g, or t
  misc_feature (5174)..(5174): n is a, c, g, or t
  misc_feature (5186)..(5186): n is a, c, g, or t
  misc_feature (5218)..(5218): n is a, c, g, or t
  misc_feature (5240)..(5240): n is a, c, g, or t
  misc_feature (5335)..(5336): n is a, c, g, or t
  misc_feature (5444)..(5446): n is a, c, g, or t
  misc_feature (5449)..(5449): n is a, c, g, or t
  misc_feature (5555)..(5555): n is a, c, g, or t
  misc_feature (5681)..(5681): n is a, c, g, or t
  misc_feature (5722)..(5722): n is a, c, g, or t
  misc_feature (5818)..(5827): n is a, c, g, or t
  misc_feature (6009)..(6009): n is a, c, g, or t
  misc_feature (6171)..(6172): n is a, c, g, or t
  misc_feature (6214)..(6217): n is a, c, g, or t
  misc_feature (6222)..(6222): n is a, c, g, or t
  misc_feature (6225)..(6225): n is a, c, g, or t
  misc_feature (6252)..(6254): n is a, c, g, or t
  misc_feature (6256)..(6257): n is a, c, g, or t
  misc_feature (6265)..(6267): n is a, c, g, or t
  misc_feature (6274)..(6276): n is a, c, g, or t
  misc_feature (6406)..(6406): n is a, c, g, or t
  misc_feature (7516)..(7517): n is a, c, g, or t
  misc_feature (11110)..(11110): n is a, c, g, or t
  misc_feature (11117)..(11117): n is a, c, g, or t
  misc_feature (11119)..(11119): n is a, c, g, or t
  misc_feature (12494)..(12494): n is a, c, g, or t
  misc_feature (12500)..(12500): n is a, c, g, or t
  misc_feature (12535)..(12535): n is a, c, g, or t
  misc_feature (12568)..(12568): n is a, c, g, or t
  misc_feature (12583)..(12583): n is a, c, g, or t
  misc_feature (12629)..(12630): n is a, c, g, or t
  misc_feature (13636)..(13636): n is a, c, g, or t
  misc_feature (13711)..(13711): n is a, c, g, or t
  misc_feature (15669)..(15669): n is a, c, g, or t
  misc_feature (15799)..(15799): n is a, c, g, or t
  misc_feature (15994)..(15994): n is a, c, g, or t
  misc_feature (16455)..(16455): n is a, c, g, or t
  misc_feature (16468)..(16468): n is a, c, g, or t
  misc_feature (17255)..(17258): n is a, c, g, or t
  misc_feature (17483)..(17484): n is a, c, g, or t
  misc_feature (19681)..(19682): n is a, c, g, or t
gtcgaccattttctggacggagggcggcgcaagctccagcccggttcagccgaggaattgtgctcagttcaggtagggcaagggaggcccagagcatggggagggcttcctgggtctgtaaggccccttcccacctgcggcttctccctagctttttggagccttctgcctactctgctaggtttggggagtttcctgaggtgtttggagggagaattccccttttgcaggcttgggtggaatggggagttctcccaggctcctggcttccttccacctgtgagggaatgctccaatctgccacagttcccatccccttttaggaaaggccggtggaaatatgggagggctggagattttcgagaaacaagccccagatgaatcaaaggtccttactagaggcaactctgaggcgggacctagtgtagttaaggagtttgtacatatagcagagagaaaagacagaggtaactttcttttggaggaaaacgaggaagctcagccaggaaaattaattactctgtatttcctagtgtcacattaggtcctttttctttttttttttttttcttacttaaaaaaaaatcctaaaaccgaaagggataaaagccccagagacccagcaggccccggtgaggagtccaaaaggccggactgaccagtctgacgagtaggtggctcccaggcctccaggttccgcggcagccggctctgcctgcgagcaggcccgcgttagtagcatcaccaaatcatgaaggaactctccctgctttaattaaaaaggggaatcttgggaaaactagagcagattaacacagctaaaagtcggttcccggtgatttattttgatgcacgcacgagacggtatctagacttgcaggcacacacacgtctgtttttaggctcaacttcagaagcgggtgtgcagttccataggagttctgtattcgtgtccacgttgcacccaggaaaccttagcctgaacaccaatttgaactgtcagttggccctagcttcacacaaacaggagaaaaattgtttaacccctggagctgtcaagtaacctcttcagggtacaacttttattttacacgctctggaattaagggattgcaaaccccagcagagccaccggagccgcttggcagaatctccaaacctgggggaaagctcaaagccaataaaactcccaagcgctcggggcccaggggtggctgcctcgaggggaggcgatcccttgttgggaaaaaatcctggagtgacttcgccggtcttggtttggtggttatgtttaattgcgaaagggataatgatttctaataaaattgcacggggccaaaagggcagctcggatcgtggtagcagggtaagggagaagtgctagaagctgggccccaggcgtggcgcttggaccttgagcagtgccgggctttgcagaaggcatctctggagaaaaaaggaagcggagaaagcaaggaaggggaatgtggcggaattggggtaagagagggggtgttggggcagggctcgcggcggagctcgaggaaggttttatcagttccgcaggctggagtggctctagaagcaagttcgcggcgtagagaggcctttatacctgtgtcggagcggccggcgcagatgtggtacttggcgagcaattggactattgttgatatgctaatgaggcgattaggctgttggtaaagagctggaaaagggaaaagtttctaccattagagggagatctccaagcgcacacgggagctctttcccttctctcctcctcctcgcccttctcctcgccctcctcctcctcctcgccctcctcttcctcctcctcctccttgccctcctcctctccctcctccttctcctcctccacctcctctccctcctcctcctcctcctcctgcgctcaccgccggagccagcactttggctacccagagagtagctccaccgttagaggtgcgagaccgagaggggcatatccgttcacgccgatccatgaaaatgctttggaaattgacggataatatcaagtacgaggactgcgaggtaagcgcgacccggctcgatcatccgtgcggtcacaggctccgagcttgaccctccctctcctcctcctctccttgcaaccagctgcgaaacggggtgggacaaactttccccagcgcnccgtccctcggattcgcccgaagaacgcgggggagaagctggagagagaggagtggatgtccttntttntttcctactttgaagtgtgtccactttactcccttntgaccaattttgctgtgctaagaatgggggaaaagaagaagatgcttttgaagcaattgtggcaactggcacttgcctgtgacatctcctcgagttatcttactcgagattgagggcccaagtcaccaggaacagaaaggaaagagaaaagctncttttctctcttgaacttcctctcgatctttaatattccttcttctttctattcattcattcattcattcattcattctttcttccccccacccccacttctaaagcggttcccttctcggctttagagacggcccccccacacttcgctgtgagctgggctgcatcttcctgtaagagggttcaaacttaagaccactgatcccagactgaggggctacgctccagatcctctgtgcttgacgaagttctaagtagcttctccctctgagctacaggatcgaagannaagggggtgtgtgggggtggggtggggagatgtcgtgcgccgagcctgctgggcgtggtgcgggagcaccagcttctgcaccagcccagaacgaccgtgggaatccttgcgcggctgcagaccacctctggtgccgcaagcccgctgcggcgacagagcgcgccgctttggaacccattttaaaacgcagagtcccctagactcgccttcttgaggcagcaagggagaccctagcccgacctgtccacccgcagaggcgctgggaacggttacaaccaacactgtaatgagcaatgagtccgagagaggggttggggtgtgtagggctggagattacctaaataaataggtggcagtcccaacttttgctgtttttttttttttcttttttggcatttgcagctgagaatgttaggcaggaggtgtgtgtgcaggcacaggggcggagatcttgacttcactcgaaaccagaaattgggtttatgtgaacgatgtgtcacccgctccctcctcccttaactttctgaagattattttaaatcgttctccttcaggccccccaccccggtagatggggacggggtgacatcccacgggtactgactcttccctggggggtcctgtcgcgctagaggaggggcacagggaccccacgtcagaccagtcgctttgttttcgaggctgggggcgagctttgcgcagtagaatgaagccgaaccctcagtctcagacaattcatactgtactgtctgggctttgcgcgaggcttgggcatttcactttcgcagaggccgaaacccagctccaggtgtggnctcggcgggcggggtccgaacctccgtgcggctctaggtgccgactggatggggtggggtgggtggctaggtgggggatgaacttgcacccctagagggatccctgtgggggcaagtgtgaatgcgtgtgtaagcgaggcaaaaaaagatgagagagagaggagaataaagtcaaagtctgtttccacaactttggccgtggtgggcaagcgccggaggcggatttcgggtttcggagctggcttgggcagtctgattgtgccggggctctgtagggacacgccaggaggcaggtgccgcttgttctgacaacctgccgggtagactggcaaaggcagcagccggagagctagtcgtgtcatctggggggcgtcaggcgggagtggcccagccagtcggacgggtttttggccgggagccgcgagccggtgccagcggcccggctgggcgcctagcgtctgtgcgcgccccggccccgcatcccggctcccgatccggaatccccggccccagagagccgaggcagagcgacggtggccgggatgacggtgcccctgtccgaggaaagctcaagaggaggccgaggagaggaccagtgcagcgagcgggccggtccgggcagggccgcgggtcatggaggagccgcgcacgagcggcgcagcccgagtcccgagtcccagactcgctgcgacgcggacgcggccagacaggggcgggaagctccgcgagagccccacagccgcccggangtccaagcagctcctacccgctagcacactcnnnntggcatcccgaggtctgccccagcttttgaggtggtggnnagctttaggtctgattgtncgtcgggtcgggtccgtctgggtgggggctgggncggggctnnnctccggnggtccgggcctggnnnnccctggcctcctcctcctccctcccttcctccctccctcttttccctccttcctctctcgggnnnccctccttccctccctcccctntacccacccgggtcttcggtctccctctctgcctctttctctttcacttttcgatccctggcaaccncttttaaatgttgccccttccctgtgatcgccagacgnngcccncnnctcggcccggctccctctctcgctcgctttttgtctctcgcggctccctctccccactccgatttgctacactgagactcccgtcaatggactgcattgagagcggtcccgcgcggagtgcctctcgcttcacgctcgatttccaggcattcttcccttattaagtattcgtgtaatattaatagtcatgaatatctgctattaggaggctccaggaacgtgcccagngnggttattagaagcttaagcgaagccgccgctaagaaaggagggggagacacggattaaggaacacgcacggacccacacactcacacatactttttcctttttccttttttggggtttttcatttttaaagaactttgaatcataaccagtcgccgaggatagagatccgtgggttcgatccaagctgatagnnnccggcgcgaatcggtggttcaagttcggatggatccgacccgggctcccnnnctccggggantcgcaccccgtgactggagtcctgggtgnccccgngggctctcgccncccttttgtgtggggcgcgctcgggcggcggngtagacgggcgctccaggcttncttgtttttttccaccctggactcgttaccccagactcttcgcagatgttagttcacagtttttcaccatggtgagtcccatccccaccccgttnnctgttttctttggcaattggattctggaaacctggtgccgtggagctggcccggaaacctcgggtttaaggcccagctttccttcaggacaccctctccatttgcatnnnccnccccaccttccgcctttctctcgctcttttccatccctaaatcgagtgcattaccccctaccccagcccccgctcgacctctccgaagcaccgcagacctacctcncgcgcggcttcccaaggcgtgtttctccccacgttcatcttgatttgcttgagtcttcacttgtcccgagatgttctcaacatttgatgcttaaactgtctgcaggaaaagtgcaacacggtgtgnccctacactcgggacctgcgagccgaaccgccgagggttcncggtctctggaatcaactctcttcgcttgttttgcaagggaattgcaatagagaaacctaaagtcaggcgtttcttctgccctttggggctggggnnnnnnnnnntggaacctctctcttttaaacccaataaggctgaatctttctattttaaaccttgacttgacgtccccctttccctatccaaaccataaatcgactctgtcgagaaaaaggctcctaacagaggaagcgaaaaagacagaccccgatcctgcagtaaaccttctttaagctggtaattaacntgtttttgttacagccccctctgcgaatatgtttctatttaagtagtcatgaacggtaacagtctttgaacgtttatgatttttttttctctccaaataaatggaagagaataaacaataacacagtgcagacaggttcaaatcgggggaaaagaaaaggcnncttctgctgttccctaatgttgcttggggttcacgttcagannnngtttnctntcttttcctctcttttcctctctttgnnntnnccctggtnnntcgagcnnntctcttgtgccccctccatatcgtttctctgcgttgttcggtctgtttcactgaggggtatttcctgaaaggaacttagagctgattttttcccggcggccagccaacgggaacgggccatttcccacgnagacttgtcaagtggattttgtgtggatagttgtagctcttcttcctgattccttgttctttacctttcctctccctctcttctaggaccgtcacgacggcaccagcaacgggacggcacggttgccccagctgggcactgtaggtcaatctccctacacgagcgccccgccgctgtcccacacccccaatgccgacttccagcccccatacttccccccaccctaccagcctatctacccccagtcgcaagatccttactcccacgtcaacgacccctacagcctgaaccccctgcacgcccagccgcagccgcagcacccaggctggcccggccagaggcagagccaggagtctgggctcctgcacacgcaccgggggctgcctcaccagctgtcgggcctggatcctcgcagggactacaggcggcacgaggacctcctgcacggcccacacgcgctcagctcaggactcggagacctctcgatccactccttacctcacgccatcgaggaggtcccggtaagaggccgcgcaaccagccgagggaacacagccccctacttacctaccccagaaaggatacctggaacatacagtcggtgggcccgggttctcctagtatttccttataaaaacattttattcggaggcggagtagtgagagggacgtttgaggaaccacacaaagtagttgcgagttctaccccagaacaatggtttctggagcaccctcaaacaatgcctgcattaccatttccaccaacacagataaatcagacgaatgtaccattaacaatatcttcctctcgacgacagtaaactgtctcaattgctaaaagatctacttccatcgctgagtctggcgtggagatttctccctgtcctgggaatgatgttaaatgcaaccaaaagagctcattaaatgtcctcaaaatgtaaaaggaagtgtaaaagacacactaagatcatttaaccggattttataagcacaagtgaaacctaaaagttatgtgtacaccctatcctgattaaagaaaaactaagtagcaaatccaagcagagggacattaaaatgccagccttcttcttactaggggttgctaagtgnntgaacctcataaatcattagctaggttccccaacgcctatcagaacctgcatacactccatattaaattaaatgtttcgagactattgggtaatacattatttgagttctaatttagttatcaataaatgcagtttaaaattgatttctaaataagcatggcattagcacatttactatttacaatgcaaacaaggctattgataatttgaaaatactttctgaattaaacttaaaccaggtacctctggcttcaattctatatatttatggttcctcacaaaccgtcctgaaatggaattagaggaaggcaataattttattaaactgtaaagcttctgttaaaggctgcttttctttggagaggaaatgtatctggatgtggatttttactaaaatgctatttcaaattactgcatcaaatattgcagcagtatgtccattgacagtttaatgattactacattagattgtaaggaaatggtcagatgaacttacctccttgcttggtgaatttaaaacattatttaagttccgtaggaaaatagaaaatttattacatctctcatttggcccagttagtcactgaaatttgttggttatgtttagcagcccttgcatggaaggcaggaaagtgggcacttgatccagtataaggtttagtgaggcactgtatgtctgtatatgtgtgttcatacttacatgtttttagaaactgatacttaacagtgcatttttttggaagtgagaggagcactaatttatataagagcaatttaaacatgaactgggagttatgattattttagttccctttcccaaagcactctgaatcttttccttgcttgttctttgaaaatatttgaattgcaaaataatgttgcaagcttttggaactactgtgaatgagaattgctctactttgcaaaaatttcaaggtgaattcttaacacctgtatactcactctttgtggcaaaattggtcagtaggagaaactaacttaaaagattaaacaaaaacaaggaaacccagcttgctgtttttccctctccctccccatcttttaagaaaaaaattctttcaaaggaatttgggtcaagaaaaaggttgttttcaattttttcccattgctgcaacagttaacctttagtaagtataactgctaaatatttaagaaaatcaaatcgatggtgaaaattatttaatcattaatatctcagtgggttttaaacttaacagtcttccctgtatggacaaggtctagatctagaaataacacaaacaaaagtattatgccacactacatttactttatgggtttagggtgcatgcataaagggatcatatttccccatatagttaaaacacaagaactgcagcagtagtcatttctgaacatttctcaattttaattatacttaaatccagaagcactttaggcaagttacaaatgagagcattgagtataataaaacctgtaataaagcaacttagtaccatccacccggaatcattgcgatcaggcacaattaacaggagcataaatccaagacagaatggaaaatgttcgttgaatagtattattgttggacaaagactagagaaggaagcaatactttttaaatggtatgctgtgtttggtaatgattgcaaaatcttctatctcagcagccctggtgctaatttgtaaacacagccagacattatattgcctgtcagtttctgacttagaaaagactgacttacttttactttctacagcttttgactctagtggcacacgctatacccatccatctgtaaaaaaaaaaaaaaaaaagaaaagaaaaagaaaaacaccccacataacaacaaacctgctgttggacaacaggaaagcaagctcaaaggttttttggttttggtcattttcatattcctatcatacccaggcttaggcagtagtctttctaaaaatttatgtggagttttcataaaggtgtgtgtgttgctctttattatactacctaaaccttttcttttccaacactctcctgttactcccgcccctgtcatttctattgtgtttccctggctttcgctgcctgaacactggaattgctaaagtcagaagccgctgaggccaatctaaaggctaggtacatttctaaatgttgaactgactgagaatgattaggtgctccaacacttgatttaatttccaagaaagttttattccccatctccaccccttttaaacatggattatttgctggaggaggagaaattggccatgggtgtgcagtgaacctctgcgttgcaaagcccaaattcaataagccaagatgagatgtttatatataaatgtcattatacgggagggggaatttttgaattctacaccttcccctcctcccatcttgcagggaatattcatttccttttgttttgatgatacacttacatccatgtgtatccttttgttgcagcatgtagaagacccgggtattaacatcccagatcaaactgtaattaagaaaggtaagccatttccttctgcattccaagcatgtccttacaggcagagtgctatttaaaagaacttgcagagatgtgttttattttttccaaataggatttcctaaaggctcagaattagcaaatagataggcacagaacagcaatgcttaaataatcagccttcagtcatgcttggtaatgccaacagctagctttgttctgactcagatttgaccattaatttagtttaatgatatttggacaaacacacaaatgtacagtagttgaactgatttggaagtggcatttcaattttgaaacagtttgatagtttaatccattccgtggatgaaggttaagaatgtgataatgctaaaatagtacaaataatttaacattaatgtaagaacagatgataagaagcactctttagtagaggaaaaaaacattcatgttcttcaatttagtttcttgttagctgtttaagggtcttagaactttgtgaattaggttaacaaaattttagcttttggttaaaaattagtatcttgaagatgggaggaatattagcatacttgttcagagcagaaattagttagaaaagtgtcaagtgatttgcatggatttgtaatctgtattgtgtttagtgagtagaaataaagtttactgaattaaatgctattcactcttggtagcagctttttttttggttatggtggcaatgttacatttcaggattctaggcaccaccagaggacatgctatattttgatcgttgttaatatgactaaccccaatctttactcttgtcaaaagtttcatttttgcatctgtgaagtctttgtcacgtcaaattagatgtgcaagggataaattaagagagctctttccaagtcgacatgataattggctctttgattagtaatctctcaagagttcgtttaactcctattgtctctattagcctccccagagctattaatgtcacaagtgatctatccaaaacctagagccccccacctccctatacctctagcatatcccattaaagaacgcaaatggaacactgtgagatgagatgtgtgcatatgatnctcaatngnttgaaatacaatgcatactgtaacttaaatggttgtgaatgcatctgaattacactggtggctgagaaacgtaatgcattactatactttctgcaggtcttctattttttttttttctaacagtggtgagtccagcaataaagagcttatggttttaactaggaagtatatatacccactttcccaataaaggcgctttagcagaggactgttaagtatttacttaacaaaagggcacattgctagtattccactgtaggcctgttcttccctccccactccgcagttcaaaactggccttggaatggatctccaaaactgagacgttttcaaaattgaactataggaaagggcctatttatcaaaaagacggacgtgtggtgtgacaacaaaatccaccacttcccagcgtggtgcctcaattaaaacgctcgtttacagggtgctttagccatctaaattgtcggctgattttaataatgggtctttgaagcagtttttccccgacactaaaaccccacccagcaaaacccctgaagtacaagtaacttgctctcggtttgcaaatgtaattccctcccctgcaccctgaacccgtggtcctggacctcatctggggccactccgctcggatgctcagcgcctcagggtcaccaatttcaccacccatctctagatctagagagcacccttgacgccgaaggggaaagggtcaaggcagaaacgcaggccaggctggctgggggagggcagggccgcctcccggccgccgggtgaggtagggaagggctcgagcccaggaagggaagtagcagagccacagaatttcagagccggacggaaaagcgggactgtggcccaaagcctgggatccggccctgggcgagggccggggtcgggcaggatttgggggtgatccacgacgcccaacacgcggcctcccctctgtctccgcaggccccgtgtccctgtccaagtccaacagcaatgccgtctccgccatccctattaacaaggacaacctcttcggcggcgtggtgaaccccaacgaagtcttctgttcagttccgggtcgcctctcgctcctcagctccacctcgaagtacaaggtcacggtggcggaagtgcagcggcggctctcaccacccgagtgtctcaacgcgtcgctgctgggcggagtgctccggagtgaggcccggcacgccccgccgccccggccccgcggggggaaccactgcgcttcgcgggggcggtggcggcgaccgaaacaggcctcgcccggcggccctccctacgcgggaaggaaagggggcggggagaagagcgtagagccaagtgggccggatctgggggccgggggagcgggcgatgcggngcctgntctccgctgtttcccgcaagcaagttctggtgccncttcgttgctgccgggcgctcggcagtcctccntccgccctcctcctncgcaagcagctcgctccgccgcgggctcaatcccggccactgcagnnggggcggcgtacagccaccttttccctcttcgcgcacaccttgcaagcccaggaaaagttcctctcaggctcctcgctttgccttacctctctgagtagggtctccgagggtaaccggtcgtgccttgtatagggtttaatagaatggcttttaactaaaggaagagaatggttgtcctcttgagtccgcacgccatgctttccggtcgctgtcatctccagacccccatactataggcgtttgcatatgatgatgattcccaatttactgaggccctgatgtgtgccaggctgcgtgcgagcatgtttacgtgcattcgtgtgtagtcactaccaaggaatgcatctgtctacatacatagccagggattcttacctcacccctgcgaggtttgagtgattcatttagtagataagattttataagggtcagcaaggtaaagcaccttcccttagggcagttttctccctgctgtgggccttcctacccctaggattcactgcgtctgtggcttcctaccctagacgctgtagttgtgggcttgtgttgacttacccggataatgtttcttctcttctttaataatactgagaacttcattgttttgactgttattcatttacttatgtgttgatagacccacagttcctttctagtggctatatcccgcacaaagcctataaagatccattttttggaagggtttaacatcaaccattctagtcttttcttcctccctgcacagtcattttgctttccctttggtagtctttcactgacacagatcttttccttgccctctgcttttccttccttcccccatccccaatattggagactgtttacctaggggagtataatctaatccacaccaattaaagtagcacttcggagtagggaataaatctcgaaatcacattcaatttgctgttttatgtaaaccacatattatctatgttccagctttactcatctatggcattctatttagttatgtagtatagnattggccagtgtgctatatagtgctctgagagatcagtgaaggcgttttaggtgatgatatcgctctatattganatgtacagtgaggtcttggtgtgtcatgggatatcagcttttgacatttccagttaggctggtgacatggcacgtaaacagttggcgaacgaatttccctttgggctagagccagagcaagaaagtgagagtgatgataactttggttactcggaacaacctaacagcatatcttgcaaagacaagttttaaagaccccattggattggtgtgattgtaacagcagagaaaatatacaggaatcagttgaactcaatacctcaaaccctagagatggggctgtgtttgtttgtggttcttctttagagagttgggaaatcaaaccttccaacctgccacaagagttgcaataataactgaaacgtaggggggtgctttacagtttaacaggcgtttatctcctatgaactctgtactattcctaggttccctcctttaaatgtcttggggccaagcttctcagttttgaaagcacattttaggaagctttaaaatgattttaatgtggtgcagagaacccaatgttttctaaatccctttctcgcatatatttgtgaaacagggcgaagtctaaaaatggaggaagatctttaagagaaaaactggacaaaataggattaaatctgcctgcagggagacgtaaagctgccaacgttaccctgctcacatcactagtagagggtaagcgaatccacttgctaactagaaggaacttccttcttggaaaatggataatatttagtggccagatgtttggtcgttttatgtcagttgggcagtttgatctttgcagagaatatagccagatgtgaatggaattatttcatggcaaaaagaaacatttgcatgtactcctatacctccatccttcttccttcttttcctctaccataaagttacacctccccagcctaattctgagctaaacaacgcacaagtttaagaactgcacattctccaagtttgtctcctttaaagggctcagcagtaaataacttaagttattctgacactgcgtttagaaatgcgtgaccattacttcctgaattaatttggaatcttgacctgcgtccttgatttaagaccatcctgaaaggcttcagggttatgtgcctttcaggtctttgttttccaaacatatgctcccttatctctttaattgtgcttttctcttgagaagaagcaaaagtgaggcaatttttgattctggatgatgtggatatggaaaggtaaatataagcattggaaaaagtttctcctggtagctttaaacatacatacaccctccaaatgcctcaaaacaaaaagccaacccttatcctcactccctgctctagatctagattaagtttttctgatacagattggcctaggttttggtgtactggaatgaatctatagctctcctgtgtttttctttgtgtcctattgtaaatatctcatgctaacagggaaaaaaaagttactttaattaccagacagattttaaaactagcatgtatatatatttaaagaagtcattttatttcattcacatcttgtatttgaggagatatattacattgaatttaagttctggctttgtaaattattttttaaaatgtttaaaaccatatattgaggaggaatctatgaatctctttgttgatgtcagagattgatagtaatataactgtttagaaatcagcaattgttcagtgccagaaactcaactacagtaccattacattaaaaatcataacagtccatagagaacccactattcatactccaaaagaattataagccaagaaaatggtagtggtggcttaaggtatagcgtggagttcgtctgggtttggggttgagttctgtagcaggaggcagtttctggagaactgttattgtttgtgatccgctccattttatggaaacaagctctctggcggagagggctttgatgctctaattggcgcatngttcttccggagctggagctaatggcaggaagccctgcagtaaaaaccaactggttcaggaaattaaaaccaaagattgcaaaatcaacaacacagacagactcagtggagtgaccctcaaatcctcttnggttaatcggtttggatgaacagataatttatgtgatcaagttaaaatgtaacccctcagtttgttcccttgcagaaaagctcaaagagtaattatgaatatcatttatgaatgtgttgataggtgttgaagttggaatacaagaagcattttaaaagagaatttggagagtgtcatttagcgtggggatggganggaggttggtggatgagattttcattttcaagtcttcttggcccctctaggagaagtggtcatttttcctgataaatgcatccaccagatcctacagagaaggaaataaaatgtgcctgaaatgagaaaccaagtagtttgtgtttcctgcaacatctggggtgaagggaattagggagttgggagtggggaggaagttaggatccccactcttcattctctcgcactggctccctcctctcccctcttgccaggagaagctgtccacctagccagggactttgggtacgtgtgcgaaaccgaatttcctgccaaagcagtagctgaatttctcaaccgacaacattccgatcccaatgagcaagtgacaagaaaaaacatgctcctggctacaaagtaaggcatttacctctatggggtctctgtgtcttcgttgtcaagagaaagagaaaccaaaaatngtttttgccttcntcctcccgttttccttttgtgttaatcagctttgttgcgatttataacaccatcttatatatagtctatgttaaggaagaaatacaggtgggattcttggcgctcccatctttttcctctcatctgtcccatttacacattttttttttttttaatgagtgtgtatgggagtgggttgtaggaggggtttgactgaagttaaggctggatttgtgactatgttgtttcagaaagaccagaatcaaatccttaaaggggtaacaggcttacctatatcagtttttgtatcctatcaatatgttctccaagggcaaaagattaaacagtggcctgcaagatgtgcaagccagaagctgtcctagtttcaacccttaatctgttattccatttcttaccttcctttcacaaccccttctcgaaagtgacacacacacacacacacagacagagagagagagagagagaagcagaccacacccccacataagttttagcccacaggcgagaagtcaaatagatttcaaaatggcccaagttatattcccatcggtgcctgggctgaataggcttctccaggtgatgtgtgaaaagaaaatgactgtttttgatgtgttttctggaaattaaaaggcttgtttggaagccttaattatcaaagttgatgtcacaggagggcatggaagcagagggcagaagctgaggccttcggtgggaccctgtttctggcctggggacatcagctggccttggaaagaggagccaccaaagctcctcattcatccccccnnnngccccccaggccaggctgctgctgcccctggaaggccccagctagcccttgcttcccagattcagagacagagcttcctgagtgcaggcctcatctacctctcgagaaatttcaacttctctttccccaggcttcgtaagcacacccatctccacaatttcccctgccagtatttttattttgagctatgtggggaaagaggaggaatgggtttttttaaaaggnnaaataatcccaagtaaagttttgtctctctgtccacattgacctgaatttgatttgaaggttcaaacgagtgtggaacttcattcacaaactgctgcgtgaggtctctctagatctagaggagcagggaagaggtctttatgacattttgaataggaaggctgatggctgcagcataatgttcgcaagatgctactgtttctgacttccggtcgcgttgactcctttctttctcttccaatgtgtgaaatggtttcctatgtctaggatgttttgtgtgagggagaaaggtgggaataaaagtttaccatatctgagaggaaagagagagagagtcatttgtgaaggtaggaagtaaagagagatggttagtggtcactgaaaggtggctggatctcccaacatgtggccacactgtctgtctctggggtcttgggtcatgtcaggtaccggctggatcccggcagaggtagctgcagggagggaggttttctctttgctactagtgctgcccatagtggagccttatgtctctctctctgctccacttgtcctgcagacagatatgcaaagagttcaccgacctgctggctcaggaccgatctcccctggggaactcacggcccaaccccatcctggagcccggcatccagagctgcttgacccacttcaacctcatctcccacggcttcggcagccccgcggtgtgtgccgcggtcacggccctgcagaactatctcaccgaggccctcaaggccatggacaaaatgtacctcagcaacaaccccaacagccacacggacaacaacgccaaaagcagtgacaaagaggagaagcacagaaagtgaggctctcctcccgccccgcccctcccacgcctcaccagccccccgcgcgcccaccctccggcgggtgacagctccgggatcagcaacccttcctgctgctgctactgctgctgctgctgccgccgccgccgccgccgctgcccttgggtccccccgagtctccgggactgccctctcgactgtcagtggggcagcctctccgactctgcacccgcctcgacctccccacccgctcccacacccctgtgcccctcatgtggagcctaagagaacagaacaggccgtgaagccagcagagaaaagttctgccaagtttgtgaaccctttttttttttaacaaaaacaacaaatcaacaacagcaacaacaacaacaaaaattaaaaacttttttctaaaaaaaaaagttgaaaataaaaaaaattatatgcgcttcatgggactgagtcaccaccttcccttaccattacttcagttcagattgtagccatacttaaaaaaaaaaaaaaagccaaagatgatgaacaacattttatcaagtattgtgataactgaacacaaatacacgagttccatgtcatgtcttcagtgtagagtttctcttagtaaggcacactgacttctctggcacacgatcgcagttatataggatcagtgtccagctctgtaatataggtattatggatgtgtaatttaatgggaattgtaaatatggtgagtctgttttaagccttttttttttttatttatctgatcttgtttacctcttgtttagtgggttttgaatcttccctattagttcttcatgtggttcatggtactgatttagaaatccagtgttttggggatttttttctctgggttcatgaatttagccctgttgtagcatgttaaaggtgacaaacagctgggcaaatttttaaaaagtaaaataaaattttatctataattagtattattacatttagcttttcattgaaccgaaagaaaaaaagtgatattggaccctggaaagattttgaaacttgagtggtttgataacccttctatgtattgtaggggagaaaaaaaaaaggtaattttaattccacttggtcctccctaaagcatcatttgagcaataaatgaatattgtcttaaaccaagggttaggaattttcctctctctctctcctcctctctctttctgttcaaagaacttcaaacatttggaaccacctggtattctgtattttcactggccatattggaagcagttctagttgcattgtattgagttgtgctggcagtagtttccatgcctgtcaatgtatcatagtccttgttgcccagataaataaatatttgatacnnttatgtcggatttttttattcagtggctgtctttacccaggcgtatttttgttcttggcagtattttttattcagtatggttcagtaattgagtttaactctcccttggcaattgctccttgcaataagacggctgaacccattgtttccctacagtataataaaaacttactttcaacttggagttcagaggcagggtatcatttagatattccactgtgtctgtattcagacaaatgacacaaataaaacccaatgtattcttttggataaaagattgtttgtactgctaaaggaatgacatactgtcttttccttactagaacattaattttattattaaaaataaagttttattttatttatgttgatcgagtcgacgccctatagtgagtcgtatt

SEQ ID NO: 3921 - protein, 437 aa, Homo sapiens
MLWKLTDNIKYEDCEDRHDGTSNGTARLPQLGTVGQSPYTSAPPLSHTPNADFQPPYFPPPYQPIYPQSQDPYSHVNDPYSLNPLHAQPQPQHPGWPGQRQSQESGLLHTHRGLPHQLSGLDPRRDYRRHEDLLHGPHALSSGLGDLSIHSLPHAIEEVPHVEDPGINIPDQTVIKKGPVSLSKSNSNAVSAIPINKDNLFGGVVNPNEVFCSVPGRLSLLSSTSKYKVTVAEVQRRLSPPECLNASLLGGVLRRAKSKNGGRSLREKLDKIGLNLPAGRRKAANVTLLTSLVEGEAVHLARDFGYVCETEFPAKAVAEFLNRQHSDPNEQVTRKNMLLATKQICKEFTDLLAQDRSPLGNSRPNPILEPGIQSCLTHFNLISHGFGSPAVCAAVTALQNYLTEALKAMDKMYLSNNPNSHTDNNAKSSDKEEKHRK

SEQ ID NO: 3922 - DNA, 415 bp, Homo sapiens
tttttttttttttttttcccagcaaagactctttatttgcttgtatcaatgtcagctgccaaaccgcagagcccgtccctgcccgccatttgtccagctcagccaccctttcaccaccccctggcagataaaagcagtgcaatctgcaaaacatgcccagggctgaggccgtgccccacccccatccttcctgaaattccaacagcacaaaaggcgtgggccttggtgtctccatctgtagagaatatatgatgatgtccagcctgcgtgccttccagggatttctccccctttcacgtggagtggcacgaagtttagtccccaccccagggcaggcacgtcatgtctccttacttctccaaagccgatcactccgttttaagctcaggggtctcatgacctactttaaatgaag

SEQ ID NO: 3923 - DNA, 332 bp, Homo sapiens
  misc_feature (332)..(332): n is a, c, g, or t
ggtctcgggctcctgccccgtcctgctcacgagttcagggctcctgggcggccgccttttccagttccaggtgtgcagaggtgttttctccccacgcgcggcgtgctgcacttggtcgctggctccgagatcgcgcggggccgccggaagcccaagacggtaccgggggccgcagccgcagccggcgccgccctccgccctccccaacagcaggccgagtcccgtagcatccggtagggaaatggtcgtgctttcggtccccgccgaagtcaccgtgatcctgttagatatcgaaggtaccacaaccccgattgctttcgtgaaggacattn

SEQ ID NO: 3924 - DNA, 1009 bp, Homo sapiens
gcgcgggggagccattaggaggcgaggagagaggagggcgcagctcccgcccagcccagccctgcccagccctgcccggaggcagacgcgccggaaccgggacgcgataaatatgcagagcggaggcttcgcgcagcagagcccgcgcgccgcccgctccgggtgctgaatccaggcgtggggacacgagccaggcgccgccgccggagccagcggagccggggccagagccggagcgcgtccgcgtccacgcagccgccggccggccagcacccagggccctgcatgccaggtcgttggaggtggcagcgagacatgcacccggcccggaagctcctcagcctcctcttcctcatcctgatgggcactgaactcactcaagtgctgcccaccaaccctgaggagagctggcaggtgtacagctctgcccaggacagcgagggcaggtgtatctgcacagtggtcgccccacagcagaccatgtgttcacgggatgcccgcacaaaacagctgaggcagctactggagaaggtgcagaacatgtctcaatccatagaggtcttggacaggcggacccagagagacttgcagtacgtggagaagatggagaaccaaatgaaaggactggagtccaagttcaaacaggtggaggagagtcataagcaacacctggccaggcagtttaagggctaacttaaaagagttttttcaatgctgcagtgactgaagaagcagtccactcccatgtaaccatgaaagagagccagagagctttttgcaccatgcatttttactattattttccaatacttagcaccatttcactaaggaaccttgaatacaaccaggatcctcctttgcatgcgactgtagctgcatttcatgaatagtttgaacccttgtcaatgcattttttgaaaaagaaagaaaaaaaaaacttcgtgtatgtgactcaaagcatgtaaccttaagatgttgcattctaaactgacaataaagacctttcccc

SEQ ID NO: 3925 - protein, 135 aa, Homo sapiens
MPGRWRWQRDMHPARKLLSLLFLILMGTELTQVLPTNPEESWQVYSSAQDSEGRCICTVVAPQQTMCSRDARTKQLRQLLEKVQNMSQSIEVLDRRTQRDLQYVEKMENQMKGLESKFKQVEESHKQHLARQFKG

SEQ ID NO: 3926 - DNA, 489 bp, Homo sapiens
gaaagggggtccctggcacaccccaccacccactgcttcggcggatgagatgaccgtgctcagctcagggagagaccccgcccttggtcccttctctcacccagagtaaggctcttcctggaagggactgggggttaaaggccgcggtgtcgcagccctccagtccctacttcaggctgagccatcttgtggtgctgggcttcctgcccaccagccgtgccatctctgcccaacccggctgctcctctgccccgaagccctcgcgaggccctcctggaggcccccgtgctggtggagtttgggggccagggggacaagttgccttctctctctgccctggtcctccctgctgtctggatggtgctgccctcctctgccccatgcctttggggtctgttcgtccgtcttttttgttgttgtttttatatattgaagcgcctggcccagcccccatcccccagccccgcactgcgggtaatttatgtgttg

SEQ ID NO: 3927 - DNA, 442 bp, Homo sapiens
tcagaaggttctaacgtttttattgattagatttgtgtacagtggtaatccttccatcatacaggtaatatataataacattcaaaaatctgacattaaaataacttattgactaatgctaatattaacacacaatagttctatctctattaataataaaaaccaaaccactgagtttatcttagaaaacttaaattcaggccattattttacaatttggaagtctgagtaatccaacttcaagatgactttttcattgttgaagtttgctttgtcgatgtgtgatttaggacttcctcttgtttcaagccattcctgcatatgacgcaccttggagatgggaccttgcaattgtccttgcactgtgccccggtcagtgttctggacccagcctaccaatcccagctttttaccctcagcctaagggggtaaaaagagagag

SEQ ID NO: 3928 - DNA, 341 bp, Homo sapiens
tttttttttttttcaaaaataaaaataaaattcatttattgaaaagaaaaagcttaacatacgatccatgtgcaaaccccaaaacaggatctacgaactctggcatgatccacatcgctacacataccatgctggaagtgcacatccacacaggcacgtaacatacacagtactgtctagttatcaacacctacagattggttgatttttcttcacacaccattgacatgttttacaatagagttaccaattttattatccactgaaagagcatagcttcccccagaatcactttgatttaaaccaaataacacagtgaatgacaggcaccctgcacctat

SEQ ID NO: 3929 - DNA, 635 bp, Homo sapiens
cccttcgacggtgttctgtacgagagaaatattgactgtcaaaacaccgtaggatttggcaggattcttgaggatcttgacagcttgggagttcttatttgttacatgcacaacaaaatccactccgccaagatgtctcctttatcgatagttacagccctggtggataagattgatatgtgtaagaagagcttgagcccagaacaggacattaagttcagtggccatgttagctgggtcgggaagacatccatggaagtgaagatgcaaatgttccagttacatggtgatgaattttgtcctgttttggatgcaacatttgtaatggtggctcgtgattctgaaaataaagggccggcatttgtaaatccactcatccctgaaagcccagaggaagaggagctctttggacaaggggaattgaacaaggggagaagaattgccttcagctccacgtcgttactgaaaatggcccccagcgctgaggagaggaccaccatacatgagatgtttctcagcacactggatccaaagactataagttttcggagtcgagttttaccctctaatgcagtgtggatggagaattcaaactgaagagtttggaaatttgcaccctcaggagcggaacattt

SEQ ID NO: 3930 - DNA, 2135 bp, Homo sapiens
ggcacgagggtaaggccgttttcttttcccattcgctcatctgccaggaaaagggacttgccgttggcgcttcggcctcttgttcattgagaaaaaagaggaaatactccgcgtgcgcttgtagaaggggagtcgtctccagctccgaaccccggagtgttcatcagcggggaatctggctccgaattctctttttttctcccgccgattgctcggaagttggtctaaagcagaggttggaaagaaaggaaaaaagtttgcatcgagactggatttatttgcacatcgcagaaagaagagaatccaagggagaggggttggtgcaaagccgcgatcacggagttcagatgtgttctaagcctgctggagtgaccacacttccaagacctgatggaggccagagctcagagtggcaacgggtcgcagcccttgctgcagacgccccgtgacggtggcagacagcgtggggagcccgaccccagagacgccctcacccagcaggtacatgtcttgtctctggatcagatcagagccatccgaaacaccaatgagtacacagaggggcctactgtcgtcccaagacctgggctcaagcctgctcctcgcccctccactcagcacaaacacgagagactccacggtctgcctgagcaccgccagcctcctaggctccagcactcgcaggtccattcttctgcacgagcccctctgtccagatccataagcacggtcagctcagggtcgcggagcagtacgaggacaagtaccagcagcagctcctctgaacagagactgctaggatcatccttctcctccgggcctgttgctgatggcataatccgggtgcaacccaaatctgagctcaagccaggtgagcttaagccactgagcaaggaagatttgggcctgcacgcctacaggtgtgaggactgtggcaagtgcaaatgtaaggagtgcacctacccaaggcctctgccatcagactggatctgcgacaagcagtgcctttgctcggcccagaacgtgattgactatgggacttgtgtatgctgtgtgaaaggtctcttctatcactgttctaatgatgatgaggacaactgtgctgacaacccatgttcttgcagccagtctcactgttgtacacgatggtcagccatgggtgtcatgtccctctttttgccttgtttatggtgttaccttccagccaagggttgccttaaattgtgccaggggtgttatgaccgggttaacaggcctggttgccgctgtaaaaactcaaacacagtttgctgcaaagttcccactgtcccccctaggaactttgaaaaaccaacatagcatcattaatcaggaatattacagtaatgaggattttttctttctttttttaatacacatatgcaaccaactaaacagttataatcttggcactgttaatcgaaagttgggatagtctttgctgtttgcggtgaaatgctttttgtccatgtgccgttttaactgatatgcttgttagaactcagctaatggagctcaaagtatgagatacagaacttggtgacccatgtattgcataagctaaagcaacacagacactcctaggcaaagtttttgtttgtgaatagtacttgcaaaacttgtaaattagcagatgacttttttccattgttttctccagagagaatgtgctatatttttgtatatacaataatatttgcaactgtgaaaaacaagttgtgccatactacatggcacagacacaaaatattatactaatatgttgtacattcggaagaatgtgaatcaatcagtatgtttttagattgtattttgccttacagaaagcctttattgtaagactctgatttccctttggacttcatgtatattgtacagttacagtaaaattcaacctttattttctaattttttcaacatattgtttagtgtaaagaatatttatttgaagttttattattttataaaaaagaatatttattttaagaggcatcttacaaattttgccccttttatgaggatgtgatagttgctgcaaatgaggggttacagatgcatatgtccaatataaaatagaaaatatattaacgtttgaaattaaaaaaaaaaaaaaaaaa

SEQ ID NO: 3931 - protein, 315 aa, Homo sapiens
MEARAQSGNGSQPLLQTPRDGGRQRGEPDPRDALTQQVHVLSLDQIRAIRNTNEYTEGPTVVPRPGLKPAPRPSTQHKHERLHGLPEHRQPPRLQHSQVHSSARAPLSRSISTVSSGSRSSTRTSTSSSSSEQRLLGSSFSSGPVADGIIRVQPKSELKPGELKPLSKEDLGLHAYRCEDCGKCKCKECTYPRPLPSDWICDKQCLCSAQNVIDYGTCVCCVKGLFYHCSNDDEDNCADNPCSCSQSHCCTRWSAMGVMSLFLPCLWCYLPAKGCLKLCQGCYDRVNRPGCRCKNSNTVCCKVPTVPPRNFEKPT

SEQ ID NO: 3932 - DNA, 915 bp, Homo sapiens
ggtgttacttatagaggtgggtaggagagggccgccaggtgccactccctcttggtgaccccccatctggagttaaggctccaagcagcaagtgacagaggagggtgcctggctccagcagcctgggcttggcggcgagtcccccaaaaacaccccagctgggtgggtgcctgggggcctaagtgaggctggtgttggagctgctggtagcactgcctcgcttttgcatggcaagcgcacagcactggggacctgcaggcctgctctgtcacctgggaagctgccacaaccaatacctgtgaaagcaggcagcagcggctgtgtgaacctggtcttgaaagtgtgcagcacttgtttggtgcgggcattgtacgaaggacaggaggccttggtggaagtcacagtgcacacccaggcagtcgggcacgggggcgtccagcaccttgaccttgttggcgtgcttggccgtgaagctgacctgcagccaattgttgacgtgcaggcaccaggaggcggccgtcttgcccagttgctcgaagcggcccaggctgcggtaggccacgcccacgccgaacgccttgctgtccggctcgtagcgcacctcccagtaatgctccccgccgtcgatcacgcgtgtcccccagaactgtgtggactcagcggtgaagcggtcccgtcgcgacacgacctgagggcatcctcttgggagatggagtcctctggctggggagttgatgggagacgctcgttccgacccttgaccgtcttctcgcgagcgttgatatcctgcgcttccgcccattagcgtcccactccacaggcagatcttcaccccgcggttctggtggggatgtgaccccctccggcgaaactgacgctgttttcaaagcccggtccgagaaccttctcgcatgc

SEQ ID NO: 3933 - DNA, 545 bp, Homo sapiens
gctgaatataaggaaatatgtctaatggacaccagttaatactttttaaaactactctttaaaaaaaaaatacgttccccttggttaactgattttttaatccagggtggacattttttcaacctttattaaaaagacaaataaactattttgtagaagatcagactcctacttaactggaagagaaatgtctattaaatgtctctcctctttctctgggtcaagaccatgtaattttatgcttcagagatgaagatactgtttgtttacaaagagtttagtttttaagacatccaaaactctatgctagagcaaaaatcaaatagcaaaggacactagccagaaaatacagtgtgtgtgtgtgcacctgtgtgcctgctgaacaacttgacagtgtaacagataaggtaactgaagatggtggatatttgaattgtattagcttaatgtctacatatctttggccaaaactctattgtcatattagaaacatgttatctttttcatgtttattagtaatttatttttgattctttgttttcttt

SEQ ID NO: 3934 - DNA, 456 bp, Homo sapiens
agcggccgcccttggtttttttttttctgactcacatagaattttattcaaaggcctaatatctagaaagaagctcaactttacatataataagcaagaaatacagattaaacatagggatattttacagagaaagggctagataccgccaatgtatactatgatgaatataaaagccaaaccatgtaaatgtctctttgataagttttttttccaacttaatgagattgagttgttagccattaaaaatataacagggacctctgattttttaattcagtaatagaaagaataaattattaaatatttttacataatacctttgccttttgtctacaaacacaaacacatttacacatactgaatgtcttacaatggcttctctttttatttttagataaggctggttaaagatttctcatatcacttacaataggaatattttattttatttaa

SEQ ID NO: 3935 - DNA, 439 bp, Homo sapiens
tttttttactgcaaatttaaactgcatgacaataaagaacacaatgcctgctactagtttggtgctattgctcagggttatgctaacgttttaatcagcattgcttttggatatcactgcaaatgttaacacagggaagaaggcaaatgatgacttagtattattatgaaactattctgatctcacagactccatgaaaggagtctattctctaggattccacagactacactttgaaaactgctaggctactctaacacacttgtttaataggtaacctaccaattcatatttatttccaagtttaatgcaaactacttgacagcaaatctcttctttgtacttcgctttaataccccgcaacgatttgaatgtgtcccccagaagttcatctgttggatacttggtgcccaatgcaggcgtgttaagaggcgagacc

SEQ ID NO: 3936 - DNA, 125 bp, Homo sapiens
  misc_feature (59)..(59): n is a, c, g, or t
  misc_feature (109)..(109): n is a, c, g, or t
  misc_feature (116)..(116): n is a, c, g, or t
  misc_feature (121)..(121): n is a, c, g, or t
tgacagaccccagcgccgactgagcctctaaagcgacttcagatctgtcccaccaacancaccgcgcgcccgggaacagacgctccgggaagaaacctgaggggacttnggggggnacganggac

SEQ ID NO: 3937 - DNA, 2472 bp, Homo sapiens
caagcagggcctacaagccgaggagggctgtttaaaggcgcaggggccattttaccctccaggttggccctgctcaggaccaggaggaaacacctccagcccgcgacctcctcccacagggggaaaaggaaagcaggaggaccacagaagctttggcaccgaggatccccgcagtcttcacccgcggagattccggctgaaggagctgtccagcgactacaccgctaagcgcagggagcccaagcctccgcaccggattccggagcacaagctccaccgcgcatgcgcacacgccccagacccaggctcaggaggactgagaattttctgaccgcagtgcaccatgggaagctctgaagtttccataattcctgggctccagaaagaagaaaaggcggccgtggagagacgaagacttcatgtgctgaaagctctgaagaagctaaggattgaggctgatgaggccccagttgttgctgtgctgggctcaggcggaggactgcgggctcacattgcctgccttggggtcctgagtgagatgaaagaacagggcctgttggatgccgtcacgtacctcgcaggggtctctggatccacttgggcaatatcttctctctacaccaatgatggtgacatggaagctctcgaggctgacctgaaacatcgatttacccgacaggagtgggacttggctaagagcctacagaaaaccatccaagcagcgaggtctgagaattactctctgaccgacttctgggcctacatggttatctctaagcaaaccagagaactgccggagtctcatttgtccaatatgaagaagcccgtggaagaagggacactaccctacccgatatttgcagccattgacaatgacctgcaaccttcctggcaggaggcaagagcaccagagacctggttcgagttcacccctcaccacgctggcttccctgcactgggggcctttgtttccataacccacttcggaagcaaattcaagaagggaagactggtcagaactcaccctgagagagacctgactttcctgagaggtttatggggaagtgctcttggtaacactgaagtcattagggaatacatttttgaccagttaaggaatctgaccctgaaaggtttatggagaagggctgttgctaatgctaaaagcattggacaccttatttttgcccgattactgaggctgcaagaaagttcacaaggggaacatcctcccccagaagatgaaggcggtgagcctgaacacacctggctgactgagatgctcgagaattggaccaggacctccctggaaaagcaggagcagccccatgaggaccccgaaaggaaaggctcactcagtaacttgatggattttgtgaagaaaacaggcatttgcgcttcaaagtgggaatgggggaccactcacaacttcctgtacaaacacggtggcatccgggacaagataatgagcagccggaagcacctccacctggtggatgctggtttagccatcaacactcccttcccactcgtgctgcccccgacgcgggaggttcacctcatcctctccttcgacttcagtgccggagatcctttcgagaccatccgggctaccactgattactgccgccgccacaagatcccctttccccaagtagaagaggctgagctggatttgtggtccaaggcccccgccagctgctacatcctgaaaggagaaactggaccagtggtgatgcattttcccctgttcaacatagatgcctgtggaggtgatattgaggcatggagtgacacatacgacacattcaagcttgctgacacctacactctagatgtggtggtgctactcttggcattagccaagaagaatgtcagggaaaacaagaagaagatccttagagagttgatgaacgtggccgggctctactacccgaaggatagtgcccgaagttgctgcttggcatagatgagcctcagcttccagggcactgtgggcctgttggtctactagggccctgaagtccacctggccttcctgttcttcactcccttcagccacacgcttcatggccttgagttcaccttggctgtcctaacagggccaatcaccagtgaccagctagactgtgattttgatagcgtcattcagaagaaggcgtccaaggagctgaaggtggtgaaatttgtcctgcaggtccctcgggagatcctggagctggagcatgagtgtctgacaatcagaagcatcatgtccaatgtccagatggccagaatgaatgtgatagttcagaccaatgccttccactgctcctttatgactgcacttctagccagtagctctgcacaagttagctctgtagaagtaagaacttgggcttaaatcatgggctatctctccacagccaagtggagctctgagaatacaacaagtgctcaataaatgcttgctgattgactgatggaaaaaaa

SEQ ID NO: 3938 - protein, 541 aa, Homo sapiens
MGSSEVSIIPGLQKEEKAAVERRRLHVLKALKKLRIEADEAPVVAVLGSGGGLRAHIACLGVLSEMKEQGLLDAVTYLAGVSGSTWAISSLYTNDGDMEALEADLKHRFTRQEWDLAKSLQKTIQAARSENYSLTDFWAYMVISKQTRELPESHLSNMKKPVEEGTLPYPIFAAIDNDLQPSWQEARAPETWFEFTPHHAGFPALGAFVSITHFGSKFKKGRLVRTHPERDLTFLRGLWGSALGNTEVIREYIFDQLRNLTLKGLWRRAVANAKSIGHLIFARLLRLQESSQGEHPPPEDEGGEPEHTWLTEMLENWTRTSLEKQEQPHEDPERKGSLSNLMDFVKKTGICASKWEWGTTHNFLYKHGGIRDKIMSSRKHLHLVDAGLAINTPFPLVLPPTREVHLILSFDFSAGDPFETIRATTDYCRRHKIPFPQVEEAELDLWSKAPASCYILKGETGPVVMHFPLFNIDACGGDIEAWSDTYDTFKLADTYTLDVVVLLLALAKKNVRENKKKILRELMNVAGLYYPKDSARSCCLA

SEQ ID NO: 3939 - DNA, 1559 bp, Homo sapiens
cccaggtttttccctctttgtgagatctgagctttagtggaatgtagaatgtggcaatcttaaggtcaccaatcagtttttgttccagttcaattccaagaattgcaaatgtttattggacccctccatcttgatgatatataaaaattggaagccaaaccagttcttaaatgctacatgcaactcccagattccaaaggattcaagttctaattataacctttgaagcgtatagaatggaactcattcagtttgattcagttcttacctctgtcaggaggaatacagttcctgttcatcctgtgttctaagatctccattgaacagcactgatttcctttcattagcaaagtgatctttgtctctgttctaaaatggaggcagtagggagcaaaactattcttctcaagcatcctttacaccatactttacttctggtatggtttattaaccacacacacacacaaaagtgaaaaactgtgttgggggggagacactactcctacttatcttgctcataaagccttttctggtgggatattaaggccctggtgtcttacagaaaccatcacgtatgtcgcagcagcatttcacccctgaagtctctaaactctgagcctgaaaagatttgtatttaatacacataacattttttagttcattctgcctttcctatttgttccagtttttgcttggttttagtttggaggggaacttaagtacacagatccttatctctccccatcccctagcctcacaaaacacagttgagagtcttttaagtacctgagctctcgaagctacccagaactgaactagactcccctaccttagactggtaccctcaaacacaggactgaagcttaattgggaatttggctttatggagaaaagaatctttttcaaagtttgtgtcggaaggggagggtgaggtttgcccactgtctctgcaggaaggctccggcttaatctaggaagtagattccagctgcacgatgaggaacacattagcttttgggatcaaaccaggaatatgaatctgtaattattaagctcattgccaacccacaagatatgtttctgaaaacctgtagtttcttaatttaagtccatccccttcattaacgctacagttgtgactcacactgatcccaaacttttaagtgctaaatattaacatttagcattaactgtcttgtcaagcgaaaggccttctctacaacctagtccatctcacttctggtgctacctgagttggacagaattctagctcatggttgctaggaaagctaggcctctgatcatagaagcagatagcttcagtcccagtctaggcctagataaatgactcttattaccacaacccttattattttccaatttcctttctcacatactgtacacaggtagtattttcaatgtgaatccaaagcttgtctggttctctgaaaataattttttcccctttaggttctttacattgtgataatgctgtatttaaagagaatatttaaatgtaatattaaagaaatattcaaaaggaaaaaaaaaaaaaaaaa

SEQ ID NO: 3940 - DNA, 461 bp, Homo sapiens
  misc_feature (407)..(407): n is a, c, g, or t
  misc_feature (461)..(461): n is a, c, g, or t
ttttttttttggcttacaaacaacagacatttatttatttctcccagttctggaggctggaagtctgagatctgggtgccatcatggctgggttctggtgagggcctgcttctcggttcatgggcagctgatttcttgctgcatcctcaagcattgaaggggtgaaggagctctctggggccacctttcatgagggcactaatcccatcatttgggccccatcctcatgatatgatctaaacctaatcacctcccaaaggccccacctccaaataccatcacattggggattaggtttcaacatataaaatctgggggaacataaacattgagtctattgcacacgagtttattagttcccagtataacatcccaaggttgctggaggcctattatataagggatcnaaagttctcgttcttgtggtgaatgatccgaatttgaatctccactgtttggan

SEQ ID NO: 3941 - DNA, 353 bp, Homo sapiens
tttttttttttttttttttttttttttttttttttttttttttttttttgggcaaacagggagagagggtctttattcctaaagttggtttctcacccgcaggggcaagggccaaccccttcccaatcttaccttacaaaacaggggggacaggcattcagggatagcaaaacgatctttcctatcctatttggggccttaaaaaaaagcgtaattgggcatttaaactggggttggggatgagggcagcaaaccccacagctgtgggaaccagtttcttttcatgctatcacatgaggctggagcctgaactatctttgggaggctgcaaaaagggggaagggagtttcaaa

SEQ ID NO: 3942 - DNA, 243 bp, Homo sapiens
  misc_feature (8)..(8): n is a, c, g, or t
  misc_feature (84)..(84): n is a, c, g, or t
  misc_feature (120)..(120): n is a, c, g, or t
tttttttnctttttatgccccgaagcactttctgcagtagctagagggacaggtttccttccaggaaggattcgagttcctgtncctgtgggtattaggagagtatatatcctgcctgantggggaagtcttctaaaatgggaaagaagtggtttcatctccacacagtgtcttgtaaatctcaacaaatgtgtactgttagaagtggcttccgcttactggattaactaatactttataggc

SEQ ID NO: 3943 - DNA, 342 bp, Homo sapiens
ttttttgattttctgaaagcaggtaggtttattagcaaacagtacaattatagacatttttatgatgactatacaaaacccagacactgtccatttgaaacacaacatttttttgcagatgattttaaaatcatttttaaaacacattcatacttaaactctattataatgaacatctcaaaatgaatgctcatgcatggggatataacatctttgtgaaaatatttggttatgagtcttgggtaaaaggcactattcactgggaaaccaattctattaataccattttccaaatgaaggagcatgtcaggcccttatcaatcacccatgctcagagaaagc

SEQ ID NO: 3944 - DNA, 606 bp, Homo sapiens
  misc_feature (486)..(486): n is a, c, g, or t
  misc_feature (504)..(504): n is a, c, g, or t
gcggccgccgcgctttcccgcttcgcggagaccgacgcattcgcccgcccccgaggccgaagggcactgggcggcgagggctgcggtagctggcgactccgggggcgtctgcgcggcgcgcgctagacgaggctgccccggcggccaccccgcgaccccgcgtcgccgggatttgcgcgcggagaacgccggttctggagggagcacgcctccccaaagtgcagaggagggtccggcggcgcgtctccgcggaaaccctctccactgtagttaccccggatgccgacttagtagtttgttttccgagaaaagagaggggatctgggcagaagggccccgtttgccccaaaagaaggtgcaaggatcagaagataacgaaacgtccacttcctgaagggtgggaaaaaaagaaaaagaaaaaggagccacccacgctggagatgtccggtttagatcttcttattttcttccctttcggctcggttnttcttctcgaggctcatntaatctgctagagaaggaggaggagcagaagatgggggccggagaggaagggaagagaaagagaagttggccaggaataagttttgcccgcagcgccgggac

SEQ ID NO: 3945 - DNA, 809 bp, Homo sapiens
ggcatttttgtaaggaggttactaagttctcacttaattcattgaaagccctttcgtgctgagcccaagggggatcctgggccaggaccagaccctctcagcacctcttgtgtcctaccgcagacacccggtgctgggggtgcggctgctccacctccggtgcactctgccctcccgtcccctgctgcatctctctctgtacagaacaatttcttcaataatggaagctaaggagacgatatatacactggacaggcaccatcacagcaccgacacactaggacgtacccgcaccacgaacagagggcgggacaccaggcgtgcactcagagagcaccaaggaatgcaaacggagcccctccgggtaagagggcagggcctgggcccactagagtcctcagatcctcagtccgcactcctccccgccaattgacctgctagctgccagagaggggaggggggcaggaagagctgggggcagctggtcgggaggcggcggtcataagaatgagtaccacgcctggtaagagcaggccctagaggccacggatggctactattgtcgggggagtccagaaggacgggtgcaggtcgtcgggggaaagagacatgaagggctggagcctctccagggacacactgaaggggcctgacaactctcagggtcctttgcccattcgaaggagcattctgacgggacccaggatgtcaggagctggggcatgaccctgcagtacttgaccctgagcgcttgcgcgcatctcgaagaataaattaccattggaaattaaaaaataagcattttatac

SEQ ID NO: 3946 - DNA, 336 bp, Homo sapiens
cctctccccaggcaggaaggtgggaagtgcaggcatgacccggggttcctgaggctggtccaccaagttgcttctgagacgccttcgcttctgtcctggctggctgttaatgatatccctgttctaattccactctggctaaactgaaagtaaagatccttaagcttacatgtgtctattactcaaaatcaaaataaaaacaaaagcacccgagtctccaacaggaaaaaaaaaaaaaaaaaaaaaaaaaaaaaaaaaaaaaaaaaaaaaaaaaaaaaaaaaaaaaaaaaaaaaaaaaaaaaaaaaaaaaaaaaaaaaaaaaaaaaaaaaaaaaaa

SEQ ID NO: 3947 - DNA, 300 bp, Homo sapiens
cggctagttcgagcctggtgttaatcggccgagggcgagaggtatactgcgttccatcccgacccggggcacggtactgggccctgtttcccccctcctcggccccgagaagccaggtccgccttctgcagggttccccagtggcccccgctccaggccgggctggaccgactcgctggcgcttcatggagaacttccaaaaggtggaaaagatcggagagggcacgtccggagtgtgtacaagccagaaacaagttgacgggagagggtggcgcttagaaatcgcctacccccccgggg

SEQ ID NO: 3948 - DNA, 518 bp, Homo sapiens
tttttttttttttaaattatttcaatgtgtattttatttttggggggtgattctaatattctgtaatatcctttggtttgttatatatcattcaaacatcattcattccattcacttaaagcatcatcttcaccaggcatttctgttggtaattggtcaagagaagttgaatctttgtatctcacagaactctgctcggattgtacctcaggtgtagaggcttttgccccccagaaagccttgactgctgcccgtgtaaaattgtaaaagttgcatttaaaagctctctcatagttggagaagcaagtcatgagattgttttaaaaagcatctacataaagagacggggcagcctgaactagggcagtcacaggagtaatgaaaggcgatggacagtttcaaggcaacatgtaggagacatcacggacagggctttgcaattcacactgctcgtatagactgtgaatttaatagttgctactatttcattattatccagtgtgtcacactcgaaagcc

SEQ ID NO: 3949 - DNA, 2906 bp, Homo sapiens
tttttttttttgattgtagcgggcaaggggggcgtcgagaggcagcagcccatcgcccgcctctcaccccaccccctccagccagaggcgagaatcgcaggactcgggatcttcatcgggtggactagctgggatctccgcattggatttggggctgattaccactgcttggctattattattgttgttgttactactattatttttttttacccaagggagaaagacaaaaaaacggtgggatttatttaacatgatcttggcaaacgtcttctgcctcttcttctttctagacgagaccctccgctctttggccagcccttcctccctgcagggccccgagctccacggctggcgccccccagtggactgtgtccgggccaatgagctgtgtgccgccgaatccaactgcagctctcgctaccgcactctgcggcagtgcctggcaggccgcgaccgcaacaccatgctggccaacaaggagtgccaggcggccttggaggtcttgcaggagagcccgctgtacgactgccgctgcaagcggggcatgaagaaggagctgcagtgtctgcagatctactggagcatccacctggggctgaccgagggtgaggagttctacgaagcctccccctatgagccggtgacctcccgcctctcggacatcttcaggcttgcttcaatcttctcagggacaggggcagacccggtggtcagcgccaagagcaaccattgcctggatgctgccaaggcctgcaacctgaatgacaactgcaagaagctgcgctcctcctacatctccatctgcaaccgcgagatctcgcccaccgagcgctgcaaccgccgcaagtgccacaaggccctgcgccagttcttcgaccgggtgcccagcgagtacacctaccgcatgctcttctgctcctgccaagaccaggcgtgcgctgagcgccgccggcaaaccatcctgcccagctgctcctatgaggacaaggagaagcccaactgcctggacctgcgtggcgtgtgccggactgaccacctgtgtcggtcccggctggccgacttccatgccaattgtcgagcctcctaccagacggtcaccagctgccctgcggacaattaccaggcgtgtctgggctcttatgctggcatgattgggtttgacatgacacctaactatgtggactccagccccactggcatcgtggtgtccccctggtgcagctgtcgtggcagcgggaacatggaggaggagtgtgagaagttcctcagggacttcaccgagaacccatgcctccggaacgccatccaggcctttggcaacggcacggacgtgaacgtgtccccaaaaggcccctcgttccaggccacccaggcccctcgggtggagaagacgccttctttgccagatgacctcagtgacagtaccagcttggggaccagtgtcatcaccacctgcacgtctgtccaggagcaggggctgaaggccaacaactccaaagagttaagcatgtgcttcacagagctcacgacaaatatcatcccagggagtaacaaggtgatcaaacctaactcaggccccagcagagccagaccgtcggctgccttgaccgtgctgtctgtcctgatgctgaaactggccttgtaggctgtgggaaccgagtcagaatatttttgaaagctacgcagacaagaacagccgcctgacgaaatggaaacacacacagacacacacacaccttgcaaaaaaaaaattgtttttcccaccttgtcgctgaacctgtctcctcccaggtttcttctctggagaagtttttgtaaaccaaacagacaagcaggcaggcagcctgagagctggcccaggggtcccctggcaggggaaactctggtgccggggagggcacgaggctctagaaatgcccttcactttctcctggtgtttttctctctggacccttctgaagcagagaccggacaagagcctgcagcggaagggactctgggctgtgcctgaggctggctgggggcaggacaacacagctgcttccccaggctgcccactctggggacccgctgggggctggcagagggcatcggtcagcggggcagcggggctggccatgagggtccaccttcagccctttggcttcaaggatggagatggttttgccctccctctctgccctcgggtggggctggtgggtctgcagctggtgtgggaacttccccacggatggcggtggagggggttcgcaccgtgctgggctccccctgactgtagcacggagtgttggggctgggggccagctccaggagggcttgagagctcagcctgcctgggagagcccttgtggcgaggcattaaaacttgggcaccagcttctttctcggtggcagaaattttgaagtcagagagaaacggtcctttgttggcttctttgctttctcgtgggtcctttggcaggcctccctttggggagagggaggggagagaccacagccgggtgtgtgtctgcagcaccgtgggccctcaagctttcctgctgtcttctccctcctcctcctttcccctttctctttcctcatttcctagacgtacgtcaactgtatgtacataccggggctcctctcctaacatatatgtatatacacatccatatacatatattgtgtggtttcccctttctttcctttttttaagcaacaaaactatggaaataataccccaacagatgagcgaaaatgtattattgtaaagtttattttttttaatactgttgtctataatggggaaaaaggacattggccccgcagtgccctgccccagtcagcctggctgggctctggtgggggctcctgatccgcatccaagcttaaccaaggctccaataaacgtgctaggaagc

SEQ ID NO: 3950 - protein, 464 aa, Homo sapiens
MILANVFCLFFFLDETLRSLASPSSLQGPELHGWRPPVDCVRANELCAAESNCSSRYRTLRQCLAGRDRNTMLANKECQAALEVLQESPLYDCRCKRGMKKELQCLQIYWSIHLGLTEGEEFYEASPYEPVTSRLSDIFRLASIFSGTGADPVVSAKSNHCLDAAKACNLNDNCKKLRSSYISICNREISPTERCNRRKCHKALRQFFDRVPSEYTYRMLFCSCQDQACAERRRQTILPSCSYEDKEKPNCLDLRGVCRTDHLCRSRLADFHANCRASYQTVTSCPADNYQACLGSYAGMIGFDMTPNYVDSSPTGIVVSPWCSCRGSGNMEEECEKFLRDFTENPCLRNAIQAFGNGTDVNVSPKGPSFQATQAPRVEKTPSLPDDLSDSTSLGTSVITTCTSVQEQGLKANNSKELSMCFTELTTNIIPGSNKVIKPNSGPSRARPSAALTVLSVLMLKLAL

SEQ ID NO: 3951 - DNA, 685 bp, Homo sapiens
  misc_feature (24)..(24): n is a, c, g, or t
aaaaggctcttttgaatcttaaantcaaagctaaggaagagtgtgaataacgcattcccacaaagtcttaataggattcagagggaagaaaattcgagagaccagcgagccaggcaggtgagcgagcagcagtaatcccccacccgctggctgcctctgccagccatagacacagcacggccccgtggcgggaggccatgcgcctccgcacaccccccagctgcgaggaaccctccttgaagtgagaggggcggggcagcggctgccattggtgccatccaaccacacgcccagtcccgcatggttcttgggtctgcccagaggtctcctcgccctagccccctacaggagggggctggccagctctgtcaagctgatggagtaggggccgagaaagcctgtggtgagagtgcccagccctcctccacactcgccgccctctctcacggggcccagttcgctgatggcccagcgcctgccaggcaagagcatgcacacccacctcgcctttccgcccactgcaatttgcactcagcagcctacagtcctgagagacgaccgttgtccgttctgaacatgtttctcatctttgaggggagacggggcagaagaagagcctccacgtctcgccttctacctccgggaggtcctggcgctgcagcccggacaggccagtgagggcccc

SEQ ID NO: 3952 - DNA, 498 bp, Homo sapiens
ttttttttttttttttttttaggtctaaacataaattttttcattctaacaatcccaatagcaccatgggatggtgaggcaggcaagggcaggagaaggttcagttctatggtcctcaaaaaacccagaggactcagaggataaccagactgtggctgaggtgcacaaagccctgagtcatcatcttacattttccaaactaatcaaccacgagtcaagaggagcagggacatcagggttgtgctgtgggtgccacaactccaaagcactgacagcactgtcatttttacaagagacactgaaaaccccgtgtggcactcatacacccactttagaaaactctgcacctgggctagaatgagcagacctcatctgattgtgtttttttttgttttttttttttaacttttcacataaaatatttcacttccacagtcacaaatcatgtctaaagaaggttaaaaaatctgttttacctaacaagtgtatcacattccc

SEQ ID NO: 3953 - DNA, 2746 bp, Homo sapiens
agctggggctccgtcctcgcctcccacgagcgatccccgaggagagccgcggccctcggcgaggcgaagaggccgacgaggaagaccctggagcataactgtgcccacttctgcatcaacatccctggctcatacgtctgcaggtgcaaacaaggctacattctcaactcggatcagacgacttgcagaatccaggatctgtgtgccatggaggaccacaactgtgagcagctctgtgtgaatgtgccgggctccttcgtctgccagtgctacagtggctacgccctggctgaggatgggaagaggtgtgtggctgtggactactgtgcctcagaaaaccacggatgtgaacatgagtgtgtaaatgctgatggctcctacctttgccagtgccatgaaggatttgctcttaacccagatgaaaaaacgtgcacaaagatagactactgtgcctcatctaatcacggatgtcagcacgagtgtgttaacacagatgattcctattcctgccactgcctgaaaggctttaccctgaatccagataagaaaacctgcagaaggatcaactactgtgcactgaacaaaccgggctgtgagcatgagtgcgtcaacatggaggagagctactactgccgctgccaccgtggctacactctggaccccaatggcaaaacctgcagccgagtggaccactgtgcacagcaggaccatggctgtgagcagctgtgtctgaacacggaggattccttcgtctgccagtgctcagaaggcttcctcatcaacgaggacctcaagacctgctcccgggtggattactgcctgctgagtgaccatggttgtgaatactcctgtgtcaacatggacagatcctttgcctgtcagtgtcctgagggacacgtgctccgcagcgatgggaagacgtgtgcaaaattggactcttgtgctctgggggaccacggttgtgaacattcgtgtgtaagcagtgaagattcgtttgtgtgccagtgctttgaaggttatatactccgtgaagatggaaaaacctgcagaaggaaagatgtctgccaagctatagaccatggctgtgaacacatttgtgtgaacagtgacgactcatacacgtgcgagtgcttggagggattccggctcgctgaggatgggaaacgctgccgaaggaaggatgtctgcaaatcaacccaccatggctgcgaacacatttgtgttaataatgggaattcctacatctgcaaatgctcagagggatttgttctagctgaggacggaagacggtgcaagaaatgcactgaaggcccaattgacctggtctttgtgatcgatggatccaagagtcttggagaagagaattttgaggtcgtgaagcagtttgtcactggaattatagattccttgacaatttcccccaaagccgctcgagtggggctgctccagtattccacacaggtccacacagagttcactctgagaaacttcaactcagccaaagacatgaaaaaagccgtggcccacatgaaatacatgggaaagggctctatgactgggctggccctgaaacacatgtttgagagaagttttacccaaggagaaggggccaggcccctttccacaagggtgcccagagcagccattgtgttcaccgacggacgggctcaggatgacgtctccgagtgggccagtaaagccaaggccaatggtatcactatgtatgctgttggggtaggaaaagccattgaggaggaactacaagagattgcctctgagcccacaaacaagcatctcttctatgccgaagacttcagcacaatggatgagataagtgaaaaactcaagaaaggcatctgtgaagctctagaagactccgatggaagacaggactctccagcaggggaactgccaaaaacggtccaacagccaacagaatctgagccagtcaccataaatatccaagacctactttcctgttctaattttgcagtgcaacacagatatctgtttgaagaagacaatcttttacggtctacacaaaagctttcccattcaacaaaaccttcaggaagccctttggaagaaaaacacgatcaatgcaaatgtgaaaaccttataatgttccagaaccttgcaaacgaagaagtaagaaaattaacacagcgcttagaagaaatgacacagagaatggaagccctggaaaatcgcctgagatacagatgaagattagaaatcgcgacacatttgtagtcattgtatcacggattacaatgaacgcagtgcagagccccaaagctcaggctattgttaaatcaataatgttgtgaagtaaaacaatcagtactgagaaacctggtttgccacagaacaaagacaagaagtatacactaacttgtataaatttatctaggaaaaaaatccttcagaattctaagatgaatttaccaggtgagaatgaataagctatgcaaggtattttgtaatatactgtggacacaacttgcttctgcctcatcctgccttagtgtgcaatctcatttgactatacgataaagtttgcacagtcttacttctgtagaacactggccataggaaatgctgtttttttgtactggactttaccttgatatatgtatatggatgtatgcataaaatcataggacatatgtacttgtggaacaagttggattttttatacaatattaaaattcaccacttcagagaaaaaaaaaaaaaaaaaaaa

SEQ ID NO: 3954 - protein, 741 aa, Homo sapiens
SWGSVLASHERSPRRAAALGEAKRPTRKTLEHNCAHFCINIPGSYVCRCKQGYILNSDQTTCRIQDLCAMEDHNCEQLCVNVPGSFVCQCYSGYALAEDGKRCVAVDYCASENHGCEHECVNADGSYLCQCHEGFALNPDEKTCTKIDYCASSNHGCQHECVNTDDSYSCHCLKGFTLNPDKKTCRRINYCALNKPGCEHECVNMEESYYCRCHRGYTLDPNGKTCSRVDHCAQQDHGCEQLCLNTEDSFVCQCSEGFLINEDLKTCSRVDYCLLSDHGCEYSCVNMDRSFACQCPEGHVLRSDGKTCAKLDSCALGDHGCEHSCVSSEDSFVCQCFEGYILREDGKTCRRKDVCQAIDHGCEHICVNSDDSYTCECLEGFRLAEDGKRCRRKDVCKSTHHGCEHICVNNGNSYICKCSEGFVLAEDGRRCKKCTEGPIDLVFVIDGSKSLGEENFEVVKQFVTGIIDSLTISPKAARVGLLQYSTQVHTEFTLRNFNSAKDMKKAVAHMKYMGKGSMTGLALKHMFERSFTQGEGARPLSTRVPRAAIVFTDGRAQDDVSEWASKAKANGITMYAVGVGKAIEEELQEIASEPTNKHLFYAEDFSTMDEISEKLKKGICEALEDSDGRQDSPAGELPKTVQQPTESEPVTINIQDLLSCSNFAVQHRYLFEEDNLLRSTQKLSHSTKPSGSPLEEKHDQCKCENLIMFQNLANEEVRKLTQRLEEMTQRMEALENRLRYR

SEQ ID NO: 3955 - DNA, 1163 bp, Homo sapiens
ccgtgcgggaatgggcgtggcctgggcggggcgggcgctaggacccaccggagcgccgtgaacgtcaccgagcggcgccgaggccccgggttgagcgggaggcgcgatcggtccggtcggtggctccccgcggcggggccgggcccgatctcgggcgggaaccgagcgcagagccggtagcgggaaggatgaccacgctcacacgacaagacctcaactttggccaagtggtggccgatgtgctctgcgagttcctggaggtggctgtgcatctcatcctctacgtgcgcgaggtctaccccgtgggcatcttccagaaacgcaagaagtacaacgtgccggtccagatgtcctgccacccggagctgaatcagtatatccaggacacgctgcactgcgtcaagccactcctggagaagaatgatgtggagaaagtggtggtggtgattttggataaagagcaccgcccagtggagaaattcgtctttgagatcacccagcctccactgctgtccatcagctcagactcgctgttgtctcatgtggagcagctgctccgggccttcatcctgaagatcagcgtgtgcgatgccgtcctggaccacaaccccccaggctgtaccttcacagtcctggtgcacacgagagaagccgccactcgcaacatggagaagatccaggtcatcaaggatttcccctggatcctggcggatgagcaggatgtccacatgcatgacccccggctgataccactaaaaaccatgacgtcggacattttaaagatgcagctttacgtggaagagcgcgctcataaaggcagctgagggggcacctgccaccccactgatgcccaaactgtcagactttgggggatccccgcctagggcagtgctgcatggctgccctgattccaagtgctcttatcgcctctgtgtgtggatcgcccgccccagcccggggccgctcaggtctgcttggaggatgcctcccccaggagggcagtgagggatgccgcaacctcgacttctcagcctcctggggttccgccggccaacactgtctgtctcaaatactgtgctgtgagttgtttcaataaaggggccccaagggctgggctgaaaaaaaaaaaaaaaaaaaaaaaaaaaaaaaaaaaaaaaaaaaaa

SEQ ID NO: 3956 - protein, 211 aa, Homo sapiens
MTTLTRQDLNFGQVVADVLCEFLEVAVHLILYVREVYPVGIFQKRKKYNVPVQMSCHPELNQYIQDTLHCVKPLLEKNDVEKVVVVILDKEHRPVEKFVFEITQPPLLSISSDSLLSHVEQLLRAFILKISVCDAVLDHNPPGCTFTVLVHTREAATRNMEKIQVIKDFPWILADEQDVHMHDPRLIPLKTMTSDILKMQLYVEERAHKGS

SEQ ID NO: 3957 - DNA, 1667 bp, Homo sapiens
ctgatcacaggtagcactcagattaccctgcctgctctgtgctttgctgcagaccatttgaccagaacgtgtgcagctcagccagccacagaactggaatttttcaggagcagggggagcatggagtttggactttgctgagcaactgaagtggagcgcagagcttgctcgcttaggagagagcatcatggatggcaaacaagggggcatggatgggagcaagcccgcggggccaagggactttcctggcatcaggcttctttcaaacccattgatgggcgatgctgtgtctgattggtctcctatgcatgaagctgcaatccacggacatcagctgtctctgaggaacctcatcagccaggggtgggctgtgaacatcatcacggcagatcatgtttccccactccatgaagcctgtcttggaggtcatctctcttgtgtgaagattttattaaagcatggagctcaggtgaatggtgtgacagcagactggcacactccactgtttaatgcttgtgtcagcggcagctgggattgtgtgaatttgcttctgcagcacggagccagcgttcaacctgagagtgatctggcatcccccatccatgaagctgctaggagaggccacgtggagtgtgtcaactctcttatagcttatgggggcaacattgaccataagatcagccacctgggcactccactctatttggcttgtgaaaaccaacagagagcctgtgtcaagaagcttctggagtcaggagcggacgtgaaccaagggaaaggtcaggattccccacttcatgcagtggccaggacagccagtgaagagctggcctgcctgctcatggattttggagcggacacccaggccaagaatgctgaaggcaaacgtcctgtggagctggtgcctccagagagccccttggcccagctcttcttggagagagaaggtgcttctttgccaaaacctaagccctaatctgttgacatcccttggggctctagtagaagggcccccttctttgatgcagttatgccgccttagaattcggaagtgttttggaatccagcagcatcataagataaccaaactcgtcctcccagaggatctgaaacagtttctcctacatctttaaatgcatctagggaatggattcacaaacgatgtgaaaacattattgagtgttgtagccactagaattttaaaatcaagttggatttatagagtttgactagttttttcgattagatttgtatttgttataaacttgtttatggagtttgactaattttttctattcaatttgtatttgttaaactcaagccagggtggaaagacactgcatacgtttgtattattagttagaaggcatgaagacttttttccctgcttggggagtgtcataagttattgttttgcatatctactgcatgccaagcactttctgcaccatctaatttagccctcacagccactgggtcaagatgtccaattttccagagtaaggatagaggagtcaaattcaaatacaggttttctgacattaacttatgtgatgacttgatcgaggcaggcttttccagcatcactgtcctggttccatctctgctatatgggaatgaaaataaagaaacatatttcttggcttgtctaaaaaaaaaaaaaaaaa

SEQ ID NO: 3958 - protein, 262 aa, Homo sapiens
MDGKQGGMDGSKPAGPRDFPGIRLLSNPLMGDAVSDWSPMHEAAIHGHQLSLRNLISQGWAVNIITADHVSPLHEACLGGHLSCVKILLKHGAQVNGVTADWHTPLFNACVSGSWDCVNLLLQHGASVQPESDLASPIHEAARRGHVECVNSLIAYGGNIDHKISHLGTPLYLACENQQRACVKKLLESGADVNQGKGQDSPLHAVARTASEELACLLMDFGADTQAKNAEGKRPVELVPPESPLAQLFLEREGASLPKPKP

SEQ ID NO: 3959 - DNA, 419 bp, Homo sapiens
  misc_feature (11)..(12): n is a, c, g, or t
  misc_feature (89)..(89): n is a, c, g, or t
  misc_feature (296)..(296): n is a, c, g, or t
  misc_feature (333)..(333): n is a, c, g, or t
ttgtaaatttnnttgacaatatggttattctaaggattaaatatttcacgtgttgaacacaatgcctggcacatagtaagttctatttnaaatgtatattgaataaaacataaataggacgttaatgtgattaagacaaacagagaaaaggatttaaagagagaagaggccaggagacgcgggagaagacaatgctaacaggttgtcttaacaacacatggaaagctcctcactgcacagcccccagatgcctcactccacgagtgaaatccctgcacggcggccgagagcgtggngtgcagcagtctgcctgacgtgaggagccatgtcatncacatgatctaggaagggtaaggggtacctccggtttctgggaacacacaatgtagggcacatttcgctgggggggctccctgtta

SEQ ID NO: 3960 - DNA, 498 bp, Homo sapiens
  misc_feature (47)..(47): n is a, c, g, or t
ggaaaagtgtgaggggctcttcacgtggggaaggaacagcaggcgcngaggagggggcaagcgtgtgtgagattcagtggtccatgcgtgcgtttgtcgtgtaagggtcattcctggggtttggagtgggggaacaaatcaatgtggctgtttttccgtggaaagaattcccactgcagtgtcccggagcctgcgtgtggtgggcaagctcctcaaatggtatctcacagggaataggggagtcttgaaaacgcagcttcggcagtaggaacatgaacctcttacctaaaagttccagggagtttggctcccgttgactattgggagaagttcttccagcagcgaggaaagaaagctttcgagtggtatggaacctacctggaactgttcggggtgctacataaatatatcaagcccagggaaaaggtgctggtgattgggtgtggcactcagaactgagtgagcactgtatgatgtgggctatcggatatagtgaca

SEQ ID NO: 3961 - DNA, 7392 bp, Homo sapiens
  misc_feature (7110)..(7110): n is a, c, g, or t
gctgcgcagcgctggctgctggctggcctcgcggagacgccgaacggacgcggccggcgccggcttgtgggctcgccgcctgcagccatgaccctcgcagcctgtccctcggcctcggcccgggacgtctaaaatcccacacagtcgcgcgcagctgctggagagccggccgctgccccctcgtcgccgcatcacactcccgtcccgggagctgggagcagcgcgggcagccggcgcccccgtgcaaactgggggtgtctgccagagcagccccagccgctgccgctgctacccccgatgctggccatggcctggcggggcgcagggccgagcgtcccgggggcgcccgggggcgtcggtctcagtctggggttgctcctgcagttgctgctgctcctggggccggcgcggggcttcggggacgaggaagagcggcgctgcgaccccatccgcatctccatgtgccagaacctcggctacaacgtgaccaagatgcccaacctggttgggcacgagctgcagacggacgccgagctgcagctgacaactttcacaccgctcatccagtacggctgctccagccagctgcagttcttcctttgttctgtttatgtgccaatgtgcacagagaagatcaacatccccattggcccatgcggcggcatgtgtctttcagtcaagagacgctgtgaacccgtcctgaaggaatttggatttgcctggccagagagtctgaactgcagcaaattcccaccacagaacgaccacaaccacatgtgcatggaagggccaggtgatgaagaggtgcccttacctcacaaaacccccatccagcctggggaagagtgtcactctgtgggaaccaattctgatcagtacatctgggtgaaaaggagcctgaactgtgtgctcaagtgtggctatgatgctggcttatacagccgctcagccaaggagttcactgatatctggatggctgtgtgggccagcctgtgtttcatctccactgccttcacagtactgaccttcctgatcgattcttctaggttttcctaccctgagcgccccatcatatttctcagtatgtgctataatatttatagcattgcttatattgtcaggctgactgtaggccgggaaaggatatcctgtgattttgaagaggcagcagaacctgttctcatccaagaaggacttaagaacacaggatgtgcaataattttcttgctgatgtacttttttggaatggccagctccatttggtgggttattctgacactcacttggtttttggcagcaggactcaaatggggtcatgaagccattgaaatgcacagctcttatttccacattgcagcctgggccatccccgcagtgaaaaccattgtcatcttgattatgagactggtggatgcagatgaactgactggcttgtgctatgttggaaaccaaaatctcgatgccctcaccgggttcgtggtggctcccctctttacttatttggtcattggaactttgttcattgctgcaggtttggtggccttgttcaaaattcggtcaaatcttcaaaaggatgggacaaagacagacaagttagaaagactgatggtcaagattggggtgttctcagtactgtacacagttcctgcaacgtgtgtgattgcctgttatttttatgaaatctccaactgggcactttttcggtattctgcagatgattccaacatggctgttgaaatgttgaaaacttttatgtctttgttggtgggcatcacttcaggcatgtggatttggtctgccaaaagtcttcacacgtggcagaagtgttccaacagattggtgaattctggaaaggtaaagagagagaagagaggaaatggttgggtgaagcctggaaaaggcagtgagactgtggtataaggctagtcagcctccatgctttcttcattttgaaggggggaatgccagcattttggaggaaattctactaaaagttttatgcagtgaatctcagtttgaacaaactagcaacaattaagtgacccccgtcaacccactgcctcccaccccgaccccagcatcaaaaaaccaatgattttgctgcagactttggaatgatccaaaatggaaaagccagttagaggctttcaaagctgtgaaaaatcaaaacgttgatcactttagcaggttgcagcttggagcgtggaggtcctgcctagattccaggaagtccagggcgatactgttttcccctgcagggtgggatttgagctgtgagttggtaactagcagggagaaatattaacttttttaaccctttaccattttaaatactaactgggtctttcagatagcaaagcaatctataaacactggaaacgctgggttcagaaaagtgttacaagagttttatagtttggctgatgtaacataaacatcttctgtggtgcgctgtctgctgtttagaactttgtggactgcactcccaagaagtggtgttagaatctttcagtgcctttgtcataaaacagttatttgaacaaacaaaagtactgtactcacacacataaggtatccagtggatttttcttctctgtcttcctctcttaaatttcaacatctctcttcttggctgctgctgttttcttcattttatgttaatgactcaaaaaaggtatttttatagaatttttgtactgcagcatgcttaaagaggggaaaaggaagggtgattcactttctgacaatcacttaattcagaggaaaatgagatttactaagttgacttacctgacggaccccagagacctattgcattgagcagtggggacttaatatattttacttgtgtgattgcatctatgcagacgccagtctggaagagctgaaatgttaagtttcttggcaactttgcattcacacagattagctgtgtaatttttgtgtgtcaattacaattaaaagcacattgttggaccatgacatagtatactcaactgactttaaaactatggtcaacttcaacttgcattctcagaatgatagtgcctttaaaatttttttattttttaaagcataagaatgttatcagaatctggtctacttaggacaatggagactttttcagttttataaagggaactgaggacagctaatccaactacttggtgctgtaattgtttcctagtaattggcaaaggctccttgtaagatttcactggaggcagtgtggcctggagtatttatatggtgcttaatgaatctccagaatgccagccagaagcctgattggttagtagggaataaagtgtagaccatatgaaatgaactgcaaactctaatagcccaggtcttaattgcctttagcagaggtatccaaagcttttaaaatttatgcatacgttcttcacaagggggtacccccagcagcctctcgaaaattgcacttctcttaaaactgtaactggcctttctcttaccttgccttaggccttctaatcatgagatcttggggacaaattgactatgtcacaggttgctctccttgtaactcatacctgtctgcttcagcaactgctttgcaatgacatttatttattaattcatgccttaaaaaaataggaagggaagcttttttttttctttttttttttttcaatcacactttgtggaaaaacatttccagggactcaaaattccaaaaaggtggtcaaattctggaagtaagcatttcctcttttttaaaaatttggtttgagccttatgcccatagtttgacatttccctttcttctttcctttttgtttttgtgtggttcttgagctctctgacatcaagatgcatgtaaagtcgattgtatgttttgaaggcaaagtcttggcttttgagactgaagttaagtgggcacaggtggcccctgctgctgtgcccagtctgagtaccttggctagactctaggtcaggctccaggagcatgagaattgatccccagaagaaccattttaactccatctgatactccattgcctatgaaatgtaaaatgtgaactccctgtgctgcttgtagacagttcccataactgtccacggccctggagcacgcacccaggggcagagcctgcccttactcacgctctgctctggtgtcttgggagttgtgcagggactctggcccaggcaggggaaggaagaccaggcggtaggggactggtcttgctgttagagtatagaggtttgtaatgcagttttcttcataatgtgtcagtgattgtgtgaccaaggcagcatctagcagaaagccaggcatggagtaggtgatcgatacttgtcaatgactaaataataacaataaaagagcacttgggtgaatctgggcacctgatttctgagttttgagttctggagctagtgttttgacaatgctttgggttttgacatgccttttccacaaatctcttgccttttcagggcaaagtgtatttgatcagaagtggccatttggattagtagccttagcaatgctacagggttataggcccctctccctttcacattccagacaatggagagtgtttatggtttcaggaaaagaactttgtggctgaggggtcagttaccagtgaccttcaatcaactccatcacttcttaaatcggtatttgttaaaaaaatcagttattttatttattgagtgccgactgtagtaaagccctgaaatagataatctctgttcttctaactgatctaggatggggacgcacccaggtctgctgaactttactgttcctctgggaaaggagcagggacctctggaattcccatctgtttcactgtctccattccataaatctcttcctgtgtgagccaccacacccagcctgggtctctctacttttaacacatctctcatccctttcccaggacttccttccaagtcagttacaggtggttttaacagaaagcatcagctctgcttcgtgacagtctctggagaaatcccttaggaagactatgagagtaggccacaaggacatgggcccacacatctgctttggctttgccggcaattcagggcttggggtattccatgtgacttgtataggtatatttgaggacagcatcttgctagagaaaaggtgagggttgtttttctttctctgaaacctacagtaaatgggtatgattgtagcttcctcagaaatcccttggcctccagagattaaacatggtgcaatggcacctctgtccaacctcctttctggtagattcctttctcctgcttcatataggccaaacctcagggcaagggaacatgggggtagagtggtgctggccagaaccatctgcttgagctacttggttgattcatatcctctttcctttatggagacccatttcctgatctctgagactgttgctgaactggcaacttacttgggcctgaaactggagaaggggtgacatttttttaatttcagagatgctttctgattttcctctcccaggtcactgtctcacctgcactctccaaactcaggttccgggaagcttgtgtgtctagatactgaattgagattctgttcagcaccttttagctctatactctctggctcccctcatcctcatggtcactgaattaaatgcttattgtattgagaaccaagatgggacctgaggacacaaagatgagctcaacagtctcagccctagaggaatagactcagggatttcaccaggtcggtgcagtatttgatttctggtgaggtgaccacagctgcagttaggaagggagccattgagcacagactttggaaggaaccttttttttgttgtttgtttgtttgtttgtttgtttgtttgtttgagacagggtcttgctctgctacccaggctggggcgcaatggcacgatcttggctcactgcaacctctgcctcctgggttcaagtgattctcctgccacagcctcctgaggagctgggactacaggtgcgtgctaccacgcccagctacttctgtatttttagtagagacggggtttcactgtgttggccaggctggtctcgaactcctgacctcatgatctgcccgcctcagcctcccaaagtgctgggattacaagtgtgagccaccacacctggcctggaaggaacctcttaaaatcagtttacgtcttgtattttgttctgtgatggaggacactggagagagttgctattccagtcaatcatgtcgagtcactggactctgaaaatcctattggttcctttattttatttgagtttagagttcccttctgggtttgtattatgtctggcaaatgacctgggttatcacttttcctccagggttagatcatagatcttggaaactccttagagagcattttgctcctaccaaggatcagatactggagccccacataatagatttcatttcactctagcctacatagagctttctgttgctgtctcttgccatgcacttgtgcggtgattacacacttgacagtaccaggagacaaatgacttacagatcccccgacatgcctcttccccttggcaagctcagttgccctgatagtagcatgtttctgtttctgatgtaccttttttctcttcttctttgcatcagccaattcccagaatttccccaggcaatttgtagaggacctttttggggtcctatatgagccatgtcctcaaagcttttaaacctccttgctctcctacaatattcagtacatgaccactgtcatcctagaaggcttctgaaaagaggggcaagagccactctgcgccacaaaggttggatccatcttctctccgaggttgtgaaagttttcaaattgtactaataggctggggccctgacttggctgtgggctttgggaggggtaagctgctttctagatctctcccagtgaggcatggaggtgtttctgaattttgtctacctcacagggatgttgtgaggcttgaaaaggtcaaaaaatgatggccccttgagctctttgtaagaaaggtagatgaaatatcggatgtaatctgaaaaaaagataaaatgtgacttcccctgctctgtgcagcagtcgggctggatgctctgtggcntttcttgggtcctcatgccaccccacagctccaggaaccttgaagccaatctggggactttcagatgtttgacaaagaggtaccaggcaaacttcctgctacacatgccctgaatgaattgctaaatttcaaaggaaatggaccctgcttttaaggatgtacaaaagtatgtctgcatcgatgtctgtactgtaaatttctaatttatcactgtacaaagaaaaccccttgctatttaattttgtattaaaggaaaataaagttttgtttgttaaaaaaaaa

SEQ ID NO: 3962 - protein, 537 aa, Homo sapiens [sequence omitted]

SEQ ID NO: 3963 - DNA, 390 bp, Homo sapiens
ttttttccggtggccgtgcccagatcagaatcgcctcgataatcaggggccggggacaagcccggcctcgtctatctgatcaattcatcacttctgagcgccgggccccgcagggccagctccgggacctcggggaccacagcgtggccgccgcctaaggggcctcgctgcacagcgccccgagggggcttcgcaggaggagagcttttcatttcgggtcggcccggcggggctggggtcacgatccgatcaaataagatcaaagtgtaagcgggaggaggggcgcaggggtgggcgcacgcactcgcctaacacgctccaagcgcgcacactcacacactcacgcgtgcactcacactcaccctgcacgcgcctgacacgcgacgccac

SEQ ID NO: 3964 - DNA, 420 bp, Homo sapiens
tttttttttttttttttaatttaaagaaattatctttatttttatttgttcatctagacatgccaatggctacttaggccacattttgagcaaaactcacaaggtagttcctttttttttttttttttttttcaaacctcacatgtgtatacaaaatgacacagtttaaaggatttgtttaaaagaacaaagcatgagaaatacagtgagatacaagctcataaccaaacctaaataagtaagcagatctgattcaacacgagaaaagattacaaaacaagacctagttttgtaggaagcactatctgaagacaaagttgcaggacacgctgcaagtccctttgcggggagccataagcagggagaaataacctggtttctacttagcctaccagggagttatgggtaggcctcgtgccg

SEQ ID NO: 3965 - DNA, 429 bp, Homo sapiens
  misc_feature (429)..(429): n is a, c, g, or t
ctccccagggtcatctcacctagatctttctctcccaggtcatctcagctcaatctcaataaccctatgaaagccctggtctgttgtgttccttcaccgtacggtttctgtaataaaaagtgttaatccatgttaatctgtgtgaaaattattgcgtgcaacagtattttctccgtgtacctctttttcctatgtgaattgtccctcttttttatttataaatgtctacttttgtttttttaaagacaaaccaatgtgttgtagacctatatgtaacctattccttagtctcatattataggtatgttataagaatggatattttacttggctttagaatgttttacaagaaaactaattcttaactgatcaagtccttgctactaaaatgcttgtgtttttcatcatgacgtcgtgtgcttctaaatn

SEQ ID NO: 3966 - DNA, 613 bp, Homo sapiens
ttgcatttaggtgacactatagaagagctatgacgtcgcatgcacgcgtacgtaagcttggatcctctagagcggccgcctactactactaaattcgcggccgcgtcgacagctaaaggtgcttgactaacagtagttgcagaaatggctattttaactgtcctttcctacctgtagcaagccatacaaacttctttgataaagatgctttcctgataccaagatgagaagatggctctaatcagctgagacagcaccagaggaatctacaaacaagaaactattagtttcttaacatatatttaccttccacagtttctgcctctggaagcctaaaactgctttccttcgtcttgtcacacttctctgaaatgtattctttgtggaagatgctatatagtccagagttgtaagccactacttgtgtttaccttttcattgagttttctcctgtgtgatgtacgttgcatatattaataaaattacttgtttttctcttgttaaaaaaaaaaagtcgacgcggccgcgaatttagtagtagtagtcgacccgggaattccggaccggtacctgcaggcgtaccagctttccctatagtgagtcgtattagagc

SEQ ID NO: 3967 - DNA, 605 bp, Homo sapiens
  misc_feature (598)..(598): n is a, c, g, or t
agcggccgccctttttttttttttttttggtatccaaaacttgtttttattaatagtcttaaagggcattcaataaaacgttcccataaatatgccagtgaatttgttttaataacagaagatcatgaccttataaattactaagaaaaatatgctgcacagtaaaacaatgtctgatgttcttgaaaatactttttcactttacaagagatacaatatgtgcttcagtttacattttactctccatctaacttcagaaaaaaaaacacaaaaaggatgctatactaagaaatctttagtatgaggagtatgtaatcatagcctcagaaatttcaaaagctgccacaatgtttttccactcctgtaaagtcaaagatataactccctgtttcctgccatggcaactggaatcatttccctcacccatctggttaacattcatcggctctaatattggcagcctgtcttcatcaagccttattcttgcaaaaccatctcttacaataaaagaaacataaaatatattctccacagtacgagaaaaagagtttggatcaatcacaaactcaaaataggacacaggagtatcaggatactntcgaaag

SEQ ID NO: 3968 - DNA, 395 bp, Homo sapiens
tttattctttccacagtttattgagtgcctgctacacaccaagcactattccaggcactggggatacagcagggaaacgagacagaggaaggccttgccctcatggagcttacattctagttcagggatacaaacaagtcaaataaataaggagttctgagagcaggggtgctcttaagaattcagaacaggtgatgtggcacccctgcagagggggtcctgggagtgatctctccaaggaggaaacagccaagctgagattcgaaggggatgggggtgggggagctccggaaagatgggggaagagttggaggcagcgatgacagaagtccagtggtggcaaacacctgatgcctcaaagaaccaagagaagagagtggggcaggaccatggag

SEQ ID NO: 3969 - DNA, 303 bp, Homo sapiens
tttttttttttttttcctgagacaaaagctacatgacacaagatggcagacattctacgagatataagaacagctcataatggcttttgctttaatatgacatgaaaagcttggggttgtagttatcaataaactcaacctgagtgagcagtggatgtgatgtgggtgccaaaaaaaaataagcattaccttgattgcattgaagagatctaacattcggattaagggaggtaaagacctactgttccctgtcctactaagaccacatatggactattcctttcctttctaagcaccaccttt

SEQ ID NO: 3970 - DNA, 429 bp, Homo sapiens
cctgctcggtcccagtccatcctagaatcactccctgagagccaccactgcccctctcatcttctagaatttctagaaagataaagagctagataagcatctaggtacctttcttctgctgttagctctaaagacaagtgaaaatatcctagctaggatgtactctaaggaatgcagaagtaggccgagtgcagtggctcattcctgcaatcccagtgctttgggaggccgaggtgggcggatcacccgaggtcaggagtttgagtccagcctggtcaacatggcaaagccccgtctctactaaaaatacaaaaaccagccgggcgcggtggcgggtgcctgtaatcccagctactcgggaggctgaggcaggagaatcacttgaacccccaaggcagaggtagcagtgagccgagatggtaccactgc

SEQ ID NO: 3971 - DNA, 420 bp, Homo sapiens
  misc_feature (107)..(107): n is a, c, g, or t
  misc_feature (246)..(246): n is a, c, g, or t
  misc_feature (280)..(280): n is a, c, g, or t
  misc_feature (383)..(383): n is a, c, g, or t
  misc_feature (403)..(403): n is a, c, g, or t
  misc_feature (413)..(413): n is a, c, g, or t
gagaacataattttgaatttattatctctctatacacacacagttcataattggattacatataataataatatcaacaagtctatcagtatcgaagttggatactngtaatttctcatgtgaggctcttgtgtcacagtcagcatagatttctggagcatttgtctgttgatcttttggtggcctcaaacctcattaagtggtgtgggagatgctgtttctgccatgtgaagaatgtgatggcangaattaacacaacccccaccaggggtaccaacanagcactttacatccaaaggcagagagggacacagcaatgcagaattccagcacacttaagaggagcaccatgcccatccagacccaggccttttggtagttcnaattcccggctgcaattganaaggatcccnggaaata

SEQ ID NO: 3972 - DNA, 451 bp, Homo sapiens
acagacacatagtgaacacctgttaaatatcaggtgctgtttcagatcctgagaatagaggcataaacataaaagtcagcatccctcttcctatattgtgtctgatcattcattaaacatggatgtcaggcataggagaagattctagggaaggaataacggaaaggcatgtcatttgaccacatggattttgtaggcccatgggaagatcactataccaagaaacataatttggtatttgcagaaagggagaattgtgtaaggtatggcgagtacaggggaaagagtctacaatcttcttgggaaaatggcacatttcatgtagtgctattgttttaagttatatttgaaagtgcagaataaatttgcagggtgtgccgggtagggaaaatactatgcacagcatgtttggagatcagtgttgcttagagcaaagtaagtgggactgtga

SEQ ID NO: 3973 - DNA, 966 bp, Homo sapiens
gcccctcattataagggccagcaggctgagcaaaagaacagagacactctccctcactaccactgggcgcccggggacagtcccctgaggagtagggggcatccagtctttggcacggtgcctgggggcaggaagtgactagcatgatcccagctacccctctgtgggaatactgccaccaagaggcagctctttggtctggataaagtcaggcggaatgtccagtgagtcaagctctggaggaatgagggtggcacagtgccctagggctgggcagtctctgaacagtctcctcagccctcatgggcaacatgtgggcttcttcttgctggcagttaggtagaggttgctgtcatcactgttgatgcggacaacatccccaatgcgtcgagcccccgatttctccagctcagccagcacattggcctcaaaggtcagtgctgccacacggaagaagaattctcggacattctcaccagtgagagatgagactgcccagtactcagccttcatctcctgggccacctggagggcgtctttctccatcagcgcatactgagcaggggtactcagatccttcttggaacctacaaggaagagaagcacactggaaggtcattctccttcagggcatcggccagccacatgcttggaatgttccagagatgccacatcattcagcgttggaaagacaatgatgaatggcttgagcctcctactataagtagggttgatgcagtggcatatgaacctctacctggccagcaggtatccacaagctgcaaactgcaggaatgccccgagacttcaatcgttcctcctgacgtcacactcccatgggtggccttgtattctatcacacggtcattgacggaaccattaatgaggcagtttcccgcccaaaggtcccaccacagacctgggattaaccacaggcccgccagtgcaccgcggcatataagggga

SEQ ID NO: 3974 - DNA, 461 bp, Homo sapiens
  misc_feature (412)..(412): n is a, c, g, or t
tggtgtgaaatattgtgtgaatatctaggcaaaacataacaatttggctcaattttcttctttagaggattcgtgctgtttttgttcataaagggtagtgaaatcattgaactatattttagaatgaaaatttttgattttattaaaatgattttttcaaggcagaaagtaaaaggaatgattgatagcggagtgcatatagagctagagcatatcatccttgaactctgcaaatcctttcttccattttaatatagcaagaacaattttgtctttactacatcttaaagaattagaacttgggttggtgtaagtgacttacttccagggaatcatgccctatttctaccagcaggtcatacccaaatgtcacactatctattgttaaccatgaatgatattcagatctatntactttcgtgaaaagtggaacatgttacttccaaccatggcctgtcacc

SEQ ID NO: 3975 - DNA, 403 bp, Homo sapiens
taacttggtttccaagcgtccgcttgtacatacgttgaacgtggttctccgttcccaccttcgccctgccagcctagagggaccgcgctgccgtccctttccttgccttttttaacttcccctccccggggtggagggggtcttattttcgaagtatttataattattatgcttggtgattagaaaagaaaaccttggaggaagccccttctttccccagccggggtccgccctcagtcgcgagtcacagcatgagtcgctcgccaggaggggcccggcccctgcctgccccctccccgcttgcccccgaccctgctaccggcgttccttggaggtcgaagccagggacgtcacccgtgctgtgtccaggcctgctgtcctactatgctcaaccgggggtggg

SEQ ID NO: 3976 - DNA, 434 bp, Homo sapiens
tatagttatgtgggggtatatatgtgtatttttttttcttaaaaagggaaaacaactgttcaaaaccaactgggcagtatggtgggggtggggagcagtcctacagaagggggccgataacttcccccccaggaacaaagaacaaacacaatacaaagaaaataaccaccaatgctcccgcatggctcaggagcctctagagaacagattgtcccatcctcaaactggctttttttttttccttttttttttaatcttttttttttccattttcttttttgttgttgttgttttagcacctgtacaataaaactgtaccatctccaaccatagccggccacgaggtgccctcggtgcctttggatggtacatactctacaaggattgttcggaaaaatagcaattggtagaaaaataagagtgggagggacaat

SEQ ID NO: 3977 - DNA, 429 bp, Homo sapiens
tttttttttttttttttttttttgagacagtctcactgtcacccaggctgcatgcaggggctcgatctccacttgctgcagcctctgcctcccagttcaagcaatatttgtgcctcagtctcccgagtagctgggatcacaggcgtgtgtcactgcgcccagcctatattcaataacaatttgtaattaaaatgtcaataatatggcaggaataatttaaaagtggtaataataaaggacattttcagagtcagttaaaaaatccacttaatgctgttatagaagacaatctaaaattaaacaccaatggttgaaataaacaggaaaataaaataggtcttggctaacaaaagaaatgtagatatggcattattactgtatgcaaactagaattcaagtaaaaaagcatttgcaagggtgaagatactg

SEQ ID NO: 3978 - DNA, 324 bp, Homo sapiens
  misc_feature (39)..(39): n is a, c, g, or t
  misc_feature (229)..(229): n is a, c, g, or t
  misc_feature (240)..(240): n is a, c, g, or t
  misc_feature (292)..(293): n is a, c, g, or t
  misc_feature (298)..(298): n is a, c, g, or t
  misc_feature (307)..(307): n is a, c, g, or t
  misc_feature (311)..(311): n is a, c, g, or t
  misc_feature (313)..(313): n is a, c, g, or t
acagaatagccagatctcagaggagcctggctaagcaanaccctgcagaacggctgcctaatttacagcaaccatgagtacaaatggtgatgatcatcaggtcaaggatagtctggagcaattgagatgtcactttacatgggagttatccattgatgacgatgaaatgcctgatttagaaaacagagtcttggatcagattgaattcctagacaccaaatacagtgtnggaatacacancctactagcctatgtgaaacacctgaaagccagaatgagggaagcccttganngagcntagaaagangctngnaaaacttaatg

SEQ ID NO: 3979 - DNA, 640 bp, Homo sapiens
ttttttttttttttttttttttttttttttttcagtaacagaatgttttattttaaacttactgtaaaactttcaaatacaacacatgtggcaaagaaacaacagttcacacacaacatctgccacaattctctttgaactgccatttctatattatgtgatattttacaatttctttcaatttcttacattcatggtattcttaagggcagcaatgtcaatttttctgctttgaaaatagttcagttaatgttctgaaattgcttaacatgacattttccttttagtattctactgttgcccacactgacataattcaacatattatttataaactgttgagaggtatactgtacttaataaatcaactcccaactctaagttaacctcaatctaaaacaagcattttcttaaaccagtatactcagttacttttctcaaaaatatttccattctgaaatagattttttggagatacaatagtttcatcttttattcctaacagaactcatgccgtactttttttctcaaaatatatttgatatattctgggcaaaatgttaagttctgtataggcatgacccttatattgaaaaagtttataaaccataattcctaaaaccaacctcaacattagaca

SEQ ID NO: 3980 - DNA, 3197 bp, Homo sapiens
ggaccacagctcctcccgtgcatccactcggcctgggaggttctggattttggctgtcgagggagtttgcctgcctctccagagaaagatggtcatgaggcccctgtggagtctgcttctctgggaagccctacttcccattacagttactggtgcccaagtgctgagcaaagtcgggggctcggtgctgctggtggcagcgcgtccccctggcttccaagtccgtgaggctatctggcgatctctctggccttcagaagagctcctggccacgtttttccgaggctccctggagactctgtaccattcccgcttcctgggccgagcccagctacacagcaacctcagcctggagctcgggccgctggagtctggagacagcggcaacttctccgtgttgatggtggacacaaggggccagccctggacccagaccctccagctcaaggtgtacgatgcagtgcccaggcccgtggtacaagtgttcattgctgtagaaagggatgctcagccctccaagacctgccaggttttcttgtcctgttgggcccccaacatcagcgaaataacctatagctggcgacgggagacaaccatggactttggtatggaaccacacagcctcttcacagacggacaggtgctgagcatttccctgggaccaggagacagagatgtggcctattcctgcattgtctccaaccctgtcagctgggacttggccacagtcacgccctgggatagctgtcatcatgaggcagcaccagggaaggcctcctacaaagatgtgctgctggtggtggtgcctgtctcgctgctcctgatgctggttactctcttctctgcctggcactggtgcccctgctcagggaaaaagaaaaaggatgtccatgctgacagagtgggtccagagacagagaacccccttgtgcaggatctgccataaaggacaatatgaactgatgcctggactatcagtaaccccactgcacaggcacacgatgctctgggacataactggtgcctggaaatcaccatggtcctcatatctcccatgggaatcctgtcctgcctcgaaggagcagcctgggcagccatcacaccacgaggacaggaagcaccagcacgtttcacacctcccccttccctctcccatcttctcatatcctggctcttctctgggcaagatgagccaagcagaacattccatccaggacactggaagttctccaggatccagatccatggggacattaatagtccaaggcattccctcccccaccactattcataaagtattaaccaactggcaccaaggaattgcctccagcctgagtcctaggctctaaaagatattacatatttgaactaatagaggaactctgagtcacccatgccagcatcagcttcagccccagaccctgcagtttgagatctgatgcttcctgagggccaaggcattgctgtaagaaaaggtctagaaataggtgaaagtgagaggtgggggacaggggtttctctttctggcctaaggactttcaggtaatcagagttcatgggccctcaaaggtaaattgcagttgtagacaccgaggatggttgacaacccatggttgagatgggcaccgttttgcaggaaacaccatattaatagacatcctcaccatctccatccgctctcacgcctcctgcaggatctgggagtgagggtggagagtctttcctcacgctccagcacagtggccaggaaaagaaatactgaatttgccccagccaacaggacgttcttgcacaacttcaagaaaagcagctcagctcaggatgagtcttcctgcctgaaactgagagagtgaagaaccataaaacgctatgcagaaggaacattatggagagaaagggtactgaggcactctagaatctgccacattcattttcaaatgcaaatgcagaagacttaccttagttcaaggggaggggacaaagaccccacagcccaacagcaggactgtagaggtcactctgactccatcaaactttttattgtggccatcttaggaaaatacattctgcccctgaatgattctgtctagaaaagctctggagtattgatcactactggaaaaacacttaaggagctaaacttaccttcggggattattagctgataaggttcacagtttctctcacccaggtgtaactggattttttctggggcctcaatccagtcttgataacagcgaggaaagaggtattgaagaaacaggggtgggtttgaagtactattttccccagggtggcttcaatctccccacctaggatgtcagccctgtccaaggaccttccctcttctcccccagttccctgggcaatcacttcaccttggacaaaggatcagcacagctggcctccagatccacatcaccactcttccactcgattgttcccagatcctccctgcctggcctgctcagaggttccctgttggtaacctggctttatcaaattctcatccctttcccacacccacttctctcctatcaccttcccccaagattacctgaacagggtccatggccactcaacctgtcagcttgcaccatccccacctgccacctacagtcaggccacatgcctggtcactgaatcatgcaaaactggcctcagtccctaaaaatgatgtggaaaggaaagcccaggatctgacaatgagccctggtggatttgtggggaaaaaatacacagcactccccacctttctttcgttcatctccagggccccacctcagatcaaagcagctctggatgagatgggacctgcagctctccctccacaaggtgactcttagcaacctcatttcgacagtggtttgtagcgtggtgcaccagggccttgttgaacagatccacactgctctaataaagttcccatccttaatgactcacttgtcaactagtggactaattaaccctccaccaaaaaaacacaaagtgcttctgtgagaccaattttgtgctaatgagcattgagactgatgctttgtaagtcacaccacaacaaatattgattgagggcgctgcatgtgctgggtacatttcttggcacttgggaatcagtagtcaagcgaaacccttgcctttgagagtttatggtctggataatataaataaacaagtaagcataaaaaaaaaaaaaaaaa

SEQ ID NO: 3981 - protein, 285 aa, Homo sapiens
MVMRPLWSLLLWEALLPITVTGAQVLSKVGGSVLLVAARPPGFQVREAIWRSLWPSEELLATFFRGSLETLYHSRFLGRAQLHSNLSLELGPLESGDSGNFSVLMVDTRGQPWTQTLQLKVYDAVPRPVVQVFIAVERDAQPSKTCQVFLSCWAPNISEITYSWRRETTMDFGMEPHSLFTDGQVLSISLGPGDRDVAYSCIVSNPVSWDLATVTPWDSCHHEAAPGKASYKDVLLVVVPVSLLLMLVTLFSAWHWCPCSGKKKKDVHADRVGPETENPLVQDLP

SEQ ID NO: 3982 - DNA, 477 bp, Homo sapiens
agtagagacggggtttagtagagacggattactcctgaccacgtgatccgcccacctcggcctcccaaagtgctgggattacaggcgtgacgaccacccccggcctgtattttcagagaggagagcttggtgtttttgtggtgccaagtggtaagataatgtctctttgaggcttcctatggactgcctttattttagtaaactcaagacaccagttaacctcaacagagttttggccttattagaatttgttgtgcatcttattgaaagccaggtttacatcacctcaccccattattctttttagttaaataaatttaccatgccaagtaaccagaatggagcaaattggttgatctttaaggcagtaggtttgactagctagctatcattattgtcacatctaatgctaggcaccagaaaccatttgagccaggagtgtgaatgaataattccagagaccctttagacattttt

SEQ ID NO: 3983 - DNA, 630 bp, Homo sapiens
agatactcctttgatatgttaatgattaagagtggttgcccaggcctagtttcagtggcagaataggatggaattaaaaagcagaactcatctggcttcagcagatgccaccaagaggatacaggtggtcaggtcctggctggctatgtccttgggcctgggcaggcttaggatttgactttcttgaagtacctgatgctgatagattccactaatagtaggaagcaagagacttaactatgagggacgttatgtgaatcttaagtcttaccagtcctgcattagtacattaaatttggatgcttggaagcaaattcatatgatcgtgagtgatttctccaaagaaaaaaagccttgtccagcctgaccaacatggtgaaaccccatctctactaaaaatacaaaaattaactgggtgcagtggtgcgcatgcctgtagtcccagctacttgggaggctgaggcaggagaatgcttgaaccctgggaggcagaggtagcaggagtcgagatcgcgccactgcactccagcctgggtgacagagcaagactccatctcaaaaaaaaaaaaaacaaaccaaaaaaaaacccgtgatgccaattcccaagtcacccgttggtaggaacatcaa

SEQ ID NO: 3984 - DNA, 5538 bp, Homo sapiens
gtgaaggcacccatctggcagggggcagggcgctcttgcaggttccgccgtgcagagaagaagccacaaggaccgagggaggcctgaaggagatgtctaacctgagccgtagaacgtaagaagttgccagcataaagacaggtagctgcaatcaacccaaatcaccctcttgctcagatgcctttgcctccgtcgatgaaaaactgcatccagctggcagcctgcgaggccaccgagctgctgcccatgatccccgacctcccggctgacctattcacctcctgcctcaccacccccatcaagatcgccctgcgctggttttgcatgcagaaatgtgtcagtctggtgcctggcgtcacactggatttgatagaaaagatccctggccgcctgaacgacaggaggacgcccctgggtgaactgaactggatcttcacagccatcacagacaccatcgcgtggaacgtgctcccccgggatctcttccaaaagctcttcagacaggacttgctggtggctagtctgtttcgaaattttttattggcggaaaggattatgaggtcgtataactgcactcccgtcagcagcccgcgtctgccgcccacgtacatgcacgccatgtggcaagcctgggacctggctgttgacatctgtctgtctcagctgccgacgatcatcgaggaaggcactgcgtttcggcacagcccgttcttcgccgagcagctgaccgcattccaggtgtggctcaccatgggcgtggagaaccgaaacccacccgaacagctgcccatcgtcctgcaggtgctgttaagccaagtgcaccggctgagagcattggacttgcttggaagatttttggacctgggtccctgggcagtgagcctggccttgtctgtcggcatcttcccctacgtgctgaagctgctccagagctcggcccgagagctgcggccacttctcgttttcatctgggccaagatcctcgcagtggacagctcgtgccaggcggacctcgtgaaggacaacggccacaagtacttcctgtcggtcctggcggacccctacatgccagctgaacaccggaccatgacggctttcattctcgccgtgatcgtcaacagctatcacacggggcaggaagcctgccttcagggaaacctcattgccatctgcctggagcagctcaacgacccgcaccccttgctgcgccagtgggtggccatctgcctcggcaggatctggcagaacttcgactcggcgaggtggtgcggcgtgagggacagcgctcatgagaagctctacagcctcctctccgaccccattcccgaggtccgctgcgcagcggtcttcgcccttggcacgttcgtgggcaactctgcagagaggacggaccactccaccaccatcgaccacaacgtggccatgatgctggcccagctggtcagcgacgggagccccatggtccggaaggagctggtggtggctctgagtcatcttgtggttcagtatgaaagcaatttctgcaccgtggccctgcagttcatagaagaggaaaagaactacgccttgccttctccagcaaccacagagggagggagtttgaccccagtgcgagacagcccgtgcacccccagacttcgttctgtgagctcctatggaaacatccgtgctgtcgccacagccaggagcctcaacaaatctttgcagaacctgagtttgacagaggaatctggtggcgcggtggcgttctcccccggaaacctcagcaccagcagcagcgccagcagcaccctgggcagccccgagaatgaggagcatatcctgtccttcgagaccatcgacaagatgcgccgcgccagctcctactcctccctcaactccctcatcggagtttcctttaacagtgtttacactcagatttggagagtcctgctgcacctggctgctgacccctatccagaggtctcggacgtggccatgaaagtactcaacagcatcgcctacaaggccaccgtgaacgcccggccgcagcgcgtcctggacacctcctccctcacgcagtcggcccccgccagccccaccaacaagggcgtgcacatccaccaggcggggggctcccctccggcgtccagcaccagcagctccagcctgaccaacgatgtggccaagcagccggtcagccgagacttgccttctggccggccgggcaccacaggccccgctggggcgcagtacacccctcactcccaccagttcccccggacacggaagatgttcgacaagggcccagagcagactgcggacgacgcggacgatgctgctggacacaaaagtttcatctccgccacggtgcagacggggttctgcgactggagcgcccgctattttgcccagcccgtcatgaagatcccagaagagcacgacctggagagtcagatccgcaaggagcgggagtggcggttcctgcgaaacagccgtgtcaggaggcaggcccagcaagtcattcagaagggcattacgagattggacgaccaaatatttctgaacaggaaccccggcgtcccctctgtggtgaaattccaccccttcacgccgtgcatcgctgtagccgacaaggacagcatctgcttttgggactgggagaaaggggagaagctggattatttccacaatgggaaccctcggtacacgagggtcactgccatggagtatctgaatggccaggactgctcgcttctgctgacggccacagacgatggtgccatcagggtctggaagaattttgctgatttggaaaagaacccagagatggtgaccgcgtggcaggggctctcggacatgctgccaacgacgcgaggagctgggatggtggtggactgggagcaggagaccggcctcctcatgagctcaggagacgtgcggatcgtccggatctgggacacagaccgtgagatgaaggtgcaggacatccctacgggcgcagacagctgtgtgacgagtctgtcctgtgattcccaccgctcactcatcgtggctggcctcggtgacggctccatccgcgtctacgacagaaggatggcactcagcgaatgccgcgtcatgacgtaccgggagcacacagcctgggtggtgaaggcctccctgcagaagcgtcccgacggccacatcgtgagtgtgagcgtcaatggagatgtgcgcatctttgatccccggatgcctgagtcggtaaatgtgcttcagatcgtgaaggggctgacggccctggacatccacccccaggcggacctgatcgcatgtggctccgtcaatcagttcaccgccatctacaacagcagcggagagctcatcaacaacatcaagtactacgacggcttcatgggccagcgggtcggcgccatcagctgcctggccttccacccgcactggcctcacctggccgtgggaagcaacgactactacatctccgtgtactcggtggagaagcgtgtcagatagcggcgtgacccgggcccaccaggccacggccgcctgctgtacatagtgaagctgtcactcgccggggcacggggcgtcggctgctgcggccccgcagtgtgaacgttggctgctgccttagctgctgatgacggcaggagggccctgctactcgcttttgtctgtcttcgctgtcgtgtctggaatgtcagggaaggggagggctcgggttgacggtggcttcccactgagcaccagcatccaggtgcacccccgcggccacggcgcctctgtccctctcctgttctgtgtttctctgagacgctgaaaggggaaacacctcactttatttccatgtaatcagagcattagctgcagaaaaacccccagacagagccctggcggagaggcaggcgctggggctcctacgggtccctggggcagctgtccccatcaggccaagagcgagcgagaggcgctgccccagccaggcccaccacctctcacagtcagtgcacgcaagcagggacatttcctagccagctgggggacactggaaattcgggaaaccaagagagaggaagaaggagacgcccctccaactggcgggtgtgaaggaagccgcccaggggtccgggctgtccttggccgctggcagcatcactgagcaggaagcgcacagcccaccctccccgcacctccaggtctctggactccagttttggcccctctcacacagagctgtcagcaggggccgctgtggcggtgcacaggggaggcaggtccttggcgaggtagcccctgccttaatccacggggctcctttccctccgaagggctgctcttccccacaggcgcggggacagcagcccgacctgtggtctccatgcctgtgccctcacacaggtgtagcacacgcatgtgcagatggcaccacggccggcacctgggggcacacacatgcaggcggcgtggtctccctgctctgtccccacacgttcctcacatacaggcaagaggcactgccgggtcccggacggctccgggtgacaccagccccgtctccagccttgagccgcccatgctgatgcgacctcggctgacagctgggcctgtggtgcagacaggagctgtgtggacagtcccgcccaggaggggccgcagggcgtgtatgagcagttttgcaaacagaacacaaccacaatgatggtattttgaaaagtgttctttccgtgttcgtcgggaatcaggattattgagaggtgaaggagccaggtggcttcattctggcggtgagaggcccatgaccacgggagtgagagctggtgtggcgaggcccggctctcctgcggtgtggctggtggcctgccgtggccaagagcatcttctgggtggatggaaccctgcctggtcacatttggccagagacacacctggccctcagggggctgagctggagactgagctggggctggccgggacgtgacaaggcaggacagaggcggcccctccgctgctcctttttggaatgcgagctcccaccagaagaaggttccggcacgaatcccatccccacgtctgggccgagaaagcagcccgggtccggaaggtgtagagagtcccggcctcactcagctcacagggcgtgccaggcggcaacaccagaatcttccagaagcccagctccacccgcacacgcagcttcccatccagtccttcaactcaattcttacccaacacgcgtttccgtttgttttgagacaaaatcaccacctgtcaaaaggcaggtggctccagaggggtcaagacccccccccccgcccccgctccaccctggagcccacccccatgggcactgcgtgccgcctgcacgtgggctgtcttcacaggtctgatgtgaaaattcaatcacgacgttaaccggctcgagagagcgccggcctagaggctcattatctatttattttaccaaacgcgaattgagacggactttgacaaaacacgaaatggtaatgtgaagctaagagcagagagtgaccaacagtaaacaacacgcgcagactc

SEQ ID NO: 3985 - protein, 1119 aa, Homo sapiens
RQVAAINPNHPLAQMPLPPSMKNCIQLAACEATELLPMIPDLPADLFTSCLTTPIKIALRWFCMQKCVSLVPGVTLDLIEKIPGRLNDRRTPLGELNWIFTAITDTIAWNVLPRDLFQKLFRQDLLVASLFRNFLLAERIMRSYNCTPVSSPRLPPTYMHAMWQAWDLAVDICLSQLPTIIEEGTAFRHSPFFAEQLTAFQVWLTMGVENRNPPEQLPIVLQVLLSQVHRLRALDLLGRFLDLGPWAVSLALSVGIFPYVLKLLQSSARELRPLLVFIWAKILAVDSSCQADLVKDNGHKYFLSVLADPYMPAEHRTMTAFILAVIVNSYHTGQEACLQGNLIAICLEQLNDPHPLLRQWVAICLGRIWQNFDSARWCGVRDSAHEKLYSLLSDPIPEVRCAAVFALGTFVGNSAERTDHSTTIDHNVAMMLAQLVSDGSPMVRKELVVALSHLVVQYESNFCTVALQFIEEEKNYALPSPATTEGGSLTPVRDSPCTPRLRSVSSYGNIRAVATARSLNKSLQNLSLTEESGGAVAFSPGNLSTSSSASSTLGSPENEEHILSFETIDKMRRASSYSSLNSLIGVSFNSVYTQIWRVLLHLAADPYPEVSDVAMKVLNSIAYKATVNARPQRVLDTSSLTQSAPASPTNKGVHIHQAGGSPPASSTSSSSLTNDVAKQPVSRDLPSGRPGTTGPAGAQYTPHSHQFPRTRKMFDKGPEQTADDADDAAGHKSFISATVQTGFCDWSARYFAQPVMKIPEEHDLESQIRKEREWRFLRNSRVRRQAQQVIQKGITRLDDQIFLNRNPGVPSVVKFHPFTPCIAVADKDSICFWDWEKGEKLDYFHNGNPRYTRVTAMEYLNGQDCSLLLTATDDGAIRVWKNFADLEKNPEMVTAWQGLSDMLPTTRGAGMVVDWEQETGLLMSSGDVRIVRIWDTDREMKVQDIPTGADSCVTSLSCDSHRSLIVAGLGDGSIRVYDRRMALSECRVMTYREHTAWVVKASLQKRPDGHIVSVSVNGDVRIFDPRMPESVNVLQIVKGLTALDIHPQADLIACGSVNQFTAIYNSSGELINNIKYYDGFMGQRVGAISCLAFHPHWPHLAVGSNDYYISVYSVEKRVR

SEQ ID NO: 3986 - DNA, 5589 bp, Homo sapiens
ggggtcgcgggggacgcgggggacgcgggggacgcgggggacggcggggaacggcggggaacagcgggggacggcggggaacagcgggggacggcggggaacagcaggggactgcgggtcgcgtcctggccgccgaggagctccttcccttaacagagctgagagaggcatctggagctgcagcatggaccagcgagagcccctgcctcccgctcctgcagaaaatgaaatgaaatatgataccaataataatgaagaggaagagggagaacagttcgattttgacagtggagatgaaatcccagaagcggacagacaggccccatccgcccctgagacaggaggtgctggagccagtgaagcccctgcacccacaggaggtgaggatggagctggagcagaaaccaccccagtggcagagcctactaagctggtgctcccgatgaaagtcaacccatattctgtcatcgacatcacgccattccaggaggaccagccgcccacccccgtgcccagcgctgaggaggagaatgtgggtctccatgtgccctgcgggtacttggtgcctgtaccctgcggctatgcggtgccctccaacctgcccctcctgctgcccgcctactccagcccggtcatcatctgcgccacgtccctggacgaagaagaaacaccagaagtcacagaagatcgccagcccaattctctgagttccgaggagcctccaaccagtgaagatcaagtcggtcgagaggacagcgcacttgcccgctgggccgcagacccggccaacacagcctggatggagaatccagaggaagcaatttacgatgacgttccaagggaaaactcagactctgaaccagatgaaatgatttatgatgatgttgagaatggggatgaaggtggaaacagctccttggaatacggatggagttcgagtgaatttgaaagttacgaagagcagagtgactcggagtgcaagaatgggattcccaggtccttcctgcgcagcaaccacaaaaagcaactttctcatgacctaacccgtttaaaggagcactatgagaaaaagatgagagatttgatggcaagcacggtgggcgtggtggagattcagcagctcaggcagaagcatgaactgaagatgcagaagctcgtgaaggccgcgaaggacggcaccaaggacgggctggagaggaccagggcagccgtgaagaggggccgctccttcatcaggaccaagtctctcatcgcacaggatcacagatcttctcttgaggaagaacagaatttgttcattgatgttgactgcaagcacccggaagccatcttgaccccgatgcccgagggtttatctcagcagcaggttgtaagaagatatatactgggttcagttgtcgacagtgaaaagaactacgtagatgctcttaagaggattttggagcaatatgagaagccgctgtctgagatggagccaaaggttctgagtgagaggaagctgaagacggtgttctaccgagtcaaagagatcctgcagtgccactcgctatttcagatcgcgctggccagccgcgtttccgagtgggactccgtggaaatgataggcgatgtcttcgtggcttcgttttctaagtccatggtgctggatgcatacagtgaatatgtgaacaatttcagcacagccgtggcagtcctcaagaaaacatgtgccacaaagcccgcttttcttgaatttttaaagcaggaacaggaggccagccccgatcgaaccacgctctacagcctgatgatgaagcccatccagaggttcccacagttcatcctcctgctccaggacatgctgaagaacacctccaaaggccaccccgacaggctgcctcttcagatggccctgacagagctcgaaacactagcagagaagttaaatgaaagaaagagagatgctgatcaacgctgtgaagtgaagcaaatagccaaagccataaacgaaagatacctgaacaagcttctcagcagtggaagccgatacctcattcgatcagatgatatgatagaaacagtttacaacgacagaggagagattgttaaaaccaaagaacgccgagtcttcatgttaaatgatgtgttaatgtgtgccaccgtcagctcacgcccctctcatgacagccgtgtgatgagcagccagaggtacttgctgaagtggagcgttccactgggacatgtggacgccatcgagtatggcagcagcgcaggcacgggcgagcacagcaggcaccttgccgttcacccgccggagagcctggccgtggttgctaacgcgaaaccaaacaaagtttacatggggccaggacaactgtatcaagatttacaaaacttgttgcatgacttaaatgtaattggccaaatcactcagctgataggaaaccttaaaggaaactatcagaacttaaaccagtcagtagcccatgactggacatcaggtttacaaaggcttattttgaagaaagaagatgaaatcagagctgcggactgctgcagaattcagttacagcttcccgggaagcaggacaaatctgggcgaccgacgttctttacagctgtgttcaatacgttcacccctgccatcaaggagtcctgggtcaacagcttacagatggccaagctcgccctagaagaggagaaccacatgggctggttctgtgtggaagacgatgggaatcacattaaaaaggagaagcatcctctcctcgtcggacacatgcccgtgatggtggccaagcagcaggagttcaagattgaatgtgctgcttataaccctgaaccttacctaaataatgaaagccagccagattcattttccacggcacatggtttcctgtggatcggaagttgcacccatcaaatgggtcagattgccatcgtctcgtttcaaaattccactcccaaagtcattgagtgcttcaacgtggaatctcgcatcctgtgcatgctgtacgttcccgtcgaggagaagcgcagagagcctggggcacccccggaccccgagaccccggccgtgagagcttctgatgtccccacgatctgtgtagggacggaggagggaagcatttccatttataaaagcagtcaaggctccaagaaagtgagacttcagcactttttcactcctgagaagtccacagtcatgagcctggcttgcacgtctcagagcctgtacgctggcctggtcaacggggcagtcgccagctacgccagagccccagatggatcctgggattcagaacctcaaaaagtgatcaagttaggcgtcctaccagttagaagtctactcatgatggaagacacgttgtgggcggcttccggaggtcaagtcttcatcatcagtgtggagactcatgctgtagagggtcagctggaggcccaccaggaggaaggcatggtgatctcccacatggccgtgtccggcgtcgggatctggattgccttcacctcagggtccacgctccgcctttttcacacggaaactctcaagcacctgcaggacatcaacatcgccacccctgttcacaacatgctgccagggcaccagcggctgtcggtgacgagcctgctcgtctgccacggattgctgatggtcggcaccagcctgggagtcctcgtggccctgccggtcccacgtctgcaagggattcccaaagtgaccggaagaggcatggtctcctaccatgcacacaacagtcctgtcaaattcatcgtcctggccacggctctgcacgagaaagacaaggacaaatccagggacagcctggctcctggccccgagcctcaggacgaagaccagaaggacgcacttccgagtggaggagctggttcatctctgagccagggtgaccctgacgcagccatctggttgggagattcgctgggatcgatgactcagaaaagcgacctgtcctcctcatctgggtccctgagcttgtctcacggctccagctctctagagcacagatcagaggacagcaccatctatgatctcctgaaggatcctgtctcgctgagaagcaaagcacgccgggccaagaaagccaaggccagctcggcgctggtggtctgtggagggcagggccaccgccgggtgcacaggaaggcccggcagccccaccaggaagagctggcgccgaccgtcatggtctggcagatccctctgctgaatatataagcaggacggccgccttctgctgtcagaatttgcaatcaagggtgacttctcagctaatcctacagcctgagtggttaagctgtgtctacactggttgggaataaattaaaaacagtatttgggggagaaacgtgcaatagcgtaatggtggtgtccctgccaattccttccttctcttctgtacagcagaagtaattacaagcacttctcacgaaggcagaagactgatgcaattttcgagtaattgagtgcagttctgggaaaataccacattctttttgactgctgtagtccatatatgaatactaaatgttaaacttcatcagcgtcagacctattgtatcatattagagaatttgcagactaagaatttatgagaaaatatatgtattcagtagtgcaggcatttattaacaattcttaaaagttttacctgattcagattcacgacttttatttatattctatatttttgaatttcagagtaaaatttgttaacaattttaaaagccaggtaacacctaccagtccagttagcatgatttgctttcagaagtgagctgggttttccaaagtggtataatgtgtgtactgtatattttaacaaagtaatatttttgtattgcatttttctattaaaaaattaacagttaatgtttcagtcaatgtattatctgtagcatttcacaaataatgtttgctttgaaccaaaatgctcagtgcctatcaacatttggactcaagcatcaacaccaaattattcctcccttctcgtataaatagagtgactatccacaggagaaaagtgtgtgctttagtattagaggagataggcagagaagtcttgcttagttccttcgtgcagcttcttgcccctgttgacgtggaatgctgtgtctgctttagcacgcacgctccgaatgactcctggtgctaggccatgctggctgctgtcactgagcgggactcaggccaagaggcgtgacctcgggccagcctgtctgttgtgcagacgcctcctctgcagaacgcatcagtttctattctgcagttgcagagccagccccgcgtgagaacgtgcataatgagtgcacaccatcatgtcaaggtgcatacttagtgagcgccatcctgctgaacgtgtatttcagtgtttcacttactggacggataacaagaaaaaaatcctaacacaggcagtcaccagaaataaatgtctcagcactttacagatgactaaaaatgttaattttatgacttagccaaatatgttctaggttgcatatatcccccatgtgaaagtgatttcttcccaagcttctcaaactgttagctgctgtctgacttcatcaataaagtatttttatttt

SEQ ID NO: 3987 - protein, 1405 aa, Homo sapiens
GSRGTRGTRGTRGTAGNGGEQRGTAGNSGGRRGTAGDCGSRPGRRGAPSLNRAERGIWSCSMDQREPLPPAPAENEMKYDTNNNEEEEGEQFDFDSGDEIPEADRQAPSAPETGGAGASEAPAPTGGEDGAGAETTPVAEPTKLVLPMKVNPYSVIDITPFQEDQPPTPVPSAEEENVGLHVPCGYLVPVPCGYAVPSNLPLLLPAYSSPVIICATSLDEEETPEVTEDRQPNSLSSEEPPTSEDQVGREDSALARWAADPANTAWMENPEEAIYDDVPRENSDSEPDEMIYDDVENGDEGGNSSLEYGWSSSEFESYEEQSDSECKNGIPRSFLRSNHKKQLSHDLTRLKEHYEKKMRDLMASTVGVVEIQQLRQKHELKMQKLVKAAKDGTKDGLERTRAAVKRGRSFIRTKSLIAQDHRSSLEEEQNLFIDVDCKHPEAILTPMPEGLSQQQVVRRYILGSVVDSEKNYVDALKRILEQYEKPLSEMEPKVLSERKLKTVFYRVKEILQCHSLFQIALASRVSEWDSVEMIGDVFVASFSKSMVLDAYSEYVNNFSTAVAVLKKTCATKPAFLEFLKQEQEASPDRTTLYSLMMKPIQRFPQFILLLQDMLKNTSKGHPDRLPLQMALTELETLAEKLNERKRDADQRCEVKQIAKAINERYLNKLLSSGSRYLIRSDDMIETVYNDRGEIVKTKERRVFMLNDVLMCATVSSRPSHDSRVMSSQRYLLKWSVPLGHVDAIEYGSSAGTGEHSRHLAVHPPESLAVVANAKPNKVYMGPGQLYQDLQNLLHDLNVIGQITQLIGNLKGNYQNLNQSVAHDWTSGLQRLILKKEDEIRAADCCRIQLQLPGKQDKSGRPTFFTAVFNTFTPAIKESWVNSLQMAKLALEEENHMGWFCVEDDGNHIKKEKHPLLVGHMPVMVAKQQEFKIECAAYNPEPYLNNESQPDSFSTAHGFLWIGSCTHQMGQIAIVSFQNSTPKVIECFNVESRILCMLYVPVEEKRREPGAPPDPETPAVRASDVPTICVGTEEGSISIYKSSQGSKKVRLQHFFTPEKSTVMSLACTSQSLYAGLVNGAVASYARAPDGSWDSEPQKVIKLGVLPVRSLLMMEDTLWAASGGQVFIISVETHAVEGQLEAHQEEGMVISHMAVSGVGIWIAFTSGSTLRLFHTETLKHLQDINIATPVHNMLPGHQRLSVTSLLVCHGLLMVGTSLGVLVALPVPRLQGIPKVTGRGMVSYHAHNSPVKFIVLATALHEKDKDKSRDSLAPGPEPQDEDQKDALPSGGAGSSLSQGDPDAAIWLGDSLGSMTQKSDLSSSSGSLSLSHGSSSLEHRSEDSTIYDLLKDPVSLRSKARRAKKAKASSALVVCGGQGHRRVHRKARQPHQEELAPTVMVWQIPLLNI

SEQ ID NO: 3988 - DNA, 298 bp, Homo sapiens
ggtcttcaccatttccaatattgggagaacatgccaggagagatttttctatccaccactggagatattattattcaggatgatggaactgtagattgcagaatgatcaaaaccagtttgtaactgaaaccaggtgagaaaatgagcattcaagggagtggaggacggagaaaaaacagaatggacgcttgattgaggcttgagaaaatggtggcataagtggagccgagcttttcagcctcagcaatgctgacattttgcgatgcctcattcttcattttcaagggctgtctcatgc

SEQ ID NO: 3989 - DNA, 648 bp, Homo sapiens
acgaggcgccgcgttggcgcttggacggcgggaaccggctccggagcgagaacgcgcgtgagagagcccgagagagacggagagcgagcgagcgcgcgggagagactgagagcgggggggtgggagagagacttccagagagacagagcgagaggccgagacggaggctgtccctagcacaggccagggtgtcttgggactcgaatccctgggttgggctggccgggagtggggctttcgaaggaagcgggtgattttccacgtcgtccatatctccccggtgtgggaatggcggtcgtgcactctgggggtggcgttgttctcgttccctacttgggggtggcctttttcagcggagaaagaggatgccgcgggcattggtagccggcgggactacacttgggctaggatcagtgttcagcgggttcagaaatcaccgtgtccttggcatcacctccctccccactcctctcccatcgcacagcaggagacagtgactggagggttttcaaggaggactgcattgccccttattgaaacaaaccgtccgacaaaacctttctccgacgtgtgacagaggaccggtccgtaatgtgacatacgactagacatgcgtttaatgggcgggtgaattgctgggttctgggc

SEQ ID NO: 3990 - DNA, 618 bp, Homo sapiens
aagctcggggccgcgtcaatgtcgcacggtagcctgggcatcgtccgcaccacgtgcagcagcggcagcgcgctcggacccggggccggcgcggcccagcccagcgcgagccccttggaggggctgctggacctcagactacccccgcacccacgcggccctgctgaaagtggcgcaaatggtcaccctgctgattgccttcatctgtgtgcggagctccctgtggaccaatctacagcgcctacagctactttgaagtggtcaccatttgcgacttgataatgatcctcgcctttttacctggtccacctcttccgcttctaccgcgtgctcacctgtatcagctggcccctgtcggaacttctgcactatttaatcggtaccctgctcctcctcatcgcctccattgtggcagcttccaagagttacaaccagagcggactggtagccggagcgatctttggtttcatggccaccttcctctgcatggcaagcatatggctgtcctataagatctcgtgtgtacccagtccacagatgcagccgtctgatgaggccacaacccctaggcccctcaggagctttgcagagaggaggacgtgtactccaggcgaggcc

SEQ ID NO: 3991 - DNA, 863 bp, Homo sapiens
gacgagtatacacaaagtacatcttcttaaaactcgtctaaagaaaaaaatataattctgtaagcagcagtcagcagcttccaaggttctgatgtgacgggaggggcagctcccaggagcaaccgtgaagtgggggggtccaggcctgagccccaggtagtgtcgacctgggaaggggcctctgtggagggccccggctcttggtggacacagcaccacgacacatcagggtctgtcagcaatcacagatcacatgtgtccacgggacaggcgtgtcgagggagatgctatcgcgatccatcaagacaagggatgcgcgccggttggtcatgggtgggatggcgggcttctggaagttgtcgtgtcaaggggccttatgcccggaggcgggaaggatatggggcttctgcaagtgtacccagggagccatttcatacagagggctgaaaaaacgggaggggtagtgggcccctcgtagaggggaactctgggggagggggtggtagggcgagggcgtcgcgttgttgcccccgttcccgttcccccagagaaggcccaagggggccatagtggctaaaggcgcggttctaaggggcgtcccaaacttaggcgtaggggttccccgcgaaagttgggcgcgcggcccccgtggggcattcgcgcgtggggcacaaaatctcgcgagggccccacggggtcgggcatgggacctgcaggggaagaagaacgcaaaagcctggagtagaagtgtgagttccctcggggaacggtgcgttcaagcgcgaggcgtggatggcacgagccaaaaggcacagaggagcggcctaggggggacgggcgggaacggggggcaggtcacacgg

SEQ ID NO: 3992 - DNA, 483 bp, Homo sapiens
ctttgagcattttttccaaatcttccaactgtcctttctgttttaataactgattgtaacggtcttcaaggtctctatgttccacctcaagatttttgtgggcagacttcagagttccatgtttagagataagagattcatactctgaagcctgacgttcatgaagaagttccagcttttcatgatctttgatcagagaatcatagagagattttaggtcttctcgctctttgattacagattcattttcattttctaaggaagactgctggattaggagttgggcattctggttcatgagtgaggtactttgggaattaagggtggaattttccccctgaagcttggcattctgtgtttgaagagtggtattctgttcttgtaatgacactgtctgcctctgaagtgcaagaatctgagcctgcaaattattgttctgtgtctcaagttgcttcagttgagttttcaacgcttgcttctctg

SEQ ID NO: 3993 - DNA, 403 bp, Homo sapiens
cacggcccgggggacccaggcgtcccgctcctcgccgggagcgccccttcccccgagtggcgccccagccgtggcagccttagccccgtgggccccacggagtgagcggcatgcagcacccccgggcctgtccagtgtcctctggcctgctgccctgcacccccagaaggccctgacgccctggggcacttctgctctgcacaggaccacgcgggggtttgccatggtgacataaaggggcgcggaggaaggaaggagcgtgaccagcctgtggactgcgcccctggctgggaggaaggactgggggcccagatcctccactcccagtgccccacaagggcgtcgcttcctaagtctctgtgaatttgttggtcagtggacgattctcgtgtctcctcctgtg

SEQ ID NO: 3994 - DNA, 168 bp, Homo sapiens
  misc_feature (38)..(39): n is a, c, g, or t
  misc_feature (41)..(41): n is a, c, g, or t
  misc_feature (58)..(58): n is a, c, g, or t
  misc_feature (83)..(83): n is a, c, g, or t
  misc_feature (92)..(92): n is a, c, g, or t
  misc_feature (107)..(107): n is a, c, g, or t
aaaatatatataatatatattacatgtatagcatgtanngnggggccccacagcttgngtcagagaaagctaacagaaaggcncatatgggnggcatgtcttttcanacaatattcagttaagccaacattcaggccatggcaagtgacagttaggacaaggacaata

SEQ ID NO: 3995 - DNA, 464 bp, Homo sapiens
ttgacatgtaagaagtggttttattccaggtgtgtgtttcataaagacgaggtcctcaaggacagctagtggcacatgctttggtcaagaagaggaaaagcaaaaacagaacagggctgcgttgccacaaaggaccggctgataagtgcagagcctgatctgaccacagcaaaggacagagagaccctcttgaaggccctctggtcagcagtcctcttacattcaacaggcgcagcccctgctccccagccccaaaggtccatgcccgagtgtggcccaggccttctagtccatcctctggggagaggcctttgccctgggcccagttctgtcctaagctgtggcaggaggcttcccagatgaacaggggatctgaggctgcacctggctgcggaagaaacatcacgacagaggacaggcaaagcatggccctgggagcgaaggggcctgcgctggcaagtcca

SEQ ID NO: 3996 - DNA, 366 bp, Homo sapiens
aagcagttccccagccccagtctggaggagctctctgggcccccctgcaccactcgacaggggagagaacctgtactatgagatcggggcaagtgaggggtccccctattctggccccacccgctcctggagtccctttcgctccatgccccccgacaggctcaatgcctcctacgggatgcttggccaatcacccccactccacaaggtcccccggacttcctgctcaactacccgccaaccccctcctgctttccccctgaccaccttgggctactcagccccccagcaccctgctcggggccctacaaccgcctgagcccctctacgtcaacctagctctagggcccaggggtccctcacctg

SEQ ID NO: 3997 - DNA, 5287 bp, Homo sapiens
ctgattttccaccctaaggaggaggacaaggtcctcgcctacacaaaggagagcaagctctacgtgtcatctgacttggggaaaaagtggacacttctgcaagagcgagtgaccaaagaccacgtgttctggtctgtgtctggggtggacgctgaccctgacttggtccacgtggaagcccaagacctcggtggagattttcggtacgtcacctgcgcaatccacaattgctccgagaagatgctgacagccccattcgcaggccccattgaccacgggtctctgaccgtgcaggacgattacatcttctttaaggcaacatcagcaaaccagacaaaatactacgtctcttatcgtcgaaatgaatttgtcctgatgaagctgccgaagtatgcattgccaaaggatctgcagatcatcagcacggacgagagtcaggtgttcgtggcggtgcaggagtggtaccagatggacacctacaacctgtaccagtcggacccacggggcgtgcgctacgcgctggtgctgcaggacgtgcgcagctcacggcaggcggaggagagcgtgctcatcgacatcctggaggtcagaggggtgaaaggagtcttcctggcaaaccaaaaaattgatgggaaagtgatgacgcttataacctacaacaagggccgcgactgggattacctgaggccacccagcatggacatgaatggaaaaccaaccaactgcaagcctccagactgccacctgcacctgcacctgcgctgggcagacaacccctacgtatcaggcaccgtgcacaccaaggacaccgccccaggcctcatcatgggtgcaggtaacctgggctcacagctggtggaatataaagaagaaatgtacatcacgtcagactgtggtcacacctggcggcaggtgtttgaggaagagcatcacatcctgtacctggaccacggcggcgtgatcgtggccatcaaagacacctccatccctttgaagatcctcaagttcagtgtggacgagggcctcacctggagcacgcacaacttcaccagcacctcggtgtttgtggacgggctgctgagtgagccaggggacgagacgctggtcatgacggtctttggccacatcagcttccgctccgactgggagctggtcaaggtggacttccggccctcattctccaggcagtgcggcgaggaggactacagctcctgggagctctccaacctgcagggcgaccgctgtatcatgggccagcagagaagtttccggaaaagaaagtccacgtcctggtgcatcaaggggaggagcttcacgtcggcgctcacgtcccgcgtgtgcgagtgccgggactcggacttcctgtgcgactacggatttgagcgctccccctcctcagagtccagcaccaacaagtgctctgccaacttctggtttaacccattgtccccgcctgacgactgtgccctaggccagacctacaccagcagccttgggtaccggaaagtggtgtccaacgtgtgtgagggtggggtggacatgcagcagagtcaggtgcagctgcagtgccccctcacgccgccccggggcctgcaggtcagcattcaaggcgaggcggtggccgtgcggcctggagaggacgtcctgtttgtggtgcggcaggagcagggtgatgtcctgactaccaagtaccaggtagaccttggggacggcttcaaggccatgtacgtgaaccttacactgaccggggagcccatccggcaccgctacgagagccccggcatctaccgcgtgtccgtcagggcagagaacacggcaggccacgatgaggcggtgctctttgtccaggtcaactcccccctgcaggccctctacctggaggtggttcctgtcattggcctcaaccaggaggtgaacctcacagctgtgctgcttcccttgaaccctaacctcaccgtcttctactggtggatcggccacagcctgcagcccctcctttccctggataattctgtgacaacgcggttttcggacacgggcgacgtgcgtgtgacggtgcaggccgcctgtgggaactcggtgctgcaggactccagggtcctccgtgtgctggatcaatttcaagtcatgcctctgcagttttccaaggagctggatgcctacaaccccaacacccctgagtggagggaagacgtgggcctggtggtcacccggctgctctccaaggagaccagcgtccctcaggagcttctggtgactgtggtgaagccggggctgcccactttggccgatctgtacgtgctcctgccccctcccaggcccacaaggaagaggagcctctcgagtgataagaggctcgccgccatccagcaggtgctgaacgcacagaagatcagcttcctcctgcgaggcggagtccgggtcctggtggccctgcgggacacaggcacaggtgctgagcagctgggcggcggtggcggctactgggcggtagtggtgctgtttgtcatcgggctcttcgcagcgggagccttcatcctctacaagttcaaaaggaaacggccaggcaggaccgtgtacgcccaaatgcacaacgagaaggagcaggagatgaccagccctgtgagtcacagtgaggacgtccagggcgctgtccagggcaaccactcaggcgtggtcctgagcatcaactcccgagagatgcacagctacctggtgagctgatgccaccccagcatctgtcttttcacccacggagggcacagaaccaccagcaaagccggcggctggactggcgcccctcagagacctgcggaaagccccctccctgagtcgtcgccacaccaggcgacaggcaccaccccctctgataaatccaagcccgcccaggcccacggggggcccacgggaccccccgggactccccggacatggccctgcccctatgggacaccaggcctgactcaggcaggttctgccccccagaccccacacacggccgccccacgtgctgtcgctcagcccgaggcctgacttctctgggctgaggctggtcgtcctggagccctcccagtacctcgggctgcaagagctgcagacccgttcagacactgcgttgcgggctccttccccgcagaggccggggcctccctgactttgcttcttcactcccacctgtgcggccacccagtccctctgtgggagcccgggtgccaggccctcccaacaccacaccaccctccaggcccccctgccctccggctggaaactgcagctctgtaaatgcctctctaggtagctgctggcggtggtgggggtgtctcactctctgtctttatagccggcggtagccaccggggtggctctgtcagagttccgtactcgggagcccctttccctgagtgcccagggtgtctcctctgcccagaggggcagcagctctccctggttctccccagggcagacggggtagggcgggctcaggacccagtgcccatggttcctcactcctaccagcaagcagcaccatcccgcaggcttctcccacctgatggctgttctcccaccgggtctgggctctggaaggagccagatgcccccagaaaggtgggtggtggagacggcaccagatgtaccagttttctgcagttccttataggcgaagggaaccgggtggaaaccaagctgggagaggctgaggatggcagggctggaagggccatcagcgtgaccctcattttcaagaaggggaaactgaggcccagggaggagagtaactgaaggtcacagcacggtcacagcagaggtggccgaacccagccctctgcgcgccagtgctgtgcggtctccacacccttacggtttcctagaatcagggatgttagtgtaagtctataggaatataggggggtgggggggtcaccttttgccttgaaatgggaagtcagtagccccttcctcctcctccctcctccccctcctctctggcagggatctcagatgaccgtggcctcccgctcagagggggagaacgccagagccctggctggtgatgtgctggctgggggtgaatcccaatgagggtccctctcagagcgggagaacgccagagccctggatggtgatgcgctggctgggggtgaatcccaatgagggtccctctcagaaagggagaacgccagagccctggctggtgacatgctggctgggggtgaatccgaatgacagtgcagacgttctcccatccaccatgtctgagcttgggggaattgcctcatttcccctggaaaagaaacatggtccattagaggggaaagcccaggggtgaatcttcacgccccaaacagtgcccggtggggaggaggcacccgctccttattgagtaaaaccacccatggagactggaacctcatctccctgggtcggggggtgttcaaggccacaggacaaggggagcaccctgggccacacaggcgtggaggtgtccccaccccttccacctgtcccccagacccaaagctctctccccaccctacctgcccacctggggctcctgtgccccctccccactccagaggccaccctacaagttgtcctcaaggtcatcctggagatgggatccaggacgtggggccatgactctctgggaccttgccacagcccccattcccctgcttgcagtctgcaaggacacctttgcagggattcttgtcctgctggccaccccacccacacctgtccctggccagcaggccgcctgcaagcgtcaggcacacaggaacagacatggcgagcacagtgcaggcccggggcccacgggcaacatggaaccctgggaactgccctcccccttagctcacagtgcctgcggtagccactctaggtcgttggccttccttgaccactccatttaattctctctgctgtttgggttgggtttttccccttagttatctgtgggtttcctgtattttatgttaatatttctattaagaacatgttgggcatgtggacccaagcacctgggaaggaggtggcatctgagacagcctgatacgttcccgtctgtgcacccatggagatccaggcgtgggcccgtggctgtccctggttgtaaattcgagggtctgcatatctgatgttcaggtagacctgggcgcctgggaacgaggccatcagctgccatgcacataacaaagagacaatgcattccttcttatttttcctttttaaaaatcgatgaatcatttgtgatgcttttaacaaagattaaatgaatttgatcagc

SEQ ID NO: 3998 - protein, 907 aa, Homo sapiens
LIFHPKEEDKVLAYTKESKLYVSSDLGKKWTLLQERVTKDHVFWSVSGVDADPDLVHVEAQDLGGDFRYVTCAIHNCSEKMLTAPFAGPIDHGSLTVQDDYIFFKATSANQTKYYVSYRRNEFVLMKLPKYALPKDLQIISTDESQVFVAVQEWYQMDTYNLYQSDPRGVRYALVLQDVRSSRQAEESVLIDILEVRGVKGVFLANQKIDGKVMTLITYNKGRDWDYLRPPSMDMNGKPTNCKPPDCHLHLHLRWADNPYVSGTVHTKDTAPGLIMGAGNLGSQLVEYKEEMYITSDCGHTWRQVFEEEHHILYLDHGGVIVAIKDTSIPLKILKFSVDEGLTWSTHNFTSTSVFVDGLLSEPGDETLVMTVFGHISFRSDWELVKVDFRPSFSRQCGEEDYSSWELSNLQGDRCIMGQQRSFRKRKSTSWCIKGRSFTSALTSRVCECRDSDFLCDYGFERSPSSESSTNKCSANFWFNPLSPPDDCALGQTYTSSLGYRKVVSNVCEGGVDMQQSQVQLQCPLTPPRGLQVSIQGEAVAVRPGEDVLFVVRQEQGDVLTTKYQVDLGDGFKAMYVNLTLTGEPIRHRYESPGIYRVSVRAENTAGHDEAVLFVQVNSPLQALYLEVVPVIGLNQEVNLTAVLLPLNPNLTVFYWWIGHSLQPLLSLDNSVTTRFSDTGDVRVTVQAACGNSVLQDSRVLRVLDQFQVMPLQFSKELDAYNPNTPEWREDVGLVVTRLLSKETSVPQELLVTVVKPGLPTLADLYVLLPPPRPTRKRSLSSDKRLAAIQQVLNAQKISFLLRGGVRVLVALRDTGTGAEQLGGGGGYWAVVVLFVIGLFAAGAFILYKFKRKRPGRTVYAQMHNEKEQEMTSPVSHSEDVQGAVQGNHSGVVLSINSREMHSYLVS

SEQ ID NO: 3999 - DNA, 131239 bp, Homo sapiens
gatctatatactgtaaggcaagaacgtttccatttaaaacgttccttgcagtaaggcccagtggctcacgcctgtaatcacagcactttgggaggctgaggtgggcagattacttgaggccaggagttcgagaccaacctggccaacatggtgaaacctcacttctactaaaaatagagaaattagccaggtgtagtggtgctcacctgtgatcccagctacttgggaggctaaggcatgagaatcacttgaacctgggaggcagagattgcagtgagttgagatcatgccactgtgctccaacctgggcaacagagtgagactgtctcaaaaaatgacaagaaaaagaagaaaaagtaaattgttccctgctggcaaactattgagggtctgaactagacgacactgtcctaaaacctatgtattacacagaagttcaattgatttagggatctgtaaaaacaaatagcattgacaatttttacctaacacagatgttttaatcaatggtgtgtatgtgtcttgatgcacaattaaccacaaatgtctccagaagatacatgctatttcaatgtgcacatggggagtatctctagaataaggacctgaaaaagtcctattgttcttcatcttgttaaaaacttcaattctggcactttatgcattcatagtagaattgagaatcgtgatatagctatgctgataattcaagttaaaaacacattttctttgattatctagatgttgcaggcaaatgtaagaacttattagcatgaattattatccagagaattggctcaattttccatttcactttgctcatgtaagcatggtctaaatcattaagtgagaaatattcttagcaatgaactgcatttaaaactctggtaaaaagtcatttttatctaatggccaaatgtaacaaatataataacagcgatttcttatacttatagggttgacactggtgagatgtcaccatcaagggatttgatggagattataaaatttagaactcatgggtcctagttcagtgttctttccactactgcaaggttcttttttttttttttttttttgagacagggagtgcagtggtgccatcaaaattcattgcagcctcggccttctgggctcaagtgatcctcctacctcagcctcccaagtagctgggactacaggcacataacaccactcctggctaattttttaaaattaattttttgtagacatggggtctcactttgttgcccaggctgtacttcaggggttcttagccttttatatgccatgagcctccctaggaattggcagaagcatttggacaccttcttagaaaaatgttttcaaatgtatttctaaaacatcatgggattatacagaaaaccaattatattcaaatgtaattatcaaaatattttaaaatttgtgacactgtcgtacctgtgcctctttattaacatattaaatatcaagaaacagtagcaattctaataaatgtcataatttcaaagtagtgacaagtataaacaataattcaaggtgtttacaacaattgtgacatgcaaataactgtgatttctgttggtaacaaagtcactgatattgctacatataagacattgggagttaccagtaaccagtaatccaaacaggatgtggcattagagttttgaattgagataattatttaattaattaactaatttttttgagacagagtctcactctgttgcccaggctggagtgcagtggcatgatgttgggttactgcagcctcagcctcccaggttcaagggcttctcctgcctcagcctccagagtagctgggattacaggcatgtgccaccatgaccagctaatttttgtattcttactagagacagggtttcacctggtctcgaactcctggcctcaggtgatccccctgccttggcctaccaaagtgctgggattacaggtgtgagccactgcccctggccgagataattatttaatcagttgttgggttcttatgaatgagactaagaccttggagtagctcgacattaaaccaggtgcaggggcagaggggtgctgtcatcgaaaggtctaaaacccaatctgagttatatgcatcccagagccaggaaagctctataagttatattgcaatgacattcattcattcaacaattaccttctgggaaccaggaactgagtggacacttcctcagcaacttggtcctatcttctgatattcgaaagccagtcatcaaaaatccagagatcaatgggaaacaaaattgcattaattcgagaaaaagctattcctcttgattggattgggtttcaagacaggaacatatatcttacatcttgccattcccctggttctctcagtaatcttggcccattcccttttgtgtgtgtgtgccaaaatatttttatagactttatgtttttagaacagttttaagttgacagaaaaattgagaagataatacagagggttctcttaccccctacactcaattttccttattattattatcttacattagtatggtacatttgttacacttaatgaactaatatttatacattatgattaaagtccttactttatccagattttttagttttcgccgaatgtctttttttctgtcccagggatgctacattgctgtcgtcctgcctccttagactcttagacttgtcttgactgtgacaatttctcagattttccttgttttttttgaccttgactgtttgaaggaggactggtcaggtattttgtagaatgtctctcaattgggatttgtgtgacgtttttgtcatgattagactgaagttatgggttttggggaggactatcgcagaagtaagtttctattttcaagacctcatatcaaggatacaagctatcaacttgagtgtggatgatgaccttaagttatcactgttgatgatcaagtgactaaggtagtgtttgtctggaccccctgcaaattcactttttacatttatgtaattaactattaaagagaaaataattctcactacacatgataacctcgtcctttacagaatcataggtctagaagagattttgacagattagttggtccagtctcttgtccctgtattcaagccaccctgcacagatgagtttgtggtaggcctatttttaaagatagaaagtggctgggcatggtagctcatgcctgtaatcttaacactttgggaggctgaggcaggcagatcactcgagcccaggagtttgagaccagtgtgggcaacatagtgaaaccccgtctctacaaaaaatacaaaaattggccgggtgaggtggagtgtaactgtggtcctagatactcaggagactgaagcgggaggatgacctgagcccaggaggtcaagtctgcgatgagctgtgattgagccactgcactccagcctgggtgacagtgagactctgtctcaaaataataataataaatatagaaagggaaagggactccacagtgaaagaattctgaactcttgacaaatgaggttctctggctcaatcaatcaataaatatgcaatgtagagtgttggaaccatatgcaagctgcttagatatatgtgtaactccaaggcacttataccatcttaaatcatttctgaaacaaggtggtgtatgagtgaagatacaaataattgaaaaaaaggcagtataacacagtgggaatcagtacgaaaaacagtgcggttataaacacagtttttggattcataatgtctaaatttacattccaggtccactgaatgaaggcatgccactttagataagtcactaaggcctttctaagcctcagtctccttagctataaaatggggataatcgtacccattattaaaagttgtgcaagtcaaataacatatcaaaagcatctggcacatagtaggtcctcaatacattgtagctattgttattaaacagggaataattatatgaccctgtaatcattatattacatggtatcataatagttacatggcactgtaaattaaatggagtgtgttttaggagggctttctgctgaaggagtacacactgtggatctttctccttagttttcttcctgcttcccagcttcctccactccctactttcttccttgtttggtctcggatttcattacctcctccctgttctcttagtggctgatgccttcaaaccattccccactgccaagcccttttgttacactggcatttgtcaagcagctgagtttcttagtgactgataagaaccacttctcccccaggtagtcagggagaggcagcgagctggcaagagtggagaaaatgtttctgtgtacaggacttggattcctgcgtttgtttgttttgttttaagtggttgctttgctgatcctattactgtaaagggtaatgatatttgggaatgaaagtctatgaataagtaatgataatagaagtaagacccagaactgtgggatagaaagctgtgttaaaaatagtctgtcattttccactctgcctactaagccttttcctagactgaaagacacagatcacgcttccacgagctgagccaacacagcatggcaggagtaaatccacaacccaaagaaaaccgtactcctgagcaaagcaactttctgctgtggtcaaagctcatccactgggtttctctgatggaggcaatgaaacttttcccctcaaagcctggtaacctgagttaaaaatgtaaaatgtattgatttgagagtggaaactacaaaatgagaacacgttaggctttgctctgagaactttatggttcttgagacagttattcttagttatttgattcaattaaaatgcagatgtaagcaaggtgaaccataaggaaatatgataagagactttagctcaggatgaaagtgtaaaccatagcatcagaggcatcatgcataccattatctagaaggctggtcaaactgaggtcctgcagcagcctcagcacaaatggctgccaaacctcgattctagtgaactaagagaaaacagacagtgaggcaagcaaggactttgtactcagaatattctgcagttcaggaagtccagatcctaggagtgcaagccaagacattacaaccgatgtgaggaattgctctggtgccaatcgtggcctcagatttatcgctttaatggctaaggtcacaggctaaggcattctccagattctgctgttgaatacagacactaccgcccctcctgtctccccaccatcaaacacaaggagtctggtagggcagaactgcacaaatgggaaacacccatcaaatgcagcaggaatattaacttcactaggaagcctttgtatgccattactttagaaaggattccttgttagtcctaccattaaacaattaaattgtcagagatgaattctgtgcatgtgtgtgcagagcttgcctgtgtgtgcaggatgtgtaatttcccactcaggtgatgtctgctgcaggttgtctttctctctctttctctctctctctctctctctctctgtccctttcccaccccaattgtgtgcttttccctttacattgttgaaaataaatacatcttcctgatggtataagcttttattatgaactttgatatgcctacacattctatactacacagaaagtagtaatataaaatgaaatgttcaaaaattaatttgtctccaggtatttctctgccagaacatgattccttagttcccctctcctgacactagttattgatacagtcggtttactctacatgcattctaaacatggatgttatatcaaaaaactctaaaccaagtcaaggctaatgcctacaaacaggaagaatgatgagcaaatgctgtgtcccttatattttcatcctaattaggaatttatgccttcataatactggcttacttattctagttctctattgtaaaatgtctgacctaggaaaatcaatgcttgtgacaagtacacatatttcacttaaacccagtaataattattttagtcaagaaaaagcacactacctaaaataaatttaattatatttaattcatataattagggccacacttaaatctctatactttcttatatagctcacatttttacttaattggaatatattcttgccctcgtcaattaccaaaacttttctttgaggtttcataatcttttaaaaatgctaaaaacaaaatagactagctatacactaagatgaaaagacttttagaaattccatatgtataaagtgaaggggccaggtgcagtggctcacatctgtaatcccaattctttgggagtccaagagggtaggattacttgaggccaggagtttaaggttacaatgagctgtgatcccacagttacattccagcccaggtgacagagtgagaccctgtctctaaaaaaattaaaataattaataactaataatttaaaaaaataaggtgaagagtaagcttaagaaaatactccaatatctgcaaatcctccagctcctaagaaaaccatgttggattaattctctatgtgccggtgcaactattagtcacttaataaatgctccttgattgtgatgacatcgcagcatcacgaatatatcccgtgaacgaatattaagcctcataaaatgtttagcctatcttttttataacaatgtacagaaggggcaaatagagaaggaaaggagtcttgaaatcagattatgagtagcttcagtttctctccagactgcctgttttttggatctcgttttctttggcttatgatacggtttgaatatgccccctctgaatcttatgatgaaatgcgactctcaatgttgggagtggggcagattcctcactaatgacttggtgccatcctcatggtaaagagtgagttctcagtctgtgaattcatgtgagagctagttatttacaagagcctggcacccctcccctctctcgtttcctttctctctatgtgatacagtttcctcctttgccttctaccatgattgtaagctccctgaggccctcaccagaagcagatgttggcaccatgcttcttgtatagcctgcagaactgtgagccaaataaacctctcttcttcataagtttacccagccacaggtatcctttcatagcaacacaaacagacaaacacagcttatatctgttagatgttagaatgacatctctttacaaataattggtatgggccaggtgtggtggctcatacctgtaatcccagcactttggaccagcactttgggagcgggaggatcactggaagccaggagtttgagaccagcctgggaaaccaagcaagacctccatctttacaaaaaataaaaaaatagccaggagttgtggtgtgtgtgtgtgtagtcccagctactcaggaggctgaggtgggaggattgcttgagccaaggagttcaaagctgcagtgagttttgctcactctattgcactccaacctgggcaatagagtgacaccctatttctattttttttcaattaaaaaaggattgatatgtttactgaaaccactcctatctatttactgatataggttttccaaaatattaccttgagcaagggactctctctctatacatatgcatacatatataaatatatagtgacttccattcagaaataatactcattagcttgtattacgtctgaaatcatgtcattagttattaattgctttgattaaagtttttgtagcattatgagactcctattaaaatacaaatgtccctgagagagataacactccaagctcactgtcagtgatttacaacttttcaggaattattgcaggattatttatgaaatatcaaatctctttccatctgtgatggcaaataagtaaattcagccacatgaggaagtccagcacataactacttctgtgtcatgatatcagggcagttagaagggactgcctgctacccaaactccaccatcccttctcaaattttttattttaaattttagccaaaagggtctttgtatactattaaacacagatattcctgaaacaagtcacacattaagcccaaaatgttatttttttcatctctgagcaaatgtatttatcagattcttgaagatgctgactgaaaccctttactgtttaattctctgaaatgtcttcagtaattttatgaagtcctaaaacttcaacctttatgtttattgaaataatcacaattttttgtaatttgctctcatattatgtccacacctagactggaatattcagctaactagtggacatccctgtctacacttcatactcaaaatacccagaaccaacacatgctattctcttcatacctgcttctcatttgttacaggtttccttagccacacagtagtagtaacgtcactcaagtagtaatgtcggagtcatctttccttcttctcttccccacagtcagtgattacatcctgaggattccaactcagtgataccttgcacttgaaggggctctcattcagaggccccctatctcatgcagaccttcacttttcctccctagactgccaaaagagcttcttactcacaattcccagcaccgctccccactgcacgttactcttcctaaagcttagcttcaatcatatcattctccagtttgaaaactgtaatgtttcccattgcttattaaattcagatcaaactcatcttgcttttcagtgtatattatgatacactgaattatgtatattcgtaatacaatattaatagcataatatattatcatacactgtattatgtaatatacactgtattatcatacacaatattatgatacactatattatgatacacttttactttcatgtacccactagtaaaaccggaacactcactcctctcaaagattccctttgctttccagcctacgtgcctttcctcaaattgtttcctccacatttcactcattccccatttccagccattgagagctacctatcttcaaggtcaacttcaggttttactttcttcactacgtctttctggctttcccagctggatgtgatcgtctcatcgtggaactcccatggccactgctgtgccccgacttactaaatagtgccatcatgcctatgcttgccttatgctactcactgtattgacaatccataagtctaggaatagtgtcttattaatctctacttcacctgcagtgcctagatctattcttgcatgtaaaatgcacttaattattgaagtatttttgaatgagttttgaaggaggataagaaagaaagtggaggaactctgaaagggtagctatgccaagaaatgatatcctaggctcctggagagcaattttacacactttattatcttgtataagactgtagcttagcacaagcatcttggcaatgaagaaaatctgtgttgggggcaaggcaggctggtccagagcaccagcatccacatggataaaatctagtactgggactctcaggcagggagggcagcatgaaaccactgggtcccgggaatcttggtagtatcttcaggtcctggaaagctgcagggcagatggcagctctaggccagaggattctgggaggcaaatgaggtaataaaactaactgcctgtttatccattctacatccactagattagactagcactattttagccttgtttgggttctgtatatacgtgaaactgtcagtcagttgttcaaacaatcattatatatttattgagtgctttcagtatgccaagtacttgtactgtgctaggtgctgaagatacgggggctaacaaaaaagacaaaaatccctccccttatggacattactttctagtggaagaagagaagtgatacattgaacacatgcataacagattagaaggtgatctttattttatcctctggatgaaaatcaagcaggctataaaggtgaagtgttagaatttcaagcatagtggtcagggcttattaaaaagatgatacttgagctgggatgtggaagaggtggacatgtatctgtgcagctatctgaggaaagagcacaaaaggaagagggaatagccagtgcaaatgtcctgaggacagcaaagctggctgttagaggaacagaaaggaggccagagtggctggagttgttggaggcagagtgagatcagagaaataaagagagacttctagtctttgcaggctattacaagaacatggcttttattttgaatggggagctctaggaagagccttggcaaaaattgacaccattgctgttgacccgagattgaactagaaagagggccaaagatgtaagcaggaagaccagttaggaggccattgtcatatcctaggcagaagatcatgatgaaagcgtggaccagaatggtggtggtagagataatgagaagtgatcagagtcaagaaatttttttttttttttttgagatggagtctcactctgtcacccatgctggagtgcagtggtgcgatcttggctcactgcaacttccgcctcccaggttcaagagattctcctgactcagcctcccaagtagctgggacaacgggtgcatgccaccatgcctgactacttttttttttgtacttttaatagagagggggtttcatgatgttagccaggatggtctcaatctcctgacctcgtgattcacccccctcggtctcccaaagtgctgggattacaggcatgagcaaccgcgcctggccgagtcaagaaaaaatttaaaggtagcctctcaaggactttctgatatattagataaaggagatgaagtaaaaaaaatcaatgatgactctaaggagttttgtcagagcaagtagaaaaatactgttgtttattgaaggagactattaaaggtggcataggttgggaaagcagagataataggggttgagttttgggtctgtaaagcttgtgatacccattaggcatctacacagagtctggaagtcagaagagagtcttggctacagatatgaatttgggagtcatcagaatatagagagttttgaagggaagagactagatgagatccacaagagagtgactgtagagaagagacaaggtgcaaggactgagcttgaggcaacccaacatccagaggtcctagataagagggggaaccagcaaaggagactgagaggaacaaccagtgaggcaggaggcaaatcaggtggatgtgttgtcccaggagccaagataaaggcgtttaaaggaggagggagtgggcaactgggtcaaatgctgcttaagggtcaagttagatgcaaaatggcctttggatttaacaacgtggaggtcagtggtgacattgaccagaacagtttcaatggagtgatcggataagaaagcctcagtggaaaaggtttgagaatagaagaggaattgggtgcagatgcttctttttgccattaaaaaaatgttttttttttttttattgttgctgtttgtttttttgatggattcttgctctgttgcacccaggctggagtgcagtggtgcgatcttggctcactgcaacctctgcctcctgggttcaagctattctcctgcctcagcctcctgagtagctggattacaggcgcctgccaccatgctcagctaattttttgtatttttagtagaggcggggtttcgccgtgttggtcaggctggtctcaaactcctgacctcaggtgatccacccgccttggcctcccaaagtgctgggattataggcgtgagccaccgtacccagccaaaaatggtctatttttttaagccagtaattttaactttcaattaatccaagtgggtattgtgtccacaacaatctgaataagtcaaattttacttgtgaaatccccctatcagacaaatgacaaaaaggttttgtgaaatgggtttcagcaattttaagtctgaaagtctctttgttaaacaaaggaaaacaaccactgccttcagtaaatttgcagctcaaagtattataagttttataatcaaacttctatttggagcttctcacacacacacacacatacacacacacacacaccccaaaatgatgacatcatagttgtcaattaaatattgtacctcattataaataacaattactcattccaaatttttcattattgatttatagttggttcttttttcatgccatagctaccacatagtcaccttaaatttgtaatgaggtttctcattccatagacatttgtctgcctcttgtacttgtagacacaggttcatgttgtcaacagttgggtattgaatctcaaaaaacattaagcttaggattaaaggtagggcagggaaagctgtcagtaaaacatgctaacctaatgtatctgatgaggacagggtctagttcatactcagaactgcaaggatgctgtgaagtacaatgatttgatacttgtgataccattttgttgtaacattaaagccaagagtcttctccacccaagggcaatgccagtttcccagaaggctcatttctccgagccaaagctccaaagatgccagtgcacccatgctgataacttagtctcatgttatttctcaattttatgcttaatttgctccttttgattttatgtattttcacacagccaagtgtacatggggatttacccatagtcctttaaatgccataaaactttaatatagggagataaaaaccataataagccatgcctccaaaccctcacatttagttcttttgagtttgacaataaccagttttagattatttggaaatttggatttctacgtacttgcactgctttaaatgcccttgtgcctttcctaaccctcctctcccacccagatgaaaattatactctactcttaacctggacatgcaacttccattgactgcacaaaatggcatctttacaattcttaaattatcatcataatggcccacatcatgcatgagccaatgcaatttaatatggttcagaataaagccaagatggatgcccaattcccaattttaggcatgcaaccctggaatgtcttttggaaaaaatgaaataatgctcttggtaggctgttgggttcatctgttttaagcataattgccatctctcagcttcctaatacccttaaaacctctgagagtctttaatgtacaaagttcaacaaaaacaccttcaaaacaaattagttctaattatgtttaatattggtttgctgctttattgaataatctacatttgcttttaaaaaaaggaaattcacttaactgcatgtcagtcacccaagttttaagtgtacaaatgaaatggaaaacatttattacacaaatttaattacaattctaagaaataaacatgcaaattagatagagttcaatttgcagatgctaatcctcatccttgatcttgttccttcctcccttgattttcagtctgtgcgtcttcttgattcctagggagccaggcagccagaggtctggtttttcacagtcggaggatcactgttttaaagaagtgttatatttagcacatctggtatagtggcagtaaacaaacattatagtctttgtaacacttttgtgcaggtgccttctcccgattttattaggtctatgccttccaagcctctgccttcattacacctgaaatgacccatctcgactatggaggggtccctagacagaagttatgaattaatgattttaaaaaataaactctgaggccactataggagaaaattactatttgcaaaatattctgattccaaggcttaaattacattctcttgagcaaggacaatctcttgtattactttttatttcctggaggttttccctggaggctccccacccagaaagggttgccaattcaagttgcagcaggaccaaggttgcttttttttttttttttaatacgtacgcagctcaggagggaaacgggcgggggcgggcggcgagggagaataactgtttggtcctgcaaagacatctgtttctcatctccgtttgctgtggcaaaggagaagaaagtcttttgcaaagggtgggaaaggcacagattttttttttaatcacacgcacacacaacaacaacaaaactaaaccaaatttaaaaagacaagatatctcggaaggttccagagtgaatacattattcggctggagccaagcccccagggctagggcgggagcccgagagcgcgtggggtctgggctgcgggctggagctgggcccgcgtgtccccgggcaccgggaggggaggggaggaaaaggaggagggagggcgggaagcagggaaggaggcagggggcgggctggggtgggggtgcgggaaaggcgccccgtgtgcagcctgaggagcggcggcggcggcctgagcagagggagggagggagagcgggcgcgcttgtcatgttccctctctcaccctgggggcatcctgcagaacctctcctcggaaatccacggggaaatggcaaacaggattgacgggtttcacacgctcctcgctagacagagccgctcattaccataaccgtctgcagcgacggcggcgcagcgccccagtcgcggcggcgggacctgccgggacccttgcccgccgcgcacccgcagtcaccgccgagcgggcggccgggccgggacccgcgagtgtgcaccggcggccgggctggcgccgagcccagagcggaccagcagcagctcaagcgctgcggccgccgcctccccgctgaccccgcggtaagagccgggctgggcgcgggccgcgggggcgggagggccgggcagggtggagggcgagggccccccggggctcctgccctcgcagacgggcacccacgcggcctcccgcgcgccctcttggcaccagggctgtgccgaggtcaccgagtggactcgcagcggccggagcggagtcggggcggcgtgggggccaaggcacagctgggcgcggaggcggcgcgggcttttccctgggctagcgtgcgccgcggcgccttcaccagggcgggaaccgccgcctcctctagggctgctcgggctgccacccgcgcgcaccgagacaactccaggggcgggtggggtcagaagctctggtgagacctcatggtcctccgtggccgcttagtccctcatcgtaggggaaggggttaagtaggaggggtgcccccaggtccggatgccgcggcgcttggcaggtggggagagagggattgtggatgtcaggagcgcgcgtttgcaagaaaaaggaattgatgcagtagctgacaccttctgtcccccgccacctccgcccccgcaccctcctcccaggcagcagagctgcgctgcgggcggcggcggctcctctgtcctcagctcacctcctcggcgggctgaggctgctgcccgcctggtccacgcctccgcctctcgcttcccttcctcccctcccgcctcttcggccctagcaactttccgagtgcccagctgtggtcgcagaagcagggaataggcgtcctcgccgccaggtcccacgggcgcagggcgctcccgcaaccgcgggcttccagcgggtttggccggcaagggagggagggaaggccgggccgacatctgctgcgggctggagcgcgggggcccgggccagccccgccagagccctgccagccgctgtgagtcatttccttggaatcctacctttggtgtttatttcccttagaaggaaacttggttttttttttaaaaaaaaaaaaggataagacataaagaataataatagctcttattcttcagaagaggcacacggctgcggcaccgtagaaagacaacttgcctttgttcccggacacttggggtgttgtttactttctcctgcggccagcggccgaccgggcgctgctggctacccggggaggggctgagggctgcggcaccgacaccccgggggtgtgtctgtgcgggagccaggatgtggttggtggctgccgcccgccttcaagaggtcggccctccaaacctcggaccccacccccgcaaccgccacacacacacacaccttgggcaccagggctcgggcatcggagcaccccttcgtgctctttaggcccagcacctgcagccccaaccacaggacccagcttcaagctcttggcctcgcggggctgcagctgagaaatgtacttcccagggcagacaggtgtactgcaggaacggcagaaaagcgacatctgtttgtttagaagggttgaagaattttgttccgcccatccagtcccttccactaccaccaccaggagccggacaagctattgagatcattttgggacaatgtggaggtcaggggcttgatgccatttaaaactggcagcatcgatcgggggtggaaatagccctttacttccctgctttccagtgctggaatcagactgctaactgctataatgatcttaatcaaatgctctccaattttcaatgacagatggaagaagaagtgagcaaagaatgacctggagccccttgttagattcaaggtgccgctgaattcatagctaccctgttttgtgtgccagccactcctattagcatcataattgcttctaggaaagaacaagcccaactcatctggaaaaaaacaaattgtatagaaatgcctggtaactttactacgaacatttgctggaaaagcttggcattctagccctcagtcttctggggatgctggaagtgtcattccactacatccacctgggtgtcaaaacagacattcaggagcctgaggatgaagggttagggcttttttttttcttatcttttaaacccatgcatagacaaaacacactctaacaccctcctgttgaatccatcacctctgatcttagaaaataaattttgccataatgtatatccttttctttatttaatattaatagaacacgaatttgtggacttgaattgctgacgtcagtagcagaattataaatcttatcagacagagaattatgacagtttagatctctacatataatacgaagaaagattcacgttaagcatttgtgcttaacgctgccctgtccaatttttcgtgaacattcaacttgccttcttaatttgttaacatccagtgtaagttttaaatagactaggaagactcaattgcaaaatctcctccccgctcccaaataatcccaactcattcatgttttattcagatttacataaatcacttgcagaactcagcctctctagtttagggttttgtgtgtaacagttctcaatttaaaaaagaaaaacttagtaaaattagatattgtgaacaaaataatagccaagataaatactgttatgccatgtttcaagttcacgtgcataataggatatgctggaaataatgctaacaaatagaaacgctgaaattcctcacaaccaaaaaaggtactaccaaaaagttattaaaatataaacaaactctgacaaacataaaacagcacagggcccatataatgtcctgttaaacaaaagtaattgctgccaggagcctgcaaatgtttttctttcttaaggggcatgagtttgacaacctgcttttgtttacatgaaataaaagtctgcataggcaaaaggcttgcatcttattcccatgatctaacacaaaagtgagtgtaaacttcaaactagaaaatgttgattctctcaataagaaagggctgctgactgttgaaaagctgtaattcatgtgctcttggcaatagtatttcctgatatgattgtctcttagaataggtgaagaaactggacaatttcatgagagtcttccagggaataaatcatcatgaagtttgataccctacttggatgaggagtttgagaaatgatagacagaaggacttaatttgttaaatcaatgtaggctaaatttctttgttgatgactcaaagagaaaaataaatgacatgtcccatcgtttctttgtaaagatttaatcgaacctttcttttgcccacttgttttaaggtttactaataagtccgtactgatgtctctttggagggcatcttaaaagagaacggggaggtgttgtagcagcccaaaccagctgagtcctaattctctccactgacctgtacaccttccctgtctgtcaaaagatcttgcttcattattcagtgtggttgggacagaatttgagacctcagagagaagactgggtgaaaggtagagtcattgctgccaagagctgctcttttagccagaaggacattgtcactttaatgatgctatttcgccttaccctggtgtttttcctctttttccttggaagtggacccttgttatagcatgtaggtaataatagtctcccacgagacaatggtagattcactctttcccagaaacattacaagctgtataatttggaaaagaaagcaagaactgggcccttagtttatgtttgaaagacaatcaatcttcagaaagcctgacgtcacttgtgtgacagttcttgaaaccacagaatgagatagtgggggcttgagtctcctaaagggattggcagttaaggaggcactgaggttgcgctactgtcaccactggtctatggctgctaggtctttttaccttcatatcagactctcctctcccttgaacttactcttgaccctacctcgagacctgcaaagggccaagtgaagacacagagcccccatgaaagcggcctcactgcctgagctatcgaggggcccaggaagcctcacagagcagagaagctcccatctccctgcaggcccaagggagaagggcgtgaactggagagaagggcagtgatgtgttgcctcttggaaagttcctgctctgtgtctgggctttgcagtgtaaagagttgttggctgcctctggccccagagcctggctcctgtttaatattctgcctgctccgttgatgttgtgcttggctcctgtgggactgcaactcacggcttgaaactggagccaattttctgtcttcatctcgcagtgttttgactggaggcagatccagttcaggccgatcagggctggtggaaacaactaccaagtgtctctctgtctgctttgctttgggagaagaaagtggagggagccccagcatgttgtagaggaactggcctgcggaaacgagaggaggagggtgcagggggcagcggaacagactgaacctcagagcatcagttggaattacggtggatatttctgcttcccctgcccttttcttttgattgattagtggatttcatcaaaggagactcccgggggattgactagaaaattgattttgccttattaatagaaaggaagcgcaagggttttggcttcttagcagtacattttctttggaaggtcaggaggaaaatgtgtttaggaggcaaagcagctgtctagaagagggctgaagggaatctgagaacaataagaaatggggttttaaagatccgcccatgaaatgcagattgctgaacacagaggctgagctaatagcagctagagagtttgctgaggttttctttgaaaaaataataaaatgtttcagggtaaaggggagggccgagaagtaaaagtttcccaaagcaaagaaatgaagatgccaaggccgtcccttggcttgctcttgattagggctgttttcttcattcttgttttttttttttttcttttcagatctgaggctgtcagagatgactctggttctgtccatgaatagattctgcgagcccattgtctcggaaggagctgctgaaattgctgggtaccaaacactatgggaggctgacagctacggaggcccaagccccccagggccagcacaagctcctttgcagggagaccggggagctggtcccccactggcaggtattgcccttgacctgcgcccatcccccccacccctcgctgccctttgcagccagcctggtggacaggaggtggtgtctggggtgcccctctgagccaggagagctaaagctccagggacttcccgggctgcctgtgcgcctctcataagtgagtccagagctccagagagaggaccagaggtgatatttaaattgcattcaaacctgtgtctacccatgctgctttttgaatataagtcatgtgtctgtatttttaagagggccaaaccagatattgaaactctgagtttgggttttggttttctaccctgtggaactgtatggttctctcacaactatgaaagctctggtgggctcaacaatgacacctttatcccatgagatataaaggaatctgcactttgggccagcagctatgagcttcttttctttgttaacccatttatgcccagtgttccattattggaacgctaagcttgtggaagttatttatatcctactgctcaaggtcatcaccaaggtctgacttttcaaacacaaaaaaatttgcaacctatggcataaatgggtaaagcacacaattggttttaggattgtaggaaaaaaatttaaagccaagaaaatagaagtatgttcttcctgattctttcttcttatagtttaagttcctttggatttttttgcagtattagctatttttaaaagaaactaaaatataaaacaagtactcaatgaagtctgttttgctaaaaaagattaaaaactgtggtcttcatggttggcatactacattttggagagtgaaaaggacattagttacccaaaattttaactcaaattttaaaaatttgaattttgtattttgaaaaaaaggaatgctataatcccaatgtgcagataaccatttgttcactaacctaaagccaataagatttcaaagttgtttggttatcagtggttacagttaaagatgtatacatctttaacagtggtgctatgttgtcatgaatttaattaaacaatttaaataaatactaatatattttagagaaattacactcctcccctttatgaatgttgcagtttccttttgcatagaattaagattctgcatatttattaaatgctaaaatatgtgattttcctctataattgcctagaaatcttttcctagcctgggtcacaggattccatatgatagcaactattaagacaaatgtttatttttaatcaccacatgtacagacaaatatgtagccaagttatcctctagaaggaaaggaaacgaaagtattttgtttggagaacctctggcaaaccgcatgtcatttgtcatatctgatttattaccacaggatcacattacaggggaatttcaaatcctataacaacatccaagatcacatactttaagaggaagtatgtggaagaagaggattttcacccaccactcagcagctgtagccataaagtatgtttttttaatagtcattatttttattaagagtttaagatacttagtaacagttgcttgatccacttccaggaattaaattgtttcacccaagcaatgaaaatgagccacttctcagtggagcctcattaatcgttgtcgcttttttgggtcctgtgttatttttcacaagtacttgaagaaaaagctggcaagagctattctacccagaaatgtcaaaattatgtaatccaaggaattttttttaacgtatgatttaatatttctcagactgtgttttgggttatggttcttccacacttttgtgtgtggggaatgcgctcgttctttcctgtcatgttctccccagtctgagttctggctcctgcagccaatgctacttccctgtgtgtccacatgggggtggttacacagggcttttcctgacctcttatgggtagactcatcatccttgaatgtgtgtatacaagtagaaatatgcacttcactggacatgggttacatataagtttgttgaaacatggacttcatttccaggaaaagaccaaagctaacttttttgtaggtatagttaaaaaaaaaaacaagatggggaaattgcatagaattatgaatctgggcatctaagcttttgaaatatcagttcatttttctttagagttaccttccttcaataactatctgctgatttaatcaaggcaggtataagcacagaccatagttgtctgaaatgcagagaggattttcaattcttcttcctctctgtctcctcttgccttccccctctgccacctcatcctttagatgttgcttttaccttgctcatgaaaagacagcagaatgcattggtaggtactgggcttttccctgcatgtgtagtccctgcctttggtcagtatgggctggtttagttcacagctcctcaggttatggtgccagtttgcttttttgatggcctggaataactggtccccaggacacaagcagtttatttcctttttagtttctgtgttgtggttgtagcagtttcccagttgctactggatttgcaccaaccatcgcatagtgacagtgtcacacagctcaggagtgagccctctcatttcctctcggcatctcgtctcccactcagctccacaaggaagcctactttggtccttcaactgacacattctgtcagggtctgagcctcattcattagtgtgtcctcttatcaagcaaggataattgcaagtatgaaacccaaaggattaaaagagggacagcattaaaagccaaatctcatgctccttcttggctagaccagggtttgaagtatattcattatgacttgcattttggcatcattttaaaaacatgtattgatgtacaatatatgagttatgtgtctgtgtgtgtgtatttgtatagacacacataaaaaagtacaggtatcacagtacagcttgatgaatttcatgaggtcatgtaactaacatccaggtcgagaaccaaaacataactagcaaccagaatcttccttctgccggcttctaacactacccctcgccccgctcaccccaactctgaaagtacctcctctcctgacttctaatagcttagattagttttgtgtttcagcatcttccttattgggccataatagatcaaaccacctgaactgtccctcctggggcctgcactgtggctcgattccctagtgcttgaccacaccagtgagtcaggaagtgggtgggtgctccagccaagtgaggaaagggaatatcagcagaatgggggacagcctctctaaattaaccctgcggaacaagaccacaacatgcccagacccagacagtgccaagaaagaagtatgctatgatgatgttttcatatagtccattttctaagctttctctcttcctttttctgtttgtttttttcttttttttttttttggtttgtagaccatctcaatttttgaggaacgagcccacatcctttatatgtccttagaaaagctaaagtttatcgatgatcctgaagtgtacctccgaagatctgtccttataaacaatttgatgaaaaggatccatggagaaattatcatgcagaataactggtgcttccctgcctgctctttcaatggcacctctgcccaagagtggtttatggctcaagactgcccttaccgaaaacgaccacggatggccaaagaggaatgtgaaaagtttcatgcctgctgcttttaccaagaatgtggtggccactacctaaatttacccctttctgtcaatgctaatgttggaagtgcctccactgctgcctcctctccctccgcctcttcttcctcctcatcttcctcttcctctccccctttgcctttaccgagttgttcccgccaggtggattttgatgtaggtagtgcatctatttacaagagtgatggccagatacctgccaatgaaatctttgtcactaatgtcagatcacttggtgttcaggaaaaggccaaattaaatgatgagaaagcaaatgatgacaccaacagagatggtggccccctcagccacgaacctgtgggaaatgaccttgcttttgagtgcaaaggccaattttatgattattttgagaccggatataatgaaagaaacaatgtaaatgaatcttggaaaaagtccttacggaaaaaggaggcttcaccaccaagtaacaaactgtgctgcagcaaaggaagtaaaatatgagccatcttctcaccgaactttgaagcatgcacagcatgatcagttagctctcgtaaattttattttgaatggattttgtagttttgtacaacagataaaattatgccatgaacatgccatgtcgttttaatgcctggagagcagattgcgtaaaacatctgtatagcaggcatcagcgagcttcttataaatgtggtgatttttaccaaggaaacgattgacttaatgcttaaaagtatatcatagttttcttacggaaaagatcagtagatgagattgggggacaatgtgcccttgcaatatttccattgccccccaaggagcctgtcactagctaagaaatttctacatgtttgccagttaattagggagttatttggtaagcaaatcaatataaccagcaaagatacctgcttcttctatatgatacaatattttttttaaataaaagactaaagacagggagctagatgaaatggcttaatggtgctgttaagtatttgtacctaacagtcttgtgtgacagatgaaaataggatgtaacataatgaaacacacctgtctaggggcggcaatcaacagtcttacacagagagggtattccctgcaagtttctggcttgcctgtgatgggtgatgaggcttttagagaggtgttatacagggcgatttttggtgccttacttttatcttaatttttgccaatgtgaaaattaaggataaatcagagttacagcagggatttaacaaacaggacaaaaaaaaaaaaaaaaaaaaaaccacagggtggatcaatatggtttggaaactgttaactttgaactattgtgttcagcttttgattcgacatctctattctttatttttgatgcccaattgcttttggattcgccgttttttcaatagggatggaggaaatgagagagagagctgttagaaagcagcacgggctgctcgagcttttctatggcaactgtgtgttgctggggttggggttttctgggttttgggttgttttgttttgttttcttgtccaatgaagttcacgaaccagtggcatgcattatacttttctctgttttgcatcatttcacttgtttagattataaaagcatgtgggtttttatatatgaactttgctgttgattaagaagcacaatgttaataaatgatgtggtgatcaataaggtttatcttaaagaatgtaaagactttaggtttttgaaagttattttggagaaatgggacttaatctataatagttactatgtatttggtctacattttccaaataatatctttaacttgtacatttgaaaagtgttcagagtggccctcctaccatccttccttccactccagccaactcttcctgctaaactgtattccagtttccaagtttactaattgacttgggcctgttcaaataatacttcacagaaaccaaatgccaaacggaggaaataagtaagccctcccagtttctccaagataaagctttttttattattgctattaatattaaatataggtctcattcatacagtgtatgagtaggatcatttggacaattgtccacaaagaccaatttttaaaacattttcttgtgttatagttaaatagtctagtaatgttttgtcctttattttcaatatttgataaacatttgatgttcaaaacttagctaatagatgcttgtatatgaatgtgttgtaataaagtgaggttttcttgatatatatttattaagatgataaaaattcattaagttttttaaattttaatggctattggctatgtttctcttttccattattctctctcctttaaaaaactcaaaacatctagaaactgtagtggatagtggccacacaggagttttctaaattaaagagtattttaaaatgccaatctgacaggtgtttcagaatgatcctagttcgtaagtttaagtttctattgattaagaagcacaatgttaatagatgatgtggtgatcaataaggttatgtctgaaagaatgtaaagattttcctttctggagtgtctctgaaaaaaattgtataacacgaagccataaatactgaatcttagctgattgcattatgaactgtcaaactgtgaagatgacccatatgtaaacagttataacagctacagattattgctagtagcattccatacaattccatattaatgttcttaggagctaatatttgataaaggggaaagctagttaaaaactaattaatttgtcaaatgtagcattcttattatgagtgtaatatctcatggagatttaaatatgaacgaaaggacttatccttctgctttttaaaagccccagcattactagatagtgtttttcttgaaggccaaagctgtaaaatgacaaagttggtgattttcagcagcactcacctgagctgtgagcgcctgcacctgttcggtagaacccactagaatcacttctctgtaggataagtgatgcctttgaatccagcagcataaaaatctgttctttttagtcatcaagtttttgtttccaggatatttctagcattgcaaaaaaaaatttcttcaccaaacactaattcctaaacacccatccaaaccacaaaaattctcttgttagtaggcgagagtgctaggacttcctgtgttcacctcccatgcacccagcattgtcttttatgcatgagatattccattagattttcctagagtggccaggacacccttcatagtaagttatatctcttaactggattctatagttttatctcgagcaacttggaaaagctaagacatcctccacccacactggtatctacgcgcctggaagctgcaccttctctcattgctgtgctctgctttaaggaaaacctgatatgacagaatcaagactattaaaagataaatgaggggaaatcttcatttaagaaagttgccttgctccccaagagtgcctttaattgctattcccctaggcatctgggtgcatatcattaatgaaatcattaacctttgtctctggtccttcctttctaaaaacagcagattatagaaggtggtctggcaaagggattttcaaagggcaaaagtctcatcatcatctttccactcaaaatcctattattctacatttcactttgcaggggtcctagggacaggattgcagggacaggggacatgggaggaagacagaaaaattcaaaaccagcagatgccactacctggcaatgaattgaaaattaggggaaagcatctttggcgtgaccttttattaagacaacagaaatttagaacattttacatgcttctttgttaaatggtgaagcaagggaatgaaagtatttatttttagagctcatagttaactccatcaagacatggctacccacccctccagttatgaacttgtattacagctccacttggtgacttcctttctgtgtatcaggagcagagcagaggacaacttgtagaagacatgaccattaagagacatcaacttcgcaacaaatataagacaaggatacaaggattcctatgtgatgcagctaggtttttatatccttctaacaaatggtgagcaggagacttttttggaaataattagttgtgaaattccatttttctgacagccccttaaatttgaagttatttcatttgtagttaaggttatcacatccctgccaattttactagattttttcagagacaagcattcagcatggcattagtaatgatggtttaaactaggtgcagaactgtcccatgaagagaagaatgatatcagtatttaaataataaaagaagagacaatgtatggtttatagtgattcattttaagattgctgtattttgattttgtggtttaaaataaatgcattaaggatcttttaagttactacaagatgcctctctgttgctttcttagctatagtgcctaagcaaggtatattatcttgacatggctaaaatgtctcaattctatgtgatatagctacacgacctggggtgaaagagttactagtttggagattatttcccagccttgggtacctgccatatttgagctgggagaactcacttaggaaaagcacttgcaaagatgtaagttatgaacacttgaatctcgcatcctgccataaagtgcatcagcaagtgactttaataaaacatgctgtttaaaatagtctgtaatttcctgtttctgcatttcccttcagtatctgtgacaggctgaagaacgatgactaaacgaagggaatttacacaagctagtctggtggtgtttgcaaaccatcgccatgagcttcatcttctttggtaaacaatccgctggtgggctgtctatggttggtttcttttctttgttgttgatccaatttgttaactttgaaaatgcaaactacttattcacagtgtggaaacacctgcttttgaccacaatgaaactgatagaatgtatggcgatgtattagttgtttctcatgaaatttcttatatttctcaaccccatttctatgactcttctcttgatttaaaaatatgaaaatcgaataaaatcttgtggggaggacctacatataaaagaacttgcagagatgtaagttatgatcttgctttgtgccaagatctccaagacaataggcaaatatcagaactttgggggaaagggatctaacgtaccctagtcttgtgctgtgcagaccagcctggccttcggcaggcattacctctatccagatctttccatggaagcagctgagtccaggcatcaggcatatgattctccactgcctcctctggtcagcacacacatgaacccatctttgatacttctagacgcagtgctttttcttcagataccctctaaagtgactgcaatgaactaagctctcagatgtggtaagaccctggtatcctctcagccaagagatgagtagatgtctctgaaatacacttggcacagcactcagatatctataccatcttcaaaactcacaacatccctgtgtgcacaataagcaaaagatagagaatgacaggctatgcaagggatttgcgcaaaaggttggggagttgatctctggtccagtacactgaaggaaatctgagaaatacagtgctccctgtacactgcagagtgaatccactctctttaaggaaaagtctaaagactgcaagggaaagaagacagaattttttgtttctttgtcaaacctctttaggaaaacagaaaaaaacatttcagggactaaaggattgttttaaatgtttttgcaggaagagagaaatggcttgtctgccctttctggagctgggaggggttctccttgttctccatgtccttagatgctgtgcttttcaataaacccaccaaactgtatttgtgaacagttatggtcattagcccaaggaatctctctcctgttcagtttaggcacagaggttgtgggtttctcacaagactggagtatagaagagggttaagagtagggggtttggagttagactgcctggatgaaaatctcagctctgccagggtagctgtgcaagcttggccttggccaacaagccactttacctcctagtgcctcagtttactcatctgtaaaatggagcagcacacattatccacctcatcaggttgtcaggattaaaggttttaatatcagggaagtgactcaacattgcctgggtgtacattatgggtttgcagtgaacaagcctccatgacttctccattactgtccttgaatgcccggcaagtggaacccaaccgtgccagatcctccttttggtggaaagtattcagcctctttggttctgtacagcaagcttgaagttaaacagggggatggtatgaaacctggggtcccagggcccttagctatgaaagtcgtcattggtgaccttgagatatgtttagtatttaaaataccaaatcataaaatcttctgaaagtggttgcacaggctaaccccacatcagatttccttacctttggctggaattaaatcagctccaggctgtcacaaactgagaagaaactctgactgggaaaacgaaggcattatccttaataaatacaatttgtttgtcagacagaatctttcagaacattggctatgtgaagggaataagaggtgtcccttacaaatggaaagattaaaaaccactaacctctgactcatctctaggatttgccaaagttcaagtttatttagttgttgtatcaaataattttcttaaacctagcttttactcagaaaaagtacagtattaagttaggaaaaaaagggggggcaggcgcggcagctcatgcctgctggtaatcccagcactttgggaggccaaggcggatggatcacttgaggttaagagttcaagaccagcctggtcaacatggtgaaaccccgtgtctactaaaaatacaaaagttagccgggcctgtgtggtggggggcgcctttaatcccagctactcgggaggccaaggtaggagaattgcttgaacctcagaggcagaggttgcagtgagcctagatggatccactgcatacagcctggatgaggaagtgagactctgtctccaaaaaaaaaaaaaaaaaaaaaaaggcaggaggggggcaggggagataatttagactaaacgctattccttgtgctcctctacctgataattttggaggccaaagcagaattgtctggataaccacaaccaaggacacagcctattataaaataactgggatacagtttccatgtataaggtcaactagaggttggttatccctatttcaaattcttatcccttctgttttgccagtaaactcagaaacccactgataatttcaaaatagaattccatttacaaaattacattctgtctctctatttttgaagagtatatatttttccctaaggtgaggttcatttgtagcaggcttgctgatgggtaggtcctgaaatgagaacaaaactgaaccatatggcttgagaatgagaaatgggcaacagagtataatgagagcaaatgcagtgttgtaccatgggggtcccaggacttctctgcaagaggctcccctcctatctgactgggctaggatctcatgattggcaacattagttgccatttgagccagctgagagaggcagtgggaagccaggacacctcagcctgcccagggaggtctaggctggccatctctaaacctttgtcctctcagagtttggaaaaccagcagctggagtagatatttttatttcccaatcagtagaattttaaccagttaagatgatcaattagaattctcaaccagcccaatcttgacctagctggttttaggcaagatgacttaatgcacaagggacatctctatctagagatggtattggtccctgcacagaaagaactcttaaagaaattctggggccatttatctgggtgttttaagtgatgaataaagaaatacatactaggaagaatcctgggatggaatttgtacgaattaattgatttctaacacttgttcttattatagatccaacaaagcttacctcaatcttttaaaaatgtcctgtttaggccaggcacgatggtgcacaccttaatcccagcactttgggaggccgaggcaggaggatcgcttgaaaccgggaggtgggggttgcagtgagcctgcagtccccaccactctggaggctgaggcatgagaatcgcttgaaccccagaagcagaggttgcagtgagctgagattgcgccactgcactatagcctgggtgacagagcaaagagcaagaatctgtccaaaaaataaataaataaataaaagaagaagaaagcaaaaagaaagaaagaagaagaaaaagaacaaatcataactcttcatttatttgcttagagtcaatctattgtattgatttctggtcaaatgactgctgtttcttaaccacaagattataaccaacttagtggtgagaactagattaggagttaggaaacagagtcttgcccaggtttgccactcactagctgtctaaccatgaacaagctccttcacttctctggatcttgattttccatctgtcaaatgatgaggctggattcaaagggcctctaaaagattgttcccttctaaccttctcttctgattctaacaattcctgattctaacaatcagggatctttctgaagatgttcacttgagttttctgcatgtcaccctttcctttccttcccttccccagaatgccttttttccctcccagtgaaactgagaaactgcttctggatctttctttaagaacacatctctgagttttcctgtcccaaatgattgttttctgcatatggcggctaatctattgtcttctgtaatatacattcctccggataggccatgcttccccattctcactgcagttcctctgcccctccccctggagtgctcctgcccccgcctcctttagccgattagctccacacacccggagccagccaggcacaacgcggctccccctggcacaagactgtcctcgccttcaagcaaccagcctgtctgcaccatgcaggcaggagatccgtgaaccctcttctctctcattcttatgcgtaataaaatagcggactttcccccttctttttatgaagacagttcttgcagctgtgactataactgttttttttttttttttaaataccagccaagattatggtcccataacccaattagtgtcatttggttgtggtccaagggcttcccctgcacgagttttaatttggggatccccggaggctgcactccacatctgtagccggcctgttcttcctctccccttatttgctcgaggtttatgggaggattagctgtgtggtctgggaggcggctgcttctctttcatcctcacggctctcgagccgcggaggagccttttacttttcatcatcaagccctggcacctggagggcgggcagccctagcgactggaatgaatcagaggatgccctgcaggccccggggggcgcggccctgcaagcatgggggaggggaggacgggggaaaggctgcttattgggctgctcagcacccggccagactgcgctgtgctgggacggcgagggggtggtgaggagggcagccgcagtgtgaggtggcccccccccgccccgcccccactccctggctggcgagggctggcaagggctccgggcgctcattgtgcaggcagctggcaccagctgggaaggggaattagcataacaaagagccggagcgagcgcggcgcggcccggcgggggctctgccgagcgccccgggctcggaggagccgcgctgtcagcggctgtggcgcgctcgggcctcctggcctgagaccctcggagcagcggggcccggcccccagcgggcgcgctctgtctgggttccggccgcaggactcgcccggagaatgcagtgggtgtgggtgtgtccgggacagcgtgaatgggcgtgggtgtgtgtgttcgggtgagtgtgggtgcccgtgtgtccaagcgtgcgtgtaaccgtgtccctgggcgtgggaatgcgggtgtgaaggggtcacctgcacacgggtggggacccgccagccctcttcccttccgccccaggaaggcctctttgtttatttctttccggagaccgcggtggttcttcaatcaccagttctcaatcctgattgcacctcggagcccccttcgggagcttttacaaaaccctcaggcctgagccctaccccagaggctcgcgatgaattggactctgctgaggcccccagcggatgtttcttcagacgtccgcgtggattccgacatgcggcgtggttgggaaccgccgagtacccactcccactgtccccagccctgctgccgaccctggacgccagcgagcgccaaggagaccggggccggcttggcctcgggtttagggcctggaagcttatccttcgccttcactggttgaggtcaagtgcacattcccccgacactagcgctgggtcttaggctaccgactgggcaacctcacctccattattgcatctaagccttacagcagccccatgggaaaaaagctgtcgtgaaacgaagctcagttgagtgtcacaaagggtcacaaagctaggtattcgacccaccgaattggagtccagggctatgggactccaaagtccacgttctttccactgtaatatttaaaaataaaaattaaacaactaaatcaaaaaccaccgctgcttttcaagtgctgccaagacctcaagctgaccaggtccctggaaaaaccctgggaggactctggaggaggcggggttagggtgtagcaagactcctgaccccagaaggtagatacggcctagacgacgtcactagaaattgcccggggcgtcttctctccagcaaccttctgcaccgccttccacctgggtagtctccctccccgtcccggcccttccaggctccagctccccaccccctccctacaggaaggaaatgtgacagcacaagccgttcgccatcacccaggagctgtcagcagctgcgcagcccggggcgggagagagcaccgcggtcagagacccggggaccggggagctgcaccaccgcgttccgggccccgcgcctgggcttcgcctcgctgcaccgcgcctgcttgctcctagcgggagcccagagtctccgagtctcctcaacagcttcgcgacaggagtctcttgcctcagctgcctgagcagtcctcctggagagggaggagaggaggatgaaatgagctctgggctctgctagccccagactcccccattacccagaggtgtgggtttccacgagtgcaggctccaaccagcgccttagcatcaccaagctccagagggccctgggcttctgaggccacccaggcccacccacccttctcacagcaggggagataaaggtccagggaggtgaagtgactggaggtttcatggcctcctgactgcctgcccagctttactctggctgcaccagaccctttaacaggcaaacctgtcagtgcttacttaccggggacattttctacagagagaacctcagtgctggggaaaggagtaactataggcttgcaggcagcatctgcccacaaggtgccctggagagagggaaaagttggaaaccctgggcccccagcctgagcactacccagtttgagtttctggggcctgatggggctggtggtggctgctgttgttattattaagagttcagaattctcgtaggttctaacaactgtgttcattctcaataaatggtttcttaataatcgttttaattagcaaaaaggctgtcttattaaagctaattaaaggcaatttgggaaccttattttcatacaatcataaaattagagaaacaagaggcaggagaaatgggaaaagtctcagcttttctgcagagggggcagggaggagctggggagaccctacctccaagccaggcatgcagaatgccagtgcccaagggggtggactggagctcctagatttgggtgtggcctcaggcagtgctggggaccaactgctgagagggatactctgttcacatcctccaactggagtctcagagtcacctgaactcctccctctgctctcacacaattagtcaattctctccctctagctatctttacattgaaaaagaaggtgctactattgcacctctgccattgcacctggcagccataacctaggtggtttagcatccatcaggtgccttagcatcaccaagctccacaggggcccagacttctgagcacccagggttatctacccttctcacagcaggggagattaaggtccaccgaggtgaagtccacagcctcagccctgcccagggtgccccctaagtccccaagcatttccactccatccattctgtagctgatcatcctaaatcaccaggcaaacaggaatactttacctcccaggtttgactttcaatgccctccagacctcagcccaggctacatgcccagccccaccttctgctccctggggggaaccttctgctccagccacttctgtcctctcaatgtcctctcttgctgacctgcaacttttcacctcccagccttcactcctgcttttcccttagcctgggataacctctccatgcccccacttatacaaagagtaacttgccctcaaggccacttcaaggtccacattttgtgtgaagcctttccagggctactataggtctgttctgtgatacataaaatgtaatatcccccctctctagaattacttttcaactagaatcatagttttgggggagattttttttggaaggcattataaagtagaaattaaacatgggctttggaatcagagagcttagttacaatcctggcttcctataactttgtgaccttgagtaaatgtcttgacttctgtaagcgcaggtttcttcatgagtaaaatgtggctaactatacccataactaagttattgggatggtgtatgtaagtcactttacataatgccaagcacacaatatgaatagctgtgggacccttgtccttgttgatgtgggggaatagtttagagtgacaatttgttgttttatgagcatgtcctccagaaaaagagagcacccagtcaaaggatagattccatggctatctgaacttccactgcactcatccctaggggttctagtacctcagtacgcacccccattccttctctccagggtcccttccaaatcctaggaaggggctctaccctcgggtccatgggatagtggtttatgggcacatacttactgtaagtgtctagtgtcagaactctacacaagaaagacactaaacatggggttagctccttgccttcttgttttaagttgcccagtctccatcctcagtagacctccctgtaaacaacccattctggcaggaatctaacagtctaaagggctctccagtaaattctaccataacaccaggaattcttgcctgtccttaaaaatgcagctttgtgcatacatagatttttttgtacagcaggctttgtccctctccttatctgaaggccatgggacagtgggtggccacgaatctgcagggggctccccttctgtccttccctgaacatcctctggatgaaacaaccatagcaaaactgacctgggaggaagagcaatgagcccatgcatgaaatactagtgtttagctgcctagtctcaaagcaattgtttaagtaggggcctcagccatgctaatagctattatcataggaccttatgtctattaatgtctcctcagcagaaggaaatgcaaacttatgacattctgattgtgataagcagcacactttcacctacgaggggctgtaatcgaagcagaagtgcctcacaaattaactagcagtcgcccacacatcaagcacagaagatactttctctatcataggtaagaaagggacttatttctcatcctggagcatcagtggctgtgtcagccccaccacagcttctgatgggactggagctacactgacatgtatgattaaagctccatgttataccgcagtggctgagttttcaaggagatggaggaaacctcacaggacccctggggcaggacacaacactgctcctcagaacattccttttaaaaaagttgtcatgaaatccaattaaccagctggaaggccatcgtgggcaggcctcctcggggttaataaataatagaatatgccctacattggaaggggcatctctcttttctaagcttgcaggctgtgacaagggctcctggcaggaagagacatgtactaccaccacgtcctggtccctaaaactttggtgagtccagcagtgaaggtcccctagacagatgcccagagtcctgggggtaccttccccctcccctacaccgtaagccacaaattcatcaacccagccccaggtatgagggaatgaggggtcctgtcttgagagaacagagcattagaatggggtcaggagctttagttctagctcccggtcagtctcattgtcaggcaagctgttcacaggctcctgttcccagctgaacaagactgatggtagagaagacttcaaagtgggcacagcaggctctctctcactggtcccctctccgtggctgatccccccgtggggaacactttacttctgttagaccagcactgctcaataaaaatacgatgcgaatcatgaatgtcattttcaattttctagtagtcacattaaaaaaaaaagttcattaaaaaaagtgacattaattttaataataaaggctgggcgtggtggctcacacctgtaatcgcggcactttgggaggctgaggctggagaatcacttgagcccaggagttcgagaccaaactgggcaacacagggagaccttgtctctactaaaaattaaaaattagccaggtgtggcgttgcacatctgtagttccagctactcaaggaggctaagcagggaggatcttttgagcccaggaggtcgaggctacagtgagttatgattataccactgcactttttttttaaatttttttttaatagagacaaggtctcactatgttgcccaggctggtcttgaactcctggactcaagcaatcctctcgcctcagcctcccaaagtgctggaattataggcatgagccaccacacccagtcccttaatttttaaaaaataaaaaaaagttttaaattataaaacatttaaataatatattttatttaacccaaatatacacaaattattgtcattttaacatgtaatcaatataaacattttgactgagatattttatattcttttttgtcttgtactaagtctgaaatctggtgtctagtttacaatgacaacacatatcaattaggacaagacacatttcaatttcaatgctcaatagccacatactgctagtggctaccatatcggacaagtcaaggcctggatctccgtgatcccttgtacagggaatcatgcagctcccatctggctcacaaccacatcccctctcctctgggccctctgggcaccatgttcttgcttcttggggacccttagcccatccccctagttcactcccagggactgcccagtgaaaactacccggcaccagagggtcaacgttttggggctggccggctctgatctacaccctccagcatcatccccacggcccagagagggttgtgtgggactatcctagagtggcagagtcaaggacaggggaggcaggttgggggagaggaggagttgcagacagtagctccagtagtttctggagtggtgagggctttagttagaagcagactgaggagcctttaatcctctctgttaccagagaggaaaatgtgggtggcaagtaaagtcttgtcagggaaaatactggcaggaaggtgagccacatgcccgagtaatcgccgactccaccgctctcctttgatgtagcacctcggtgccatgcaggccaggccaggcctgtgacagacaggcccttcctgggcgattgcaactgtgtgtgtatgtgtgtgagtgtgtatcctggctccttctcaagctgcagatgcccgtctctgcatgccctcaatctgacagcatcccaaggggagtgagtcctaggttcatgctttctgaacctcacatttagacatgtggcctaagaaattaggagtgtcacggagtggaccacaggctgggacagatgatactgtactcaccatgcccgtcctacttccttgactgctgtctgctacctagtggaatagcagtggatgaatgagcacgtgactgttccagacagtgggcaggctcggtcagcaaagtagaagagggcgctgcagacagcaaagagctccagtggaagtgctgtttatgggcctggaacagtggaacaggatgaagcctcaataaggtcccatgggagggtgagagtcacccatttgtaagagacaacattactggggtccagttctcaggcccttgtgtggtaccaggaactctgccagctctagcctgatgttgccacaatccctcaggctttagaaaaaggaagggagctggctgattgatcactcttatacaacactttacagtttacaaaaaactttcacctctattacggtgtaattctcccaacaattctatagtgttggcaggacaggtattgttatccttattttataggtgagaaaactgtggctcaatgaagggaaacactctttccaggggcagagccaagatcagcaggcaggctttttcacagagctctccagaatcattgctcaagctgaccttagagcagggctcttataattcgggggtcataaatccctttgggagtctgattaaaaaaaaaaaaagctttgaatcctcttactgaataatggacttcaaacagtccatgacccccttgaaattttatagaaaatattgtctgtacagtttttagagggagggactggggatgaaggaaaaagatcagatttttttttttttcaagagtcttgctctgttgcccaggctggagtgcagtggcatgatctcagctcaccacagcctctgcttcctggattcaagtgattcttctgccacggcctcccgagtagctgggatcacaggctgcgccgtcatgcccagctaatttttatattcttagtagagacggggttttgccatgttggccaggctcgtctcaaactcctgacctcaagcagtccacctgcctcggccttccaaagtgctgggattacagatgtgtgccactgcacctggccaaagatcagattttttttttctagtcagagtctcactttgtcacctggactggagtacagtggagtgatctcagctcactgcaacctctgcctcctgggttccagcaattctcttgcttcagcctcccaagcagctgggactacaggcacacactgccagtcccggctaattttatttatttagttatttgtattttagtagagacggggtttcaccatgttgcccagtctggtctcgaactcctgagctcaggcaatctgcctgcctccgcctcccaaagtgctaggattacaggcgtgagccccccaacgtggcccaaagatcagatttttaaggaagtctacgacacccaaaaggttaagaatttgtgatctagaccaacctcttcatttgacagatgaggtaaatgaagccgaaagatggccggtgatttgcccaggactagcatcagagcagaagtgggacttgaaatctgagtcagtctgccctttcactatacaccaattataatgaggtttacagatgcctgagctgctcctggctccagggagccctagcttgggaaacaccaagcccctacacaatgagatccagattaagaatggatgtgtcatcccagctccaccgctagccagctgcacaactatcccgcactctctgcacatcattttaccttccagagtagcattttaccttccagagagaagcattccctgacctccctacttctgaggaacagtatgaggaagcaaggacatgaaatgtgatggagctccagagatggggcaggggaggggaggaagagggaagaacagaagacagcaagtggttgttcaaagaggctggggctgggcactggatagatgggatggttttgttttatgcagccgtttcatcttctggggctaaatttccccatccctcacactgtaggtaacgagtctcctcaaactctgcccttgcatcctctgaattgatcagggtccttctttgtaaaacaaagcaaatataaaaacctggaatcctccccatctggtttaagcatgagaggattcagtaagggtattaagagggctgaaaaacagactagagtctgagcttccaggatgactcccagagccacactgcagatctggctgccaggggagcagctgcctccgtcaggagcaggaagttgccagttctaacccattctgtgcctgctgtgatctggtgccagcaaaaagggaggaccccttcctgccatgtccctgtccctaggtaactctgttcagagacaaagattagctcagattggtgcgactagcacccctagcagcaacggaaatgaaaaaataagggcagttttcttttgttttagttttcattggaaaggtaggatgcatccttgaaagactatcaaaatatcaagagggtgttgaaaacatttgggcagccatgaatacgtctatgatagtgccccttgagatgctggggacatagtcccaggagacttgctataacaactgtattttgaggtctctcattttaacttaatttttttttgagacagtgtctcactctgtcacccaggctggagtgcagtggtgtgatcatggctcactgcagcctggaccttctaggctcaagcaatcctcccacctcagcctcccaagtagctgggactgcaggcatatgccacgacacccggctaattttaaaaatttttctgtagagatggggtttcaccatgttacccaggctggtttcaaactcccagtcttaagggatcctcctgcctcagccccctaaagtgctgggattacaggccccacacctggcctaatttcaacacattttttaaaaattcattgacttctgtattatatgtgtatatatctcttatcatctatctagaaatatatatatacatacacacatatactatttataagcacacattgtatacatacatgttttatttaccataataatcacatttctctaaaaatcaagtagaattggggtgttgaggagaatatttgaagctaatccttcagtttctcataaccctcagctacacacacacacacacacacaggcccttaaagatcttagaaggaagggagggtaaatgtcctggtttatctggaacaggcctggtttatgcctatgggcccagcataatgattaataacacacctactgtctccaaagtcctcatttaaatgataaattatatagtcgtcttaatcttgggggacacctgacagtccctggcttctgggatgtgttgacagaaacgaaattgcaacctgacccagccagcccttggggaaaactaggtggtcagctgatttgtctttattctcctattttgagaggtcggacctccaggccctacctcaccacccccagccagttgaactaagacctctggggacatgggctcctaagtcctgtcccctaagaatcaagaatgcataatcacagatgctcacacacaggctacggtcctagccaagccacggccatcttattgctcaaaactttcctcctctaggaaccatccctaacactgatccactgtaaatataagtcctttagtatatgatgtccccacattgcataaaactcactgaacctgcttacatgccaattctgtatgagtttgattatttcgtttactacagtcctgcctttcccaccagactagggatcccagggttagggggctatctactaggtatccccaagtgcaggattgagttcttcccccatcaaactaggggtctctaatggcaggaaccagtctcccctatcagatgaagctcccaagcacaggagtcctgtaacctggaagacaatcatgtcatcttctctttacttctgcctttgccttcagtgcccaacttaggtccaagggaaagtgtaggtatggatcttgttctcctaactaccccgcacctgggctgggtgaaggggtgagatttgttcctgtgactccctttcaaagcagttctgatttttccagtctgcctgggcctccaggctgcagagtggactgactcgtgcttaatgaagcacattctccatctgtggtctgcccctcctggcagctccagctgcctggggcctggctttgggggaagcagtaaagaagttccttcatctcaggctgccccccactacagacacaccaagggatccactcccccaggccagccccaccccacccatgttaggctaatgagacccagaccccacaccagagctgtcctgattgggttgacctatttaattaaaacagcagcttccaaaaacggaggttctgctccaaggctctgcccctggcctcaaagacagactctggctgtctctggccagcttggactttggcactccttctcagaccccgactttcttctctccctccctccttccttctcctcatttttccaacatctgtgtccagaaaggaagaaaaaccgtgtttggactggcctccttccatcagtcatttttttccactttcaaacatcttgtctaaagcagagtcagttacataaacattccacctctttccataaattggccgcagttactgaacaatagcgttactgtgcaggggaagagggagctcaaggccacaccccacaagtgctggtcccccagccaaatagaaccagagactcattctttgaaagaaccaaagaggaaatccagaatcttcgggcgagaccttttctgctgtgcttggagtggttcctttaccaaagcccctctctgctctgccctcccggcagccatcttccatctcttaacttcaagctgtttgaacggatgcccaatttctgctttttccttaactgcctgacagtgtgtgtcactgtgtgtccctgtcctgagggcagagtgtgtggatgatggagttggtggtggtggtgatgtgtgcctgtgtgtgtgtgcgtgtgtgtcttttggcaagatttttggaggcacgccctcaagattttgttgccttttcttaaatagaagcagttagacctcactaattcagaccagttggagaaaagtccacaggggaaaaaaagtctgacttaacagaacacagttcttcttaggccctctcccttctcccaagtgcatccagttactggaactggactaaccacattggcagatacagttttgccagacttgctccgtgaataggtaaagaccactttttccattatcttgagtacctaattaaatgtgtgggccactcaaggtgtgaaaatgcgtttttttttcttttcatagtaggtcagatatcttcaacacttatatagtacttgtcattggcttagtgaactgtcttcttagccagactgtatgctctttaaggacaagttctatatctgaatccattcactatccagtgcctattgtagctccaagcacatagtaagtgtgcaaaataaatgttgaataatggatggatggatggataaatggatggatagatgaaattagtgaagtgggaatagaggggtggagaaagagccttggcaggggaagtttgaaggaagcttctattgacctccttctgatgaggagcagaagtagcagagagcgatgttagagcaagagcaagtaacagacagcattgccatcagctctcacagcaagtggcaggagaagggggaggcagagatggttggagctggggctggggaagtgagtggtaaagcaggagtaggaaggctatgattgaatggggttggtgggaagatgtaattgtgtgaatgggtctatgagcagctctggtgctagaggcagatgtgggtgtggtaaaaagagattgctatgggtaaactaagttgaaaaggtgctgtatcagttaagctgcttttggctgcaagtaatagaaaatttagttcagttggcttatactagtcattctcaactgggggcaattttactccccaggggacatttcacaaggtctgaagacatttgtggttgtcacaactgggatgtgggggatagtcatactggtatctagtgggtagtggccagtgatgcttctcaacataccacaatgcacaggaccacacataatgcacagctgcccacaacaaagtattatgtggcccaaagtgtcagtggtgatgttgagaaaccctggcttaaaccaataagaaacaatttattgttccatacaatcagcagtttcaagggtggtcattttatgtgttcattgaggaggtgggttctccccaccaggagcctttgcctctgccatgtattcggcctttgttccctcagggccacaagagactacagtggctccaagtatcacatcctcacccaagagcatcttcctgtccctttataaaactcaaattcctttcatgtctcactagccttgtgtttcatgcctattcctcaatcaatcctgggcgaggggattgccatgattaatttaattgacatccctcacccctatccccacactgacactggggtgtggaatgtgaaacatgaagaaaatgtatattctgttaaaaagaaaatgtatcttctggagaaagaagagggtgctgtgtggttcacaacaggctctccccagtgtattgggttcatgaaactgagaaatgcagtcctgggcctcaaggctggaacttgctgctctgttactcactttggattcacaccttcgttcattcattccataagcaatagatatttacggaatgcctgtgcgtggtgtaagggacataacagacatgtggttcctgccgacctggagctttcagtcttgtaagggagacactaatcaaatagtctcatggatgatgtgcaattaaagacagagacaggctgggatttaaaagcacatggagcagtgacagtatattacagaagacattacaaagaaggtgagggagagtcaggaagggtttccttggttgagctaagatctgaagaatgcatgaaaattagcttggtaaaagacagggggcagaagagatttcccgagaatagtaaccatgtctgcacatccctctgtggggagaagctcagtgcaatccaggaactgtcacagtggagtgcagagcagagatccaggggaggacagcagggattttgagaggttaggcaagggccgaatctcgtagggtttgctcatgttaaggatttttgtcttggtcttacgagcaaggaaaattcattcaggtgtcccaaacaaggatcttttttttttttaagtgtttaaagtttgtaattcctagtaggaaaacattatctgaacgaataccctaatggcaaaccactgtacatgcttcagctgcactgggggagaggggtaggggattatcttcaaagcaccccagctctcttgatgagaaggtcagaggtacactggtttgtatcattgcgacatccataaggtgatgtaggttgctttcccttcagcaagggctttatttatcagaaggacattatgcttgacctccaaatttggctgacaatttactgataagattcataaactttgggttgttctggtattgtgacatatttgctaggtgctgagccacatcctggaaggctgccataacttctggatcctgcatggctgcaagaacctctggatgaccaagaatttcattgattccaggcattctggccattcattccaggcatgccccctcccattccaggcattcctccgggaaaattaccaggcattcccccaggaaagccacctggaaaagagccatactgagctcctgactgtcgtctggcttcttcctccctctgggctctctcatgctcttctcgagccttcttaactctttctattctttctttgatctctcgctcttcacgttttcgctcatactttctccagtgttctgcaattgtgccctaggttgaacttcttttagcattgcactaacatcttcatcataatccaatttacaggcaagagcaagatcatgggctgcttcttctcagtggcctataagtctgtgtgctttcccgccgggcgcggtggctcacgcctgtaatcccagcacttagggaggccgagatgggcggatcacgaggtcaggagatcgagaccatcctggctaacatggtgaaaccccgtctctacttaaaatacaaaaaattagccgggggtagtggccggcgcctgtagtcccagctacttgggaggctgaggcaggagaatggcatgaacccgagaggcggaggttgcagtgagcagagattgcgccactgcactccagcctgggcgacaaagcgagactctgtctcaaacaaaacaaaacaaaacaaaaaacaaaaaaattagcccggggtgatggcgggcgcctgtagtctcagctattccggaggctcaggcaggagaatggcgtgaacccgggaggtggagcttgcagtgagtcaagattgcgccactgcactccagcctgggctacagagcaagactccgtctcaaaaaaaaaaaaaaaaaaaaaagaagtttgtgtgctttccctcgccacttgtaaggctgagctgaatcgggatttatttcaatggctctgtcacagtctcagatggcagcatttggcttctgtaatttgacgaagacactggccctcttggcatacaaaatggccaagcaaggattcagcttgatggcatctgtgaataagtcaatggctttctgcagtttaccatcatttagggctcaatggcagccactttcttatcatttgcctgatccctcatctcctctgttatctctgcattttcatctcccatttcttgaggggcatcagtgtctggttcaatcacaccttcattatcaatttctagatcactttcctcacttggttcgtctgcctttaagtcttcctccaccttcttactatcaggtttttcttccttggtattttcttctgatttagctttctgagtagcaggtggtactttacccgccatgctctccacccactctctcaggaagcgcatttccttggtgtatggaacactcagatcctgtttacacattttcacaaaggcccgaagttcattcgctttgtgggggtccgtggtccggaggcggtcggcgaagctgaggggctgcagcccggttccaggctctggctccgcgtgaccgcgcagaaacgggctttttttttctttttttgaaacagagtctcgctctatcactcaggctggagtgcaatggtgcgatctcggctcactgcagcctccacctcctgggttcaagagagtctcctgcctcagcctcccgagtagctgggattacaggcacaggccaccacgcccagctaatttccaaataaggatcattttgattgcagtgtgaagaacaaagtggagagaagcaggctagatttgggaagacaagaaactactgcaggggtgcaagcaggtgaggtgggatggtgggttggatcagggcgaaggtgggaatgtagagaggttgtgagatttaagatacatttggccagacaccgtggctcaggcctggagtcccagtacttcgggaggccaaggcaggtagactgcttgaggccaggagtttgagaccagcctggccaacatggcaaaaccctgtctctactaaaaatacaaaaattagccaggtgtggtggcacgtgctgtaatcccagctcctcaggaggctgaggcaggagaattgcttgaacctgggaggtgaagattgcagtgagctgagatcatgccactgtactccagcctgggagacagagcaagactctgtctcaaaaaaaaaaaaaaaaaaaaaaaaaaagagagacatttaaaaggtaaaattgaccaaatttattgatggatttcttgtggaccagtggggaaaagaaagggttaaggacggattcctaaatttctggattcagaaaatggttggaaggtagagccatttattaagaaagaaaacagtggaaaaggatcagaactctgggaaaattagagttcagttttcgtcgtggtgagatcacagctcccttgagacatccaagtggagatgctgagcaggcaattcgatatatggatccagagatcaaaggagaagactgcgttgaaaatatacatttagagaatatcggcatacagatggtatagtgggtgtctatcaccaagtaacaaattacctcaacacttggtgacttcaaacaacagccatttattatctcttacggttttgttgtattgagactttggacagtgcatggaggggatgactttgttctacagtgtctgaggtctcagctgggagactcaatggctgggacctgaaactatgtatatttttttctttcttttattttatttatttatttatttatttttattattattttttttttgagacagagtctcactctgtcgcccaggctggagtgcagtggtgcgatctcggctcactgcaagctccacctcctgggatcaagtgattggttcttcagcctcagcctcccgagtagctgggactacaggtgcccgccagcatacccagctaattttttgtgtttttagtagagacggggtttcaccatattggctaggctggtcttgaactcttgacctcgtgatctgcccaccttggcctcccgaagtgctgggattacaggcgtgagccaccacgcctggcctatatgatattaatgttggctgctggctgagagcttagctagagtcgttggctgccaacacccacatatggcctctctacgtggcctgggcttcctcagcacaggatggattgcttctaaaatcaagaaacccaagagagagatccaagtggaaactgaattcttcaaatgacctaacctctgaattcatacagcgttacttccatttgaccaaagaagtcataagctgccaggaagattcaaggggaggaaacttagaccctacttcttggtggaagagtgtcagttatgttttaagaggagtatgtgggatgggataaatatataggtgtgaccattcttggacaatactatgagccacagatggtggtaacaaataaggtgtcccaaacaaaaacaatatggatgagaagaggagagtgtctaggatggagatttggagttatcttacattataaagaagaagagtctaaaaaaaaaaggcagagaagaagcagacagggagtagaaggaaaaccagagagcatggcgtcgcagaagccacggaaagaaagttcactcatttattcactgagtatttatcaggcacctactgtatttatcaggcacttataccagactgttctaggttctgggactgtactaatgaatgcaaaattccttgacttcatgattattacattctagaagagaactatccagttagttgaagactgaaaaaaaaatgtgccttggacatagtcacttgaaggtcaatggtgatcttcatgaaaatggcttttataagaaatggggaccaagcatgatggctcatgcctataatcccagcactttgggaggctgaggcaggaggactgcttgagcccaggagtttgagatcagtctgggcaacatagcaagaccacatctctataaaaagtaacaaaaaattagccaggcatggtgacgtgtgcctgtggtcccagctagttgggaggctgaagcaggaggatagcttgagtcttggaggtcgaggccatagtgagcagagatcatgccactgcactccagcctggatgacaaagtgagaccctgtctcaagaaaagaaaagaaatggaacagaagccagattgggtgggttgaggaatcaattggagatggggagtataaaaaatggattggggaggtaaaggcagctatggggctctgaggataaagacaaaacccctgacagggcatttccacttctctgtagcatgtcctattatcaggctgcattggaaggggctgaagccccactgtgactggcaagggacctgcatcatttttttctgcgctccgctcagcattgttcaggagtaaccaagaatgtgctgccttgtgcagttccagcctccaacccttagtcacagctctgtcatctcctgcaccttcatggattctttcctggattgtttctttgttgctgctaaactccgtcctgagcttgcagcccagattctagccacgttgatctcctcacaagctatgcctgaactcccctccttccttctatctatccctttcactatttgagttcacttcaaaactccttctccatgaagaaggacccacgccagccctcatggatgctcttacccactgaaggctgcactgagctcagctctgcaccatgcacggttctggctggcctgtgatgtttgcgtcttaatctcccacaccacaggtaacttatttgaaagcagaccagggtggagatgtttcctatgtctttacagtgtccccgaggcaagctcgatattggactaagtaaatagcaggggcccaatatctgttgcatctgttgaatgacttgatgcagagcctacctgagccctcccacacttgccccagacgacctgctctgtgagcctgtagcagtagctgaatacaggataggaatgggggctgcttttctcaagactctgcttgcagagctcctggggaataaacagcaggagaggccctctctctactcaagaatctgagttcaatctggggatagaggaagagggttatagttccccatccccataagcacccccagataaatcaaagagaacacaccagcccacagcagtagctgaacaagcccatttaggtatggcaaatagataacagaataaaagactgactgaggcaggatgatcttctctggtagagttttatccaagtgaaaggtcttaagcttgatgtgggagacatacaaatgccacttgttagccataccaccttgtacaaatcacataaacccctctgagcctccgtttcccaaccttttttttttttagaagctgagtcttgctatgttaccttggctggactagtggtggactcactgcagcctcaaaatcctaggctaaagggatcctcctgctcagcctcctgagtcactggattacagacatgagccaccgtgtccagctcccaagttttctaatctttaaaattggaataataatacccaccacaggctggacatggcggctcacacctgtaatcccagcactttgggaggctgaggagagaggattgcttgagcccaggagtttgagatcagcctagggaacaaagcgagactctgtctctacaaataataataataataataatacctaccacatagaattgctaggagaagtaaatgagataatgtacagttggtcctgttagttgtgacctctgtatttgcaaatttgcctactcacaaaaatgtatttgtaaccctcaaatcaatatttacaatgtttttggggtcatttgcagacatgcacagagcagcagaaattcaaatcacgttcccagctgaggctggataaggcatgctcttccttcttctttcagccctcatgctgtaaacaaatgccctttttgcagtctatttagtgccatggttttggcattttttgtgctttttcttggtgatttcactgtctaaaatggtccccaagcatagcactgaagtggtgtctcctgctcctaagcacaagaagactgtgatgagatttactgagaaaagaagtctgttagataagctttgttcaggccgaaatgatagtgttgtgggctgtgagttcaatgttaatgaatcaatgatacatacttcatagaagctcataaaacaaggctatgtattgattggttaatgaaaatgttctgaccagaggttcgaggtctgcagtgattttgtagggcgtaagtaccctaagtaatgagaatgggcagtatgtagaagtgcctatatagtgcatggtgtagacgagacgcattgagaagtgctgactcctgaacttggtgagaagatggcagaaagcactccaagcagtttctttccatggttgtttgtgctttgccgggaatttggatcctgtaagagtcaaacaatttttgctcataagtttctgtccctttgcatccattgaggtacagagttaaaaaaaaaaaaaaaagtttctgtcttatttctcttgtatcctgtgggcgactcatgtttctgccccagacagggagcttaggcaggggctgagtctccaaaaggactatgtctcttgccttctttgtgttttctaccctccttcttgtttgacacccagaggtcccaactatcttgtgtttcagtggttactctcactgtggttcatcctggggtgggtggaggagcaaaagccctgtctggatccccgttcccctgcagggtgacagagaagtctctaagccccggccatgggggaaaatgtgggggcgggggaagggggaccctgaccaccagctttccccccataggaaaggccctcccctattgggctactgtcttttcccaggtggggacgaaagcagcaagaactaagaaaaaggagtagaggttttctccacacatgggtctgattagactctcattcctgaggctctctgggcttgaacactttctctccaggaagccagacagccagttagagaaaatctgcaaacctgcactgaggccaggcttcaggaggcagccccgggtgggatggaagggacgggagggctgtgggcacttgatctttatcacagccctcagcctcccggcctcctgccagctcccatagcccctggccaggatcctccaagaattcagagcctgaggattgtgttaccttctgaattccattagcacaggccagctgggggcggggatgggggctggctagggcttacctgaggagtcgtttggtgccaagcaggcgccttgggtcacttgtttctgcctttccagctttgattccccctttgccttcattctctcacgttctctgcagggaaggacatgaattgtgtatatgttaatataaacaaaaaaagataggggtttttcagatgttcatagggaagagaagttaacgatgatactaataatagcaaaactgtgtgccagacactgttctaattgcttatatgtatacagtcctgcattgtttaacaaaggggatatgttctgagaaatgtgtcattaggcgatttcattgttaggcgatttcaccattgtgtaaacatcatagagtgtacttgcacaaacctagatggtagagcctactacacacctagggtgcatggtatagcctatctctcttaggctacaaacctgtacagaatgttactgtactgaataccataggcgattgtaacataggcaatggtaagctctagaatgccacaggcaattgtaagtgttttttgtatgtaaacttatctaaacatagaaaaggcatagtaaaaatacagtataaaagataaatgatggtagacttgtatagggtactcactgtgaaaggagcttgcaggactggaagttgctctgggtgagtcagtgaacgagtggtgagtgaatgtgagggcctaagactgtgcactactgtagactttataagcactgtacacctaggttgcaataaatttataaacaatatttttctttcatcaataacaaattaaccttagcttgctgtaacttttttacctaataaactttgaaaaattttaaaacctttttgactcctttgtattaacacttagcttaaaacacacattgtacggctatacacaaatttttctttgtatatttgtttccttatgtcattattctatatgcttttttctatttttatataacttttttgttaaaaactaaaacacaaacatacacattagcctaggtctacacagggtcaagaaccacctccatatcttgtccaactggaaagttttttgtttttgttttttttgtttgtttgtttgttttttgagacagagttttgccctgttgcccaggctggagtgcagtggtgtgacctcagctcactgcaacctctgcctcccaggctcaggcaatcctcccacatcaacctcccaagtagctgggactacaggcctgtgccaccacactggcctaatttttgtgtaatttgtagagataggtgtctcaccatgttgctcaggctggtctcaaattcctgggctcaaacaatccacccaccttggcctcccaaagtgccaggattataggcataagccaccacgcccggccccattggaaggtctttgggggcaatagttgtctcctgtgataacaatgccttcttctgtaatatctcctgaaggacctccctaaggctgttttacagttagctattttaaaataagtataaggtgcatactctaaaataatgataaatagtatcgtaaatacataaaccactaacatagttgtttattatcattatcagttattatgtattgtacatcgttgtatgcttttatactagtaggtttgtttacaccagcacatgagtaatgcattgcgctacaatgttacatcggctaccatgtcactaagtgataggaatttttcatctccattataatcttatgggactaccctcatatatatgggtgggtcatatatccttgaccaaaacatcattctttatgtggtgcatgactctattagcacatttaaaaatcaaaatatctctattttacagatgaggagattgaggcagaactgtgttggactacagtttcttcataaccttaaagaagttagacaaaatgaatctaaagtaacttccggcagagcgcggccgaatgatctccgctcactgcaatgctaggctcatgcttgtaatcctagcactttgggaggcttaggcaggcggatcccttgagcccaggagttcaagagagcccaggagttcgagaccagcctgggcaacatggcgaaaccccatctctaccaaaaacacaaagattagccagccatgatggcgaatgcctgtagtcccaactacttgggaggctgaggtgaaaggattgcttgagtctgggaggcgggtattgcagtgagctgagatgacaccactgcactccagactggacaacaagccagatcctgtctcaaaaaaaaaaaaaaagagtaactttcatgttcatttttcatttgtttttctttttcttggtctctttccataacaagaaggaggaaaaggaaacagaaagaagaatttatttaatctttactacactgggctctataacaatggcagcaaactgtgttttcaagagccagaaagtaaatattttaggctttgtgatccatacaatgtctgtcataactattcagctctgtcattgtagcaccaaagcagccagatacaatatgtggaccagcctgtgtagctgtacttcaataaaacttcacttaactaaacaggcagagggctggatttggccctctgacctgttgctttataagattacccaggcaggggtcctgccctcagaaagctcaccttctgctccaggcttcactgtgagatatatgaaggtgactgacatattccatttgttcgtgcaaaactacatatacatgtggacacacacacatgctcatacacacatgcacatagtgttccccagctttacatgtatttacacacaccacaggcctcttttacacattgcctggtggtttacatctccaaaaggaatagtcctgctgggcattcacgatgttctaagccctatgatcagtgattttcatgttttctcaggtcacccttcccacagtttcgtccataggaattttggtccctgtattagtttgttagggctaccataacagagtaccacaaactgggtggattaaacaacagaaatgtattttctcacaattctggaggctagaagcttgagaacaagttgtcagtaggagccaggcgtggtggctcatacctgtaattccagcactttgggaggcgaaggtggggaaatcatttgagcccaggaattcgagacgagcctgggcagcaaagtgagaccctgcctctacaaaaacattttaaaaattgtctgggtgtggtggtctgcacctgtagtcccagctacttgggaggctgaggtgggaggatcacttgagcccaggagtttgaggccacagtgagctacgatcacaccactgtattccagcctgggcaacagagtgaaactccatcttaaaataactaactaaacaaggctgggtgcagtggctcatgcctgtaattccagcactttgaaaggctgaggtgggtgaattcacttaagcccaggagttcaagaccagcctggcaaacatggtgaaaacccatctctcctaaaaatacaaaaattaggccagtgtggttgcacacgcctgtagttccagctacttgggaggctgaggcaggaggatcacttgatcctgggaggcagacgttgcagtgatctgatggagtgagaccctgtctcaataaatataaattaattaattaattaattaatggtgtcagcagggttggattctcctgaggtttctcttcttggcttgtggatggccttttcctctttgtatcttcatatggttttctctctctgtgtctgctatggtctgaatgtttgtgtttccccaaaattcatgttcctatcctaatccccagtgtgatggtattaggatgtagggcttttaggaggtgattaagtcacgagggcagagccctcgtgaatggaattagttcccttatacaagaaaccccatcccttccaccatatgaagacacagcaagaaggtgccatctatggtgaaagggacctcaccagacactgaattttctggagacttgatcatggacttcctaccctccagaactgtgagaaataaatatttgatctcgataagccacctagccttgtggtattttgttatagcagcccaaacggactgagacagtgtctgtgtccttatctccttttgttataaggacacctgtcatgttgcattagggcctacccatatgatctcattttaaatgacccttttaaagaccctgtctccaaatggtgccattctaaggtactgggggacagggccgcaacacataaatttctgggggatacgagtcaacccacaacaatcccatttacagaaaagataacagaaaagacactgagaggccaagtaattggcccatggtcacagagcaatttgattgcctgacttcaaagcccatgttgctgcatgtattagtagttcattcctgtttattgttgagtagtattctattggatgcatacattatgttttcttcttatgcattaatttttttaattttttttattttttggagatggagtttcactcttgtcatccaggctggagtgcaatggtctgatctcagctcactgcaacctttgcctcccaggttcaagcaattctcctgcctcagcctcccaagtacctgggattacaggtatgcaccaccacatccggataatttttgtatcattagtagagatggggtttcaccatgtaggccaggctggtcttgaactcctgacttcaggtgatccacccgcctcagccacccaaagtgctgggattactggtgtgcaccaccttgcgcccagccatgcatttttaaattgatgaacatttatgttatttccagactattaggaataaagtcactgtgagcattattataccagtctttttgtggctgtaactctaatttctcttgcctaaatacctaggagtctaattgctgagtgatagaataggtgaaacatttaactttgtaagaaactgccaaacagttttccaaagtgcttattctattttcacttttatcagcaatgtatgagatatctggttgttccttgtcatcatcaacatggagttgtttttccctttgctattgagttggagttcgtgtgtgtgtgtgtgtgtgtgtgtgtgtgtgtgtgtgtgtgtgtgtgtgatcctttgttgaagagattgatttccggtatgatgatttgggaagctccagtgaaaatgatgaaaatcacttttttaaaaccccaaacacttaaaggctctggaaacatgcctaagggcatacagcaaatgaagaaatatctattaaagaaaatctacaaatatctggtaagaaaaatgataatctattgtatatgaacaattgtttctttgtagaaattgacaagcgaattctcaaattcataaggatttgcagaggacccagaatagctataacaatcttgagaaagaatcttggctgggtgtggtggctcacacctgtaatcccagcactttgagagactgaggtgggcgggtcaaaaaaaaaaaatacaggtcacaaagactttgctgctaaaacaggctgcggtaaagaatccaggcaaaacccaccaaaaccaagagggcaataaaagtgacctctggttgtcctcattgctcattatacgctaattataatgcattttaatgctaaaagacactcctcccagcaccataacagtttacaaatgccatggcaacatcaggaagttaccctatatggtctaaaaagggtagaaaccttcagttttgggatttgcctacccctttccctgaaaactcatgaataatccaccccttgtttagcatataatcaagaaataaccataaaaatagccaaccagcagctctcagggcttctctgcctatggagtagccattctttattcctttattttcctaatcaacttgctttcactttactctatggatttgcctcgaattgtttcttgcacaagatccaagaatgctctcttggggtctagatcaggacccctttcctgtaacacaggataagtgctctcccctctctctgtgggacgagggcccactgagtacttttcctagagggaggtaaggaaacaaaggattttccttagggaaatggcccaaacaccttgtgggccataaccaaacgttggtaagtacactctgatggtacttatagaacctgacacagggtttcactagctaaggaattattttggttccacccatagtggaaacaatagaagtaaccctgttgtgattggcagtcccaagggggccttgtgtctttggatggaatttatagatggctctttgctgaccagagttcatcataatgggtaggggaagggctgagtgcataagactggcgttggttgagtctttgaaccagtaaaatggctccctttagatgtgggagcctgacaaccaaaattagtgactgaagcataagtttcaaatcatcaaggtttattaagccagcttgagggtgcgcccaggaaaaatgagagtcacagacacatctgcagctctttttttccaaagaggttctcaggaggtttgatatttatacattttccttaaaaaaggaatgggagcagtgagaggaattactacatatttgtcagactttagttagtgcccaggaaatctacattttacataataaaaggtgaacatttgaagagaagaggaatagaggaagcagatgtctcagagaagggtgaagaagcgactaatctcatctcgtctttgttctatacctgggaagataagttagtcattgacattatcagcgtggagtctttcgaaagagctggtttctgtgtagcccttagggaagaaagcctaatggcagttatcaagggagcagatgtaatgaggtatgtccaaccttctatagcatcatggccaggacttagcttccaaggtttctctggggtccccttggccaagaggggatcacttcagtcagctagggccttggaattttattttttatttctcaggtctcagtaaggcaacctggggaagagtcattccccacctggggattcttgaagacacatgttagatataaatgaggcttggtgagaaggggggatgacaggagtcttggggacctgcctgggtatcatctttcctactctgaacttgtccgtgtgaggaagcacccaaggaccaacacggagatgatatctgcctttaggtccctcagcccagatccacggtggaggcagaattaattaaggtgtgagttggtgactccctccccgcatttccccatcatcctgtctctcctttgcccaagacaaagccctcttttaaaggctaggagcttctgctactatgagaatgtgagaggagaaaggaagaaaccagtcaggcaggcagttagggtgggtcctcagttaaattctttcaaacaaaagaacagcctgaaaaatcaagctgcaggcaaagatgaggaaatttgcacagggggtcgtgcctaagacattcccacagctgcacagataagaacaactgcacaggtgacttgcccagatgtgcttgcaatggaaaattccgtcctttaacacatatgcgtaaggggaacaaaacaatatggagtaactcaagctaagggctcccatgcgcattaggagaatgaggtggagctaccagaaatttgtgccttatgtacatgagaggcctagcccttatcagtttcttataaaaggctttatattcaactataaaaatggcaacccattcgggacccctctctgctgtggagagctttcttctttcgcttattaaactttcactccaacttcatcctttgtgttcatgctccttaattctcttggttgtgagacaaagaacttggggtgatacctcacaatgagagactgctacattgtggtacattgctgagactgtaacaaaagcagcctttgcttactacatatttcatcaagaggaacttacatatttattataaggtttttacttttaaggactgaatcccagtatcatgtctctgctcagtgctacaggaaagcaagtggcatccaggcagagcctgtggagatctatcactgtggggccaatttaacctgcagtaaagaggcttgtgcatttgagctttatagtaacagccttcaaatgctagttccatgtccatggaacacaaatgaccatgtgtctgagaaagagtttgggcatgcaatgtagcagcttcatgtgaggaattgtatttgtcaaactaaggcagcctaaactgttggaacttatgcttgatttaagggagttgatgatgtaggcaggggagacaacccagagagctcatctgcagtccacagacctcctaaagaatccataagtggagctctgtctcaatataattggtttcctaggtaatcctatacattttatcttatgtatttaaagacactattcagagaaggggtccataggctttactagtttgtcaaagtcatctatggcaccaaaaagactcaaagaataagaacctagtacctctctctcctttctcctctcttttcccttttcttttctccatctcctttctcagtttttatagcagggcaattataagacaaaaaagcccgctgttactaacactgatccctcttcacagcatacttttgatatgtttgtttaaaaatctacattcctatcaggagaggagtggggaaagacaaaggagatgacctaatttttagtttctagtgaggaagggatccattgtgtggtttatttatacccagttccctccagaaaagccttgggacaaatataaacatttcaacatatgtaaacctatgttttaggcattaaacagcaggagagagagcagggagtgatcctggggtgcttgcacagaccttgctcagctgtggaaatcagcattagcatttggctctattccaaaaagctccttcatcaccttcagagcatatctcagaatctaataataatttaagtgagtatttttgtcaaactttaaaagcttggcacgttctgtcctttaatatcttccctcagaaaaggaaagctgcttaataagtctcaatggcaatggatggaatcattaatcaagaggaagaaagttttttttaatagtcatttgacttaattcatcttaatttgtctccaaaatattttcctagggaggaattggacaattcaagtcttttttggtcatcagcattgataaggctttggtcctcaggtagtagtggggtcattgtaggaaagttccagcttccaattctttatgtagtttggtttttttgaatgttggtcaaaaacaagatggtgcaactttatcagacgttttcagaaatcattaggaataaaaattccattacgatcccaaaatatgtattagtcctatagcagacacaattcattgcccactccccatagtcatttttccttccctttccctccattcctttccctgggcacatgactacccagctaaagaccacatttccagcctcttttgcagcacaagatggacacataactaagtcttggccagtgagatgtgagcagaagtggtacgtgtactttctaggtcattcctttagcaaaagaatgtgtccactctcacctttcttcccttcccatgagctggaaggtaggagttatggcaggagctggagtagactgggaggtgaagccacatgctgagaatggcatggcaacaaggtagaagaaacctgtctgtcctacaagatagaagaagcctagatctccaacactacagaaccaccataccaaccctgaaccatctactcattcttttatgtaagagaaatatgctttgttagagacaccattattttggcctttggtatagtagctaaatctgtaccctaacccatgttgatctcagtcacacttcttcttactcctagttactcttattctcttctgggctccatttcattttgccagccaacctctgacattttgctatcatgatacattgccaaagctgttgcaggtgagcagggagtacctgggccagcggtgcaggggtaaaataatttaccaagacagttgtagacaaaaacaaaaggcagatttattagagaaagtaggaaaatacgttgcaaggaggcaatgggcagccagcagaagagaagctaaccgccaggaaacaggcttgctggagattctatagaagagtgtttatgctgtctgttgaagagggctttgtgcagttctgataacaccaaggttgcagtgagctataatagcttgcaggtgtctggtgatagttggatgcaggaagattgtgagttatttgtgcaggagggctatgtgtcctggaccatgaagaaaggaagacttgtagtttatctgctttctttttttttcttttttttttctttgagatggagccttgctctgttgcccaggctggagtgtagtggcatgatctcagctcactgcaacctctgcctcccaggttcaagcaattctcctgtctcagcctcctgagtagctgggattacaggcacacaccatgacgcctggctgatttttgtatttttagtagagacagggttcaccatattggtcaggctggtctcgaactcctgacctcaggtgatccatctgcctcggcttcctgaagtgctggaattacaggcgtgagccaccacacccggccgtttatctgctttctctctttgctttcccttggtcctgccagcctaactctgtttctctaattaggactccacaaaagcttcctcagtcactcgcccttcctgcagcttatatgacttcctcatccaatcaccactccacatctcattctcaattctccaccatggcctacctctagataatccgtgatctctaacttctgcaaaggattcatagagataaagcaacaaaagctgccaatatttattttaacacttaacacatgccagtttctattctaaactaattatgtatgaatgtaatgtctaaactaattacatctcattttaacctttcaccagcccttcaaggtaagtagttttattccctccattttgaagatgaggaatctgaggcacagacaggtgaggggatgcccttcccactcatcctgacagcagttctgactccagaaaccctaaacagagacaagcaagatcagaaaagtccgtgaacgaggcaggtgaattgctagaggccaggagtttgagagcagcctgtgcaacataataacaccatgtttccacaataaagttaaaaactagcctggcatggtgggcacgcctgtagtcccagctactcaggaggctgaggttgggaggatcccctgagcccagcagtttggagctatggtgagctgtaatcacaccgctgcactccagcctgagtgaccctgcctcagaaacaacaaaagaagaaagagagaaggaaggaaggaaggaaggaaggaaggaaggaaggaaggaataaaggaaggaaggaaggaaggacggatgggagggtgggagggagggaagagaggaagaaagaaaagtccttgaggtcactgaagagtatgacggccaggctatctatgaccagtggcagctgctgggtggtggagacaggctgagcagttttgggggactcctgcatctctgtctctcaagaaacggcacaacttttgttggggttctgctctctctccctcgctcccaaacacacagaattccatggttgttttaaatggtgttctccccagtgattccctcagaatcctccaattcctatccttgggctctctcttattttttattttttcctttgtcaagctttctgcttactgagaaccacataatagcagaaagcaacttaccaagccagaccccagagagccctacaagttggaactgggtctctcctctcagcctggggacaactgtgtctctcttccccattaggcacattgaccaactgacagatattcagtatggtcacagagaaggcaatctggagtaaaagatgcttatttaaaatggaaaattcttcctctctcatccttccttttttctactgaaaatgtctctctgtcccttgctccctctggcagcttcagcaaggatgatgtgtgatcacatgttaattgagttgtaattcctcctcctgttaaagtgggtagttaattgttcatgggaaaatttaatgctgttgtactagggatgtcacagagagttcttccttcttcacaccagtatgtagtccatgctacatgtcagctgtattgtcattatcctgccaaatggatgaaaggattgcagtggttacggtcaattggcactcagcatctagtccgccttcccaggtagaatttcctgtttgatttacagaggctggtaaactaaactcttcatttctcagactaccttgcagctaggtttctagaagagaattagattctcccaattagatgtgcctgactcaagtgagacaaaggctctcttcctgcagctttgactattaagtatctactggagaaccaagcagctaagcttgtcctacctcagggtcttgctcagagccatccctggaaccagcagcaagcatggctgtacagacgttatgtttctcaatagcagacttccagtgctctgtcaccagccttgtagttgtcaggggcaatgatgtggtggcagtgttggtggtggtagcagatgcctgaatccagctatggctatggccacatggatttttaattcatcagcttcagatttacccaccttggtagcagctcccctattgggccagttctggtgtactgttctgaaagttgttctaggaggcacagtctggggtcggctgcttcagccctggcaataatctttcaggcgtctaattcctgatactacataatctttttgtttaaaattggtataatgggttctgtttcctatacctgaacgcttttaaaacgtggaggggggggggggttgggggtttggaagtacaaacagctgagagccatggagaaaaattctagcatttggctatggaaaggggacagtcatagtactgttcttgctgaaatgcccatgaaaagctagaaaggtattttttatgcctatttgtattacaagttggtcagagggcttagatttaaagcttgtcctaggaaatttcattcatttagtcattcaacaaacctttattttctaccaggaacgatactaggcactgtggccaaataaagaataaaccataaccatgctctccaggtgtttagagcaaacatccaaaggaaaattaaaggcagcttggaagaagcatcttaatcaaagtttgggaataagaccaaatttagattaaattgtgattgatgacagttaaaattacccaattctgtagagctgttccccttaaattctttttggagctgacataagtcagtagataaatatcactgcctatgtgtttcattgaaatgcttgtttcctgagcatcttccccaagtggagtgtttgtttcatatgcattagcaaaaaattacatttttcatttaaaaaatatctagaaatgttattctaaactagaactgaggtacaacacacatactgtggtttggaatgtgatatcaaggaatctatcaccagctcggcacagagcattccaactctgggaaaaatacagcatcctaaatgacgaatttgccagtggcacccttattgaccaattattaggttggtacaaatgtaattgcggtttttgtcattaaaagtaatggcaggccgggtgcagcggatcatgcctgtaatcccatgactttgggaggctgaggcgggcggatcacctgaggtcaggagttcaagaccagcctggccaacatggtgaaaccccatctctactaaaaaatacaaaaattagccggtggtggtgtggttgttgatgcctgtaatcccagctactcgggaggctgaggcaggaagaattgcttgaacccgggaggcagaggttgcagtgaaccaaggtcacaccactgcactccagcctgggtgacaatgagactctgtctcaaaaaaaaaaaaaaaaaaaagtaatgggaaaaactgcaattacttttgcaccaacctaatatattgagtgtttattttaacctctttaaaacaaaaacataactcttcattttcttccccaaacatttgtttccatgagggcaaggaccttttctattttgttcactgctgtatctccagcaactaaaaatagactcttgcacacagctgggctcgatcaatattatttgaatgttgaatatatctttttaaaagattttctgggctgggcacggtggctcacacctgtaatctcagcactttgggaagccaaggcaggtggatcatgagatcaggatatctacagcggcctggccaacatggtgaaaccccgtttctactaaaaatacaaaaattagctgggcatggtggcaggtgcctgtaatcccagctacttgggaggctgaggcaggagaatcgcttgaacccgggaggcaaaggttgcagtaagccaagattgtgcccttgcacttcagcctgggagacaagagcgagacttcatctcaaaaaaaaaaaaaaaaaaaagatattttctgggccaagctcagtggctcatgtctgtaatcccagcattttgggaggctggggcaggaggattccttgaggccaggcatttgagaccagcctgagcaacatagtaagacccccatctctacaaattttttttaaaaaaattaactaggcatgttggcctgtgcctgtagtcctagctactcaagaggctgaggtaggaggatagcttgagcacagtggttcaaggttatagtgagctatgattgcaccactgccctccatccagcctgagtgacacagcaagactctgtctctaaaaaataaaaaaagatccttctggctaatgtgtgaaggataggctatggggtgcaagatggcaagcaaggtggctacagtaatccaggtgggcaggtgagagatggtggtggcttggattaagggtctttggtggaagtgataagaagtagtctgatttgggatctccttagaatggaaaccagtcaagacctgccaatggataggctatggagtgtgagaaaaaaaaaaaaggaatcaagaatgactcctaaatctactgctagagcaattggaggaatcacggtccatttaccggaactctcggcatagggacagcccaggcagcagcctaggcaggtgtgtacatggcctgttcaaggaagagcaaggaggccagtgagcagtgagccagaacaggcaggagctgaggtcagagaggtgtttggcacagatcatgaggatcttgtcaaggaaggtgaagacagttgatgttgttctgagtgatgggaagctcttggaggtacaaactgcaagtgttctaacacatgatcacatttgcatttttaaaggtgactcaggctacttgtgtagaaaatcgaccacagaaatgaagaaataaaaatggagagactggttagagctatagcaggggagcaggtaagagacagtggtggcttggaccaggttggtggctggggtggggatgagaccagtgagatcatgtctgcttctgaaacatgccaagctcattccctcctcctggacccttccctggttgttcctactaactgggctgcgcttcactcactattccacctcatgcaggtctctttccaattatcacctcctcagaggtcttccctgaggaagatcccctttaacatggtgcctggtgcctcctctctcactcccctttctttgctttattttactcactctgtgtcatccactgtttttatattttactgatgtatttttatcatcaacttcccccactaaaaggtcaactccatcaggacagaggctttgttgtacccactgctgcatcaccagcctctaggtccgtgtctgcaaacaggtatttgttgaatataaacgaagcacttaggtaggtgctgggaagattttctttatatgacaaagggtttcctatgcaaatattcagtgtaaacatgactaaaggacagggaatattcaaactatgttaaggaacatgctatgttagggaactttctacgtaggaaaacttttttttttttggagacagggtctcactctgtcacccaggctagagtgcagtggtgcgatcatggctcactgcagcctccaccttcagggctcaagtgatcctcctgcctcagcctcctgagtactgggattacaggcatgcaccaccatgcccagctaattttgttcattttttatagagacaatgtctcactatgttgcctaggctggtctcaaactcctggcctcaagcgattctcccactttggcatcccaaagtgctgggattacaggcatgagccactgggcccagcctacacgggggaacttctcattgacatacagtcaacaggtgaggggcatagcagcaggtcgattcttatgtatgtgagtactctcttgcaccaagatacaggtctaaacgaaaaaaatttagttatttttaataaaaatgcctggttcatatttaaaaaaatagaacttctggggggtgtaattcctgtaattcctgttaaaaaaaaaagtagcacgtattcacaatatagatctttacacaaacacatgcattgagcaaatacatgttgtcttattatttttgaatgcagtcttttctccccatttccttttctatggtcagccctcgccccattttcttcccaccataacaccttgaatatggagtatactttttttttatgtaattctgtatagaatatatacctatacacatacccaggggaatgctgtttattgttttacaatgtgggatcatttatacatcttttctctcctcatctcaacaccacctcatagaaactcctccaagctatctggcatactctgattttccatgttcattggttacatactatgccatggtgtggacgtgtaataatgtgttcagcttttccctcttgggaggcaaccctctgtttcctggcttttgctccaacaaactatgccataacacccatctttgaaatgtacagtttcagagcaggaggtgaagttggatgctctttcattcaatcccacagttaagataaataaggatcagaaaagtaaaagaacatgcccaaggtcacacagctatttgcttggtgctttgtaaaaatttgaatagctattatttcacatgctcttcacaagcagggcaagtattatcaggtcaaccttaaaagtggagaaactgaagtcaaagagaccaattgctttgattttattaccagtgagggctaaagctagggcttaaagccaggacttctgattcctgatccccagtagcttcttccactcctgcgttgatggaaaccattaactcaaaacttctacagggcagccttctgttaatatattctagacatcaactgtacaccaagcctgaaaaaaaaaaaaagtttcgttaagagaatgacacagtgtggatttacccataattcatagcatactttccttacctattagaataaatgatagttgaggttgttaaaagtctttaaaattaaatagattaaattgtgagtgctggctctgccagtaactctgcaaccttcagcagattacccagcatccctaaaacccagtttcctcatctataaccaaggatataattgcacggcacctgccttctcaggtattgttaagattagatgccacaggtgtaagagcagataggatagtaggatcttgataaagattagctattattttggatgctgtaattcttaggtctcacccaactgaaccggtagatatctttgatatctttccttcttcactcttgtctaggacagggaaagcctttcttatctatgggtccagggcagttcgatatccttgctggttactttgttatttcttcgtaagtgtagggttacagcgggaaagaccttgagagttgtctcttttagcattgtacattggctaaagtggaggggaatctgtccccaaaaatggcagagtgggaatattctgacccttctgagcacggctgacagtgtgagccatggagaatgatgacatttttcagcaacagaactgtcaatggatgtgttacagctattttagtgccttctcccctcctggagaaaagccattttcaaacccgttgcttgcaatgcattaagtgatgaaatacagataacaaattgcgcatttgtttggcttcatgcttattacacccccggttctggaaagcattgcacttagccccttaataatccctctcctgagatcaattactaggatttatctggttcctcgagcataaaagtgttttattgtttttacttttgctccaagtgaagtgtgagtgggtaggccaggttaaaatggactgtcccagacaagaatatgaagctgggatcattggccctgcttttactgtctaccaggtcctcatgaccaggaaaggggggaatatttggaagccacttccctggggaggcaccaggtccagatgtcctcatctctggctatttgcacgtatatagaacacaggtctgcaggtgcctaggaaggtgggtgctgttccacgggagaagctggaaagcagaaccaagttaccatctcagaccaaatcgtttttcctctagaatttcactgtaatccaaaccagttgaacatttgagaagaactgggtaccatgaaaaggggtaatggaattagctttcatgtttttccaggactctaaaccatatttcctgtcacaactgtacattattaatacaaggcatctgttagcgcacaactgcctgaaaatgtgcacccaaaaaccttacatctggtttcaataatttatttctgacatttgtagttggtggtggtggggagtggggggaggatgggaaaaaggggggaattaaagcaagatgttgcctttaacccatcagaagctcctgttggagccgaaagctggagttcttaacgtggtttctgcattaggtaatatattaatttagcagcaaatagcaagactccgggcctggtgggtgtgggtgcccgctcgcttttatcctgccttctctggctgcagcaattagcttcctcttgcgaaggggattaggaggaccaccccccagcggcgggggttggggggctctcgcagagctgtcaggtgtcattcggcttacccagcccccccaccactccccgcccctgcaattaactccctctcccgctttgccagcccctcacccgcacagagacaaagaggcctgttcccgaggtgtccgacctcctgcccccttggcgggccccgcccgggttcctccagcaggaatcgccccaggcgctgggagccagagctggccgggtctgacacccgccccagactttccacgatcaggtttcagctcgactaacgagggggaaagaaagaacgcgcgacttccgcgggccggagccgcgcgggggcccgggggaaacgccggcctggtctgggtgggaggggacgcgaagaggctccgggctcggccagtgtctgccccgggactgggccctgggactaggcggggcacaggtgtcccaggagggggcgccctgacttgacgcgaacgggccacctgtccctcccacgcctgcgctgccacccgccctgctccgccatcgcctcctccaaagctccccggatcctccgaggcgtcgtcgtccgagttgttctgcgggaggaacttctgctaaagccggtcctcgagtcccccccgcctcaggaggggcagcgcccggattgtcttaagtacaacacttgccaaaaggggctctttgggatttgggactttttttcctaagcaacagacgtacctttccagactcaccaacttagaagcacaggttttctgtttgtttcattattagactttcaaagatcatcatgtcccacagcctcctccttttccagatgaggggactgaaaatcagaaacattttgccttttgctcaaggtcacacagctcaagttcactgggcggctgggactagagggtccgaatattctgcagctatgatatgaaaaaaataagtttggctggagggtggagggcatccaggtctgtcctggccagccggcggggaggctcagcccagggttcagattttcctggagccagtccaccagcggtcaggccacatgtgagtaatgaagaattgagtgttgtgtactttaggctggtctccctcttcctggcccccttccccggccttaacttccttttggagtccctactgacttctgggtgtccaccatgggccctgttggaaaaatttcagctccatcccagaataaaaggaatgaaaacctggggaaaggagccaagaaggaaaagccacaaattcgcatctggccgaggcagagggagcagctccaagagcctgcagaaatgcactgtgactgctgtttgcagaggttcagctgccagaggctcggatgccctcctgggtcctgctcctgagaaatcagagcaggcaagagagaagacacatgttccccaccaaatttttcctgccgccaagtccttcaggtttctgcagaccatggggaagaacaagaactatggagtcaggcaagaggtagctggaattccaactccccaacccattagatggggccttgagtaagtgactcaacctctctaagcctcagtttctttgcctgttacatgaggggaacaacaggaccattatgaggacttatataacgtgtactatataaagcacttaacacagttcttgtacctagggctacattgtaacttttgtgggttttaggcattttggccttcgcggccatgagcccttcatcaaaaacaaaaattaaaaaatacaaaaatattttatggctgcatttgtataaagatgaacataataatattatgtagtaaagcatttttttttttgaaatggagtcttgctctgtggcccaggctggagtgcagtggcacgatcttggctcactgaaacctctgcccactgggttcaagcgattctcctgcctcagcctcctgagtagctgggattacaggcacctgccaccatgcctggctaatttttgtattttttgtagagacggggtttcaccatgttggccaggctgctctcgaactcctggcctcaagtgatctacccaccttggcttcccatacaggcttgagccaccgtgcccagccagtactaaagcatttcttaatctaaaaatattatatattgttttgtttctacaaagaaattaaaacatttccatgggcccccaaaagcactgtgggccctcggcactgtgcctaatggatgtcagccctgcttgtctcccagctcaggatctgcttttagggtagcccaaacaaagacacaggggcatgtctatgacgtgtgaggagccacagcaaagagacaaccgagagaagagtgtaatgagtgagggtggggggaaggaggagagaaatagctttcataaactcagcgtcctcccaatcctcttgcaatcacatggggttgctgttgtagccctccctgcaggatctgtcaggactgtgcttcccgtacgtcaggtctgccctctgcaccatcagccctctatctccactccctctgctcatacccaggcaggtaggtagtgtaaagcccaccttcctctataggcccctctcagtagttcctcttcacagacgggcatttatcctaccaggattctagtccctcttgccaaggagagatcccaggctttggggcaacactgccctagcctcctgagccccacatgtggaatatctggccatgccttcccacctacttttctcctcagggcaggcccacctccggggtacttttcaacgcagagagcctcagagattggacatgagagaaaaaggtgctctcctgcatgatattagcttttcttccatctgaagtcacaaggctgggtcatacagtcagtccctgggggcacatagctcttaggattcgctcctagctaccaggcaactggcagagactaaacagcttatgtttctaagagggagtggctagtgtttatcaaagactgatgtgtgggctccagcagcctctccagacagtggctgaggcctgtcctgagctctgggaaagcaggaagtccccggctgggctggggcttgctggctttgcaggagcactggcaggatctgaggaaagcgttcctcacagatgtctccttcagaggctggtggattccttaacagctaattagtgagaagtcgctaccatgatgggggctgacctaggccttcctccacctcctccttggggttgagaccccaggagagaccagcaatgctttactatggtcgtatttcctccccgacgtcaatgctttctttaggaatcatctcttcagtttaagccttttctcagaaaccagcttttctctgacaagtttgcagctcaaaaggaactggctcctcttactgttgaaatcgggcacatctggaagcagtaaacttttcagcaggctgagggggaagaaaagatgtcttgtaggggacagattcacctctgggactaattattctttatatttcacccgtcacgtttactatctttgtcagagcaaagagacaataagtgatctcattaaatcccagaaagatgcttctccccttcaaggagaacctctcaacaccctgtcctctgacaagggccatgtcactgaggttggcacaggggcctgggaatcagggatgggtggggcagaggcgcttccaaatgcttttcttcatttgaatatagtgtctgtgttttctattgctggaaatacccttgtgggtctgaaatcaaagtcttctctggccacattttccccagacgtaggctccctttggaaagacagaaatgagaggggatcggtcgtggggttaaaaaaaatcattttgggggaattctgaaccagctcttcttctcccttcttcctatcaaaaactcatcctgtggctggctgcgttggctcacacctgtaatcccagcactttcggaggctgacgcaagaggattgcttgtgctcaggagttcaagactagcctgggcaacatggtgaaaccctgtctctccaaaaaatacaaaaattagccagtagtctgaactgggaggctgaagtgggaggatggcttgagcctaggaggttgaggctgcagtgagctgagattgtaccactgcactccagactgggtgacagagtgagaccctgtctcaaaaacaaacaaatgaaacatcctggtaaaaagaccagagaagacactgagtcagattcttccagggctgggtgacagttgtatgaaacccctattaaccccagtgagtaaggcaccaagttcaagaggctgaagatgagacccagagccagcaaatgagacatggggttttattagaggcttccatacagggggacatcgggccggacaacataatcgagtggcctagtggcagtgggctgggcaggaaaactgcaatggcctccaaatctcatgcagtttgtatagcattttcacttaacaccctccccctaacagctttcacccagcagagttcatttagccccaaaactcagggccttaatcccctgtaccaccatgtcccataggatgggccagggactcagatgttctgcatagacaaggaatgaatctcctggttggctactcccagattccctagctcagaacacacattctggtgcatctgccatacagggtcattctgaggatatgctaaacttaatgctgacaggtgcgtttaccctacaatgaccctccacaaagccatcgctgtgataccagggttcaggagttgctgtcacttcctttcccaaccacataaatgagcagctcagacagggccccagcatccgattgattgtcttcccaatccacaccttttaacccttcaaacagatacactcaagtcaaggggatgagtgtagggtgagaaattctctccctctgcactcttgtcagatgttggcctgaggtggcccagaagggtctgaaccgcatcttctgaaggatgcctggtgtctttcaggtcttccttacttaaaatgtgcttgacaaaattagcatcacttgaaatctccttcaaaagtacacagtctcctaaccctttcctgccccacatcccaggcattttaacaagacctccaggtgatttgtatgaatgctgtagaatgagacgttgtgttctagatcagtagttctcagtaattggcttggctcagaatcactggcaagacttgttaaaatgttgactgcaggaccctgccccagagtttctgattccaaaggtctggcatggctgagaatgtacatttttaataagttcccatgtggtgcaggtggtgctgatccagggacaacaccaacatggttcccaagcctaattgcataacacttaaggaattgtgtttaaaaatacagattcctgggctccactcaagaaattcagattctaaggtcttataatctaataacagggtttttacaacaaagtacatttatatagcactttaaagtttacaaaatgcttttgtcagaggcttttgaaccagagcaactccattttgaataggagttgggtaaaatgaggctgagatctactcggctgcattcccagagagttaaggcattctaagtcacaggatgagataggaggtcagcacaagatataggtcatacagactttgttgataaaacaggctgcagtaaagaagccagttaaaacccaccaaaaccaagatggtgacaagagtgacctctggttgtcctcactgctacactcccaccagtgccatgacagtttacaaatgccatggcaacatcaggaggttaccctatatggtctaaagggaggcatgaataatccaccccttgtttagcatatcatcaagaaataaccataaaaatggttaaccagcagccctcagggctgctctccctgtggagtagccattcttttattcctttactttcctgataaacttgctttcactttgctctgtggacttacctcaaattctttcttgcgtgagatccaagaatcctctcttggggtctggatcaggactcctttccggtaatgaaatgagagagttccctgacccctttgcaggatgtgcaataggggtgtggctcatttattcggcccccccaaatactcaaatcccttaaggtagcgggagcctgcaggtgagcaggtgcaggagctggggtgagcgcttttgggctccagccccacagcagcgtctaggggtgttacaatgctgttttagccctgccatatggggatgacttaattgttaaacagctgagtgaagagtcagtatgacagcctttttggcttcctgcatccagtgcatcccgaattcttgtccagtgtccaggaagaatcaggtcacacagacttgaaggatggtgaatgcgggaattttattgagtgatagaggtggcactcagtgggatggggagctggggaggggatggaatgggaagatgatcttcccctggagtttaggcatcctgccgccaggatgcctcctctccaactgctcccagctgagctctcgacattcagatgctttgtctgttctcgccgtctctgctgtgctgctctgctgctcttctgcttgtggagcctggcatttgaggtttttaagggtacagaatgggggacgtagtgggccagggtggttttggaaaacacttgggcaggaggtcagggataactgttctcatttagggccatggtttccagcctttgccgggtaaccaccctcttctacccagtatttccctgcctcctgtctgtatcagtaacacttttataagcaatattccatttactctttggaatgaagaatcttcttacaaataaggaggaagctcaggttctgagaggttaagcaatttatctaatatttcttagtgagtaagccaagatttgaacccaagaattccaaagccacaacctaaacttttccatctcatcacagcctgttacaaaatcattgtaaagactgagtctatttcaagtatttttagtttcatgatcacatttgagataactgttcataggatttttcagaggcagttttatggttttgtggaaactggttaatgaacagataagactgttttgtacaaagcaacatctattcccatgctggtaatatccttgggtacttagaagcatgccaaatagattgaacgtgccttctctggtcttaactaccctttcaattaccttttttttttaaaacaggttaaaaaaaaaagtaaaaagacccaaccctttcttcaaaggtcaaactgatcaaattttgatttagctgagcctgaatcaatgagtttactgtgtgtgcagactcccagtccacatcactgccatactgcccaactaagctttttcagtcaaagaaaaggcatctgcttgcattgtaagtactagttgttgatgacaaaaaaaaaaaacattgtatgcctcaggccatatctacgaaaaaaaaaaagaaaaaactcttccctgaatctgtcctcagatcctttttaaatgcaagttgagacgagaggtttccaagctggctgggaccaagaacaatgccctgtagctgtgggtgtgggagtgggtgcggcttgtcatccggcagcttttgaagaggtgtcaaaaaaaggccattttgaaataagtgctccagttacctaaaagagggcagcgcctaggtcagaaatgtccagaggtctccttgaaaaaagaaaaagggagaaaacagccttcctagctgggaagcagagctgatattctcccatgcgtgaacccctttcccagaggtgtttctgggagcaccgaaatcaaattacaaaaccattttctgcctcacaattactcagtttttttttctttctttcttttttgaaatagggtctaactctgtcacccaggctggagtgcagtggcgtgatcttggctcaccgcagcctgcacctccagggctcaagcgatcctcccacctcagcctcctgagtagctgggaccacagaaacatgccattacacctggctactttttgtatttttggtagagatggggttttaccatgttggccaggctagtcttgaactccggggctcaagtgatccacttgccttggccccccagagtgctgggagtatgggcgtgagccaccatgcctggccttagttgaggttttaactggcaaaactttcttctttcaaagtccagtgctcgactgattttctcctttcctccctgtctggcagggatggcagtggggaagttgaggtgctgcagaagagtgagccgagggtgcctgtgtcttagatcacatgccataaccaggaaatatttttagaaatccagaaaaaaaaaatctcctgggcgaatgctgtcgattttgtgctgtttggggaaagtggctcatcagagtaaatgcctctctctctgatgccttaagtatcctccctgcctcagatgagcaggttattaaggtaatgttaccctttattgctgaaaagcagtgtaaatagacacccagactacagagattagctgctttcaaactgcagaaatgagacactttctcctacaatttccgttttcaccaaatagcataccctatttacttgggggaaatagtcgccttcttataatgaccacacccatttgctcagatggaagaagctggcaaagtaagtgctgttattatctgggcaaatctttgagagttttcttcctcatcctgtgttgttctgctgtgagcttactgccttcccttcattcagtcacatgcagaaggtactgccccttctgctccccacaagggtcaaggaactcccagtcctaggatagagggtgtctcttgactgatggggataggggtaggggtgagaatcatttcaggaccatctgatactgacagaggagacccagcctgctgcccttggagagctctcagctgatgaaggcacagccctgacatgaggaaatttacacacacacatgcacgcatagacacatacatatatacatttacacatgtacatatgtgcacatatatacacatacatttccaccaaatattatatattaatatattttttctgggaacacatagggaaaagtagcatttggtgaataacactgagactaagagacagcataattagtattcattgacccaaactatggagttagtgctggggaaaagagatcttaaaaggagggggtgtccctccatgtagagtgagtcagtgtgacctaggtatactccgagtgcttaatattagcctaggaaagaatagcagagactccgcctgctgcttcccgacagggatttctttataaccaaagcacaatagctttacccagcccactgtaacaggataaacaagtttgatgtaacttccaaatctattttctattgtaagttcgtttattgaataaaatagcaattcaacatgtttgcaaatcatggtgctgttagatgccaacgctggcagagattcatgtgtttactgtacagctcgcccagttaggctctgctactcagcagagcagcaatgtggaattccaaacagctgcaagtagtaagtggaaagcgatttttgctaatcatccaggaggttatgtggcatggtggaaactggttccagacaacaacttgcgtgtagagtcaggacttggaagcagcttctggatatttgctttttggactgatacaaagtaagagcgaagcggtgacgtgatcttgcacacttgcatttagtattctctaaatgtgaacctgaatttgttttacattagaaaaccccttttcaacagtttttgggcctggttcccagcatctgaagaaaatgcacaaaagcaaagatgtggtccgcttatgggggaaaatgggaaagctacctcctcatgcttctccaaaggacttaaacattcttctgaggatgtgtgtggttttttaaaatctatgttgaatgtagaattaacttacatccattcagccagagaaaagttgatcttggtttctcagtaaaagcacattttcaagatatcgatgtggaatcaggggctttggtggtggtctaccaagaagtatacctaatctgtgagtatccctgcccaagttggccactctaaaactcaagatttcctaggtctaccatcaccttttgccgtgcaatgatccccagccctgttcctccctgtcctggctagagcttagaatgggctttggaagcccaagctagaggttgcatttctctcccatcaagaatgggaaatgaagaccctctgctgctgctttttatctgcagctagagcactaagaacatggcctcaaagctggctgccaggtacacaagtagccaggatctctgctaggtcccttctgtcctggtctttggcatccgaggtagacctagcctgtgttccagccgcctagctgtttgctgccagctcagtttcccaggacttgggcctaatcccggtctcacgcctcacatggagctggctggttcccgttagcatttcagtctacccctaatggcgagcaccgttgctgccaagaactcatgaaactggattcccatttggccccttctgatcagactcttctggacaactttgcctgcttggaaacaggcggcagttatgccacgtcccttggacttgtctatggctgctcagggaagggctgtgtctggtccgtatgttctgattcatgatatcccctccccccagcctgtagtgcaattggcttcaatctggaattctaggtaatgctaaccccttttggaatagctccttatagctatgatctgtgctgaacgaaataatcttatcaagtgcagaggctttcagagaatgttatctacctttcaaagtaaagttctcaagaacattctagaagatcacatgttttgttttttctccacagcctagctcaaggaataggagatttgatagatttatgacaaggcctttttcaaatgcattgatctggctagctttggtcctcaaaagaatgttctgccctggagcaggccggtcttatcagacacagctacgcaaatgggttggttcttgcaaatggtccaactgaccatagagaaaaataattagccaagtctttagttatgcctaagagtgtactttttttttttaagataggctctcactcctgtcacccaggctggagtgcagtggcacaatctgggctcactgcagcctggacctcccgggctcaggtgattctcccacctcagcctccacaggtgcaggccaccatgctcagctaattttttgtaatctttttagtagagatggggttttgctatgttccccaggctggtcccgaactcctggactcaggcgacccacccgcctccacccgctaaagtgctggaattacaggcatgagccaccgtgtccggcctcagagtgtacttttactgaagctattttcagtgggcactgttggggtcacactgatgtgaggtgagagtgagccatgtgccagcttctgtccctggcccacagagtcaccttgatagctgtgcgctgccacagggactgctgcagcctcaggatggtctatgctgtggggagggcctgcaggactggggtctttctgacctggaatgaatatagagcataggtggacctatttcctgctgccagatttaagaagtttgccacagaaaatgaggcctgggcctttgtcaggaaatctgcaagcccagaaggttcagaagggcagaaaaataaacatgtacaagaatcacaaatgaaagccagcaagggactctgtgagccactgaatggagatggagatgaaagtgcagagtcttgtgcaaagcctgtgaagcaaatcatagagccggcacctcgagtgagcagagacattttcttacatcggaggctttgtcgtcgtctacactgatggctactgctccagtaatgggtggaggagagcactagtgggaactgacgtttactgggggccaggccatcctttaaatgtaggcattagacttcctgggtgacagacaaaccaaagagcagaaaatcatgcagcctgcaacaccattgaacaagcaaaggctgaaaacatcaataaattggttctgtacacagatagtatgtttgctataaatggtataactaactgggttcaaggtaggaagaagaacaggtggaagacaagtacagggaaataggtgatgaacaaaaaggactttgtggcactggagaagctcagtcaaggcatggacattcagtggatacttgttcctggtcatccagggtgtattggcaatgaagaagctgatagattagcaagaggagctaaacattctgaagactaagcaaagtgaatttattacttgggaaaagttgagccagtggcagttttgctacttttgcttactggtacggaaaacagactgcaggctggaccattgcagtggatgggcagatgtggctttcacactgaatcacggtggcacagtggcattctgtgatacattttgataaaaagtggttaaatatataataaattgaacatctctgagatttaagaattatgtgagatttcagcattatgcttactaggtttgacacttttcttgcttattttattgcaatctggtttaaaatgctacaggtttgatttttttttttttttgagacggagtcttgctctgttgcccaggctggaatgcagtggcacaatctctcagctcactgcaacctccgcctaccttggcctctcaagtagctgggactacagccatgcgccaccacgcctgactaatttttgtatttttagtagagatggggtttcactgtgttggccagactggtctcaaactcctgacctcaagtgatccacccacctcagcctcccaaagtgctgggattataggtgtgagccaccgcgcccggcccacagctttaattttgataagaaatcaaaaaaacattggttaaaagatgcaggtcagaagtctagaaatattctgaaagcatacatttatcttccagttcacagacttgagtctcctgcttttacaggtcacttgtgcctgtgggcacattagagacagatgcagcccagggcctgggcgggctgctcagcagagaagatgtgagctggtctcagcctcacgtgcctgcctgctgggcactgacataataggtgaagcctgcacacaggcgaccctggctgctaggccactctctaggaacagttacaacttgtaaagaccaagatgaatacataaatctttccaaaatttctttggctcttttgttgaaaactgtgcacacttaaaaaaaagtttgacatgatcatttatttagttttaaacctttttatcataaaataaaaacacacaggaagacagacacagacacagacacacacacacacatgctattttcgttgggacttctgcctagaagaaaatccttattgatctgtatgttatgaaggctagtggcattcaaaactgttagctgcattcagacaatttttatttattaatggaaccttaatttttaaaaacatcccttattattttttttttctttttctttcttttttttttttttttgagatggagtcttgctctgttgcccaggctggagtgcagtggcataattttggctcactgaaacctctgcctcccaggttcaagcgattctcctgcctcagcctccagagtagctgggattatagacgtgcgccaccacgtccagctaatttttgtacttttagtagcgggatttcaccatgttggccaggcaaactcctggcctcatgtgatccatccgcctcagcctcccatagtgctgggattacaggcgtgagccaccgcgcctggccaaaacctccctttttaaaaaaccaataataatctgttaatctaaatgcatacagaaacacaacttatgagttggccatttttttcttgctatggaaaattagataacaactactgaacaagctcacagatagtaacttggaaatatacttaaaacagaggtacatatgatcgtttactactatttttcttatttccaatagatagaatcactataaatgtcccacattaagatttgtgttcgttcatttctggtgtgtccaaaaggaataaaacagtattcccaaacatttaatattttaattgttttgttattttcaatgggttttagaaataaatcacttactctggcctcatccattagtacaaacttattactgcttcaaatcatcttttggctagattgtatatacaaataaatatgtaattcactgaaaatctactcagtacatgttgccaggcttagtcaagggagccctaaagcagaggtgtttgagacctctccattaagctatgaagacctttttgttagttacaaaactcctcttactgtaggtaaaataggtgaaatagtggctgatgttgagtcggtggtagaaggcccagatcctgctgtgagccactcctccagtctcaagggtctcctcagtatacctagactactatgaagcacagtttgaaaacatggcctattagatgaggtgtaatttcaaccttagtgtttcttgggtaccgaagtgggtcaccttagtagtagtaacccatgccaggcactgtggtggacacctgtaatcccagcactttgggaggctgaaatgggtgaatctcttgagtctaggagtttgagaccagcctgggtaacatggcaaaacctcatctctacaaaaaatacaaaattaaaaaaaatagtaataacccaagttttattgactcttcttaccgcatgctcaactaggaccttctatttgtttcaacaaagttctatccagacttcattgaggatgtctcacatgtccttatgaatggtgaccatgttattatagtcaacgcacagattcctctaggctcgtccctcttctttggcctcagccccatccaagtttgctgtccacaaaacctcttgagatgactctccattgccctagcttctggccaccacaatcagaatttcaacatccaagccaactaaatccagaggccaaagtttctaatccatgagggccagaacagcactatgtcctggcccatctgtctggcaacctgtgtcatgcgggtccctcaggaaagtaagaatgatactcttgcctcaggcctcactgagtccctcacaaagaccaatagtatagctttagctcacagccccttttctaccaggctcagacatcaaactgaggtgccaggtatggaacaaatcccactttggcctttcatttttacctccaacccgatggccactaaacctcctcccttctgtttctactccatatagcaaacctacaaactgactattcttgtccacccaccagtttaggtccattctctgacatgtttaaatctcaatttgggcttaaagtggaattaattcatcagatgacattattctaaacaagtttgatatcagctgccttgttttccttaggttgacaccattgacttctttatgccgtggctctgagcccagccctggggtgccatgagcttagatggagagatttgctcaggacatgagacagcttcagcatatgcaccaatatctttggcccttggaatgaatgtgttatccaaagggcagctactgtctttaatagatttcctggaaaattatggagaaaaacaaacaaacaaaccacaaaagctatttcctgatttttccagcaactctgactagttttgagtaggttgtttttattatttcttcctttggggaacgaattaaagttgtgtgtttatttctgcaacattgagaaacacaaaagaaagtctcccaaaaggatgatcctctttcccattgcagatatttgccaacaaccacatgaaaaggaaaaatatgcttgaagacaatgcattatgcaacagatttgccttataatattacttataattccaattctattttaaattcatttaaggtgtgactccccactcccctgcaccatccaaagtcatttaaagacctaggtgggctgggcatggtggctaatgcctgtaatcccagcactttgggaggccaaggtgggtggattgcttgaaccccggagtttgagactagcctgggcaacctggggacaaaccctgtctctataaaaatgataaaattagccaggtatggcatgcacctgtagtatcagctactcaggaggctaaggtggatgaattacttgagcccaagaggtcaaggcttctgctagccgagattgcgccactataatccagcctgggcaacagaacgagaccttgtctcaaaaaacaaacaaacaaacaaaaaaccaaaaaaacctagatgataaataaataatcatactgataacagcctctcatattaccagagagaacacgattctaataaaagccagtcatgaccacactcaacatctaggatggggaaaaactgttgtgttcttttcccattggctctccttttggtcatatgaagacagctttagggcatttggaaggcccgtcttgagaacttctcaaggctggttttagttagtggcacttagagtacaacatgtttagatttttccaagaggaccatctctaagcaatctttcgcctgccaatagcaacagcatctcataaccatgatgtgctactatgctcaaagaatgcttccgtcttcaaggtaacaaaagaatagaacaaaggcagttgaaggaactgagacatataaatgtattggtttcctacagctgcagtaacaaagtaccaaaaacttggtagcttaaaacaacagaaatttattctctcacagttctggagtcacacgtccaaaatcaaggtgctagcagagtttgttctttctggaggcactgaggggaaagctgttccgtgcttctctcctggcttctagtggctgcaggaaatccttggggttccttggtttgtagatatatcaccccaatctctgtcttcacattgtcttcttctccatgtgtcttcttcctcccctcttctcccctccctttccctcccctctcctcttctcccctcccttcctctcctttcctttcctctccttttcactcctcttcttctcttctcaagacacttgccattggatataggctgatcctaataaaacataatctcatctcaatatccttaattaattacctctgcagagatcctttttaaaaataaggggattcgagaccagcctgggcaacatggtgaaaccccatctctacaaaaaatacaaaaaattagccaggtgtggtggcgtgcacctatagtcccagctacccaggaggctgtggtgggagaatcacctgagcctaggaggttgaggctgcagtgagccatgattgtgccactgcactccagcctgggtgatagagtgagaccctgtctcaaacaaataagtaaataaataacatttaaaaataaatttaaaagtaaggacatattcacagattctgtatcttttttgggaaagggatggtggcaccattcaaccaccataacatgtaaaggtaagtcaagtaaatccaagtgaaaaaggcaacaaacatgtctatgatcctttaagaagagataaaatgactggaattatgaactggggatcaagatattgagttatatagtcttagttctgtcaatggtgactctgggatactgggcaagaccttctcctttgcaggcctggtttctgcatttataaaatgagaggatggattaaattagtttgaaagtatgttccagctctggtgttccatgattccacatgaacacccattctcctagttctcacatgtgcttatgtgcacacatgggtgcaagtcataccccaccctcttgcagatcaagccagccacctcccaaacccaaatgtgatttccacactgaatctataatctatgctttctcatgtggggcatctgggagctggcttccattgtgtcatgtttgacttggctggagaaataaatttggcagtgcttagaaatgccacacctttatattatgagtttttccacaatcttcttggtgtccaggacttgtgatcacttttctttcttattttccaattgcgtatttcagcctgtggtcttcagcctgcccaccgctttttctgccgcaggagcggcccctgtctcagatgattgtcctggcactggcagatgacctaagtaggtaataaacagataaagaagagagacttggaaattccatggcatcacttcttatggaacttttgatggtaaaatgaccacatgctggaaatcacactgcaactctactccagaaaatctgtgtggcatctaattttggtggattaactgagtcttactatcccatgcttcatgtgagggctgtgcaaaggaagggtatagtcatggaatcgtagaatgacagagctggagaaactgtacccttttttttctatgtacagtgtatatgcatttttctacttaggttccatgagggtacagagtgttgttcacagctctctcctcagcacctagcccagggtgtggcaggtagtaggaactcgtcaaatttctgattatgaatgaaaatgaatgcaaatcagatgcaaagaaatctgattcttagaagaattcagatctcatgcaaccttctcatttctgattcattttcagtagccagaaacgttagtaggctaacacttcagtttctctgctaaataactgatgaactaaaaaggactaaaaatatcaagagaattctcctataaggaggagctctgcactccttccactgtgggcattaaggatagcccttcaacttacctgctttgtaaatttaggcttttttaacattgggttttcttaaacttctgtctctgcctccccattctccccactgggcacctccccccccccccccccccccgccacgtgcgcgcgcacgaacacacacacacacacacacacacacacacacacacacacagtggcggggggcggggggtctcatctctctttgccgccagcctggcacctatggaaacaaacaaggtcttgtgcagccacctagtggtgtctcttcacccctgcagttccccatgacttctaaaggaaatatcagagggcactgggaggcactgagatactttgaagacaacccacttctcaaggcatctgggaccgcccccagaggtgagccagagggaaaacaggagagcgagctcagggcgtgcccggctccggccgctgcctcacttcctcgggggtcagcggccaaaggcagtgggcgtgaggccagacgaccctgcaccacccgaaggaagtgatgtcatggtctccttctccgagaagcctttgacacggagggcgggggcggggggataggaatgagtgccagggtgggacagacagcccttgttccgtgggaaacgtcaggctttgagagacttgtttcataaacatgccttgcctcagttttgaaccctccattcgagttcctttacagaattgtcccttgagaacgataaactgttgtgatcagaacagaaaagggtcagccaagcagtgatcagagaacaggggcaggcagaactcaacagccactgggcaatggggtttaaatgaagagccataacattgaacgaggctcctaggagctcctaaggactctggaacctttccacggggtcttcaaccttcacaggtcccggggtgctgagcccaagaaagagatggaagtcaaagaccagcacgatcagacacacacctttcttctcattccatacaccaccctgcagtaccaccgtgactgctaccatcccgcgagcaccttgcctttgaggatttgaccagttttcatccgagtagtaatgtatccgatgtccactggctccttcctttacccacggacagttctgtgtaagcctttctcatctgcctacaacgtctgcctataaattattaggtttctccatttaaaataaacggaactttccctcaagcctgcgatccatactcacccacacccacactcctcacgggtgtctccaaagagcagtttattctgaccactctgttctgaccccattcccatctggcttctgtcctaaccatgacggaaattgcacttttggaggttgctcacgactttctagttgccaaatccaaaggcttcattaataataacatgtcagttttgatattttatacagtcacagctcctggtgttcgaagatgtaacttaattttcctagaactgacctcaaatcattaactcaacctccaatgtctgtggtctttctaattcaagataaatccagccctttctgttttttatcttttgttttacagagatggaatcttgctctgtcacccaggcgggagtgcagtggcacgatcatagctcactgtagcctcctgggcacaaaggatcctcctgcctcagcctcccgagtagttgggattacagatgtatgccaccacacttggataatttttaaattttttttgtagagacaggagtctccctttgtttcccagactgctctcaaactcctcggctcaagcaatcctcccacctcagcctcccaagtgctggggactgcaggtgtgagccaccgcacctggtgcccattctgtttttattttgattttaaatttttattttcatctaacttgtttttgaaatgtaccatcagacccattctgatttttttttttttttgagacaggctcttgctctgtcacccatgctagagtacagtggcttgatctcagctcactgtaacctctgcctcctgggctcaaacaattatccctcctaagcctcccgagtagctgagactacaggcgcacaccacaaaacctggctaaatttttgtatttttagtagagacagggtttcggcatgttgcccaggctggtcttgaagtcctggactctagcaatccactcacctcagcctcccaaagtgctggggttaaaggtgtgagccaccacacccagccccattctgttttaaaacagaattgaaacatagtctttgaatagcgaatcagaagttccctccccttattccccgacattttttcagtctctgcagctgcagggggcatgtgtctgtggggcagggttcatgcatcatgttggtgtggggagaaaagcagcgtctggcccatcatgacattctgtctacaacagtttccactgattggtaactcttgcaacttggtctcattgtcctgagccagcactagtttctgatggccaagtttccactgtcacctccctttgcctacatccttatagtccagactgcagctcctttggatccttttggcttgtccagggcctcttctgcgtcccttttggtggccatagaaacttttcagatttttccccagcctcgccaagatgcaaggggtttctgtgtggccaccctggatcatggttgctctgttcttctgatgccattctggttgtggaaattctcccaggaactatgattctccctggtacattctgagaggagagacacatgtgtcctctgctatggagagtctctggtgatgtacgaatttctttgactatgactataatagaaaatgcattttacatcacggctgagcacacgtacacatcacacatgaaacaacaacttcaccaaacaacattgccattacctggcaacaaactctgggatttcctagtccattgtattctctttcttttaatgctggttttatcccgataaaccaattttatgatgcaagaggtctcagcccacagtttaaaaaatattgccttgatagtgggtttacttggttcagagggtgggctctgggctccataccaaaacttaggaagcagctacacacttgttttgctctttctcaaaatgcacagctttcagaatcaaagaaagtcctgcctctcaagctgttgtctctactatgggtttaaaataaatccattcagacattcaacagattttttcttctcagctttatctactttctgtctgagaacaatgtgtatggaatatgacagaatgataaagaaaagagtaatggttataaagaagcacaagggaaaaaaacctcagttaacattcccaaatacacctgtaatcccagcactttgggaggccgaggtaggtggatcatttgaagtcaggagttggagaccaacctggccagcatagtgaaaccccatttctactaaaaatacaaaaattagccgggcatggtaggagatacctgtaatcctggctacttgggaggccgaggcatgagaatcacttgaacccgggaggtggaggttgcagtgaactgagattgcaccagtgcactccagcctgggcaacagagcaagacttagtctcaaaaaaataaataaataaataaataaataaataaataaaaaataaaaaaccaagcattacatattctgttggtaatagtaatagtaactaattatgattcagtatgtattatgggccaggcatgatgcttagcatttcatgtttattatttcagttaatccttataccatccctatgatatggtacaaatagtatccccattttataaaaaggaagttaaggctaacctaaatttgactgtttctctgccctttacattcagagaccatttctcatgtctgttagtttttgttctagccctacctctataaaattagggatgaaaactagaccatctctctcagctcagaaagagtccagcaacctttcaaaggcaaagctgctttccactaagttggaaaagtgatggtcttgctgcacaggcctgcagcttgaactgcacccatccctcctgctgctcttagcctttctccatctagggctttctacggcctaaaactcaagatcatcttcttccaaccagaagggattaggagtccttccttcttattagcaacctgcagatcctcataggaaatgaccacggtaacttccctttatcttttctaaaacccacatctataaaagggagaaagtgtctcaagaatgcaaacaaaacataactataaacttgaattttctcctttgatttggtgagttccttctttatccagcaaatattaatatttattgaagatgtactaggcacatttctaggtgctactggagatcaggtgatgaacaagacagatcaaattcttccccttctgaaatttacactctataggggctggtttctggggagtgcagacactgactggaggttttcagctttcttttatgtcacacttcctagtaagaaatgtgtcttgcacagcaatgtagtatattccttctcccttctgccgccacacaatagaatcaaagttttgtagaacacttgctcttattaaatataaaaactaaaaacataaagttaatattgccttattaatacttgaatgcagccgggtgtggcgactcacatctgtaatcccagtactgtgggaggctaagtcaggcggattgcttgagccaaggagtttgacaccagcctgggcaacatagtgagaccctgtctctaaaaaaattaaacaaggttagccaggcttggtggcatgtgtctgtggtcccagctactcaggtggttgaggtaggaggagtgcttgaacctgggaggttaaggctgcggtgaggtatgatggtgctactgcactccagcctgggcgacagagtgagacctcatctcaaaaccaaaaaacaaaaaacttgaatgcagcataagaaaaatttcccaaataagcaatacaaaaacaagagtcaggcaagactgtatttaatgcactaggagtacttgtctgcttctaagtttattccagtccagaacatacaaggataattctcactgtgcatacattcatgcgcctgtttctctcctttgttttaattgactttaaaagttggaaatccttgttcatacaaataggtaattgtgaatggtgataataaagatgcattctttttgcctaggaatggagattcttctttaatcttaccctacaattatgattcatttaacgtcttgtgattagtctttcgtgcaaacgtagaactgagctgcaataattcattcacctcttttgggcaccaagtttaggtcaattattgattcagggttctgaaaagaaaatgagtctttcatttgaaaacttttatcttgtgtttataatttatcatctggaaaatcatgattgcatctggaaaatcactccaagtttgaaactgaggagtgaaatataacgatctccctaattttatttccatcatactgactttactaataataccattttcaatatgttgtaacaatatgaggaacaaataggtgctagggtgattgcttttaggtcttgcttgccataacaaaatgtctttggaatcctggatgtgttggacttgctgaattatattgttgttttctccctgaaattatacatttaagttcattttaaaaaatcaataacctccattaaatatactaattaaaaatggcaaatattgtctttgaaaatgagattgcttgccaaatgagattgctttccaactagaaaaatgtgactgtcatttctgagtttattcatcctgcttaatactttcccttacgtggttatccgtagataacaatgaatttcagtgagcttcagtgtgagagtatggttcattcaaatctcaccaaaacacatcaaaattttggctattgatgagctctctttaatacatttaacaaccttcatgatgttttccaatacttctatgagatttagcagacttacttcaagagatggcacatttctattgattctgatttctaaacacaactgtcatgaatagtttttacaaatattttaatggctttgctgctttctagccatatcagctggccctgtcactcataattccattattacattttattttatttttaaatataaattaaaataattgaatttattattttcttttagagatggagactccctatgttgtccaagctggagtgcagtgctattctcagacatgatcatagcatgctatatccttgaactcctggactcaagtgatcctccctcctcagttacccaagtagctgggactaaatgtgctgccatcatgcctggctctatttttccattttagtagatattgaccaacaaagcatttttccacttttgtaaatatatacaatccattgtgtgtgaggttaaatttaaacaacacaaacacccccacacactcacacgcatcttgttgttttgcatacatgagaggagtttaacaacttgcagtatctgtgctgttttcgggatggatctcaagctctatactggattttaaccacatgagaagcatggctctagaaggttctgcagtagcacagatttgactagaaatactactatcccaaagaattgtacatttcaatttattagctgatttggtattaaaatcatattcatcatagctatttgtattagagaataatttttatttttttattttgaaagattgattttttttaaagttgtttcattttgaattagcataggtacataatagttgtatatatttatggggtacatgtgatactttgatacaggtatgtaatgtgtaataatcacattagggcaattggagtatccatcatctcaagcacttatcatttctttatgttagggacattccaattctactcttttagttattttaaagtagacaataaattattgttagctatagtcaccctattgtgctaccatatactagatcttattcattttatctaactgtatttttgtacccattaaccatttccactttgtcaccctatccttgctatccttcccagtctccggtagccataattgtacccactaaactccctgagttcaatttttttttttttttgctcacatttatgagtgagaacatgagatatttgtctttctgcccctggcatactgcacttaacataatgtccctcagttctatctgtgttggtacaaatggcaggatttcattctttttaatggttgaataatattccattgtctgtatgtgccacattttttttatccattcattcgttgatggactcttaggttgattccatatcttggctattgtgaatagcacttcattaaacatgggagtgcagatatctctttgatatactgatttcctttcttttggatatatacccagcagtaggaccgtgggatcatatgatagtttcatttttcattttttgaggaacctccatagtgttttctatagtggttttaccaatttacatttccaccaagagcacacaagggtttccctttctccacatccttactagttttcattattgcccgtcttttggttaaatgccattttaattggggtgagataatatttcattgtagttttcatttgcatttctccaatgatttgatattgagcatttttcctgtacctgcttgccatttgtatgtcttcttttgagaaatgtctattcagatcttttacccatttttaaattggattatttgtttgtttgttttttcctattgagttgttggagctccttatatattgtggttaccctttgtcagatgggtagtttgcaaatatttcctcccattctgtggctcgtcacttcactttgttgattttttcctttgatgtgcagaagctttttagcctgatgtgatcccagttgtccatttttgcttcggttgtttgtgcttctgaggtcttactcaagaaatctttgcccagaccaatgctctggatagttagaagaataatttttcagcaactgtgtgagagccattttctcttttgtccaaccatatgtaactaagtctcgttaacagtttatagaacaggccaggcgcggtggctcatacctgtaatcatcgcactttgggaggccgagacgggtgaatcacttgaggtcaggagtccaaaccagcctcgccaacatggtgaaaccccctctgtactaaaaacacacaaaaaaattagccgggcatggtggtgggcacctgtaatcccagctacttgggaggctgaggcaggagaatctcttgaacctgggaggtggaggttgcagtgagccaagattgtgccactgcactccagcctgggccacagattgagtctccacctcaaaaaacaaaacaaaacaaaacaaacaaacaaaaaatagttaattgaacaacagagaaattgtgccagtaattgtttgtcctttgttttcttttaaaaatgtttgaagggcttgttaataagtccagcatgctgtgtttccaagtgtccttctagttttgaagttgtcattacaaataatacattggggtttgtcacttttgttggattttatgcactgaaaattttttttaaataatccatcttataaagctgtgaattctctttttctttttaaaagacatctcaaatgaagttgaagctaactaattagaatcaataattttctcaaccttgtcattatttacagttctaggttgaacttgggcatttctctaatttttccttcatcattcttttctaataaggagaaatcctgttaaagggaaattcatgctaatttaacaaaatatacatttgatgcaaacctgagacatatctcacttgacaatgttctttcagaaaaatgctttacaatgaattctgactaatgttaacataaaatataaacagctaattatctcataaagatgatgggcatattcatatcatatatgagaaaatcaaatgagatgtttgtttttagaaggtagaatgacttgtactagccaactgatattcatcgtagtcttttttttttttttcttttttttgagacagggtctcactccatcacccaggctggagtgcagtggtgcgatcttggctcactgcaattttcgcctcccaggttcaagcgattctcttgccttaacctcccaagtagctgggattacaggtgtgtaccaccatgtctggctaatatatatatatttttggtagagatgggatttcaccatgttggccaggttggtcttgaactcctggcctcaagtgatccacctgccttggcctctgtaaattttgggattacaggcgtgagccattgtgcttggcccatcatagtcttttattagctttcttaatcttgctcatagcaattggatgcagtatttcttacagtgttcacaattcctaataaaagtccagtgatgtgttctcatgttttctattttattctaattgtttattatactctatttcattttgttaaaaaataagtaaaaaaaaattaaatgtagctgtgacccattaagtttattttataacctactagggtattatgtcttccaaatagtctgaataatgctgacataaataataaatgtataaacaaatgagagaagttcagagagtggtaagtgctataggaaaatggaaaaagaataatgtgatagaagagagagtgactgggcagagattaattttgccagggattgaatttaccctagataggaagggttcttggaggagatgataatgagttgcactctgcatagtttagggtactgatatgagtctgttcttcagcattaatgagtagtttgaactatatcattttaattgtacttctgatttgcctgttgttttgtgtatatctggtgaatccccagctagactgcaacttcctgcaagagaagtcttttttccctttttataaaatctcccccaatactcagttttgtgctgtgtgtaaagttggtgctagacaaatgctagttcaatggtgattattgaaaatcacaataaaccagggtggacattcttataggtggagcagacaaaagcctatgccaggtggtcagggttgggtagatccttgaatccttcaaaatagctcgtgattgctccttgagtgtgaatcttcgtaatcagaaattcactcctttgtcttaaagcctttatcaatgaagtcttagcaaccatttatgcctctgttgaatgagtataattgtatggctgagtcacggctgaacttaaaaggaggattggcctggttaatccttcctaagcaccagttttgctgtctggagagttgctaccaggcactcaggtctgcctgtctggatgggaggccccagtggaatacttagattccactaactgagagagtcagagagaaaacacacccagtgcaggtgcctgattaatgacttatgattaaaataatagtatagagaggaactgaccattaattactcacatttacatactaattttggtatttttgctttcaaggaaatacaataccaaggcacaaattggttccctcctttaaacctcaattatcataattttgctctatttactctatttctagtttgcttctcaactccagggaggactctccttggctttgcttgtagtcagaactgaagcgtttcaagccaaggcatgtccggtcacgtcttgcctcagggctggctgctccggctccaagtcgggaagatccagaggccttacttctccaagacaagcagagatcctcaacgttcagacacttctgccggtgtgtgaagcattaaaggtgggggagaatctccctcttctccctctcctcccatctacactctccccaacccaacttttctcctggtgtttagactttgacgttggtttactccattgatcttatttctcatttccaaaaagaacttagtttcctaccatccattccttttactccaatatctggcatttgaaagatgttaatgctttttaacaagtggtattgggaaagttggatcaccatatgcaaaagattgaagctggacccttacctaacaccaaatacaaaaattaacttgaaatagatgaaacccctaatcataagaattaaaattataaaattttcagaggaaaatataggaaaaaacttcatgacattggtttcttggatatgacattaaaaataccagcaactggccaggcatgatggctcatgcctgtaatctcagcactttgagaggccaaggtgggaggatcacttgagctcagtagttcgagaccagcctgggcaccatagtgaggccttctctctactaaagataaaaacggccgggcatggtggctcatgcctgtaatcccagcactttgggagcccgaggcgggtggatcacgaggtcaggagttcgagaccagcctaaccaacatggtgaaaccccgtctctactaaaaatacaaaaattagccaggcgtggtggtgtgtgcctgtaatctcagctacttgagaggctgaggcaggagcattgcttgaacccaggaggcggaggttgtggtgagctgagatcgtgccattgcactccagcctgggcttaataagagcgaaactctgtctcaaaaaaaaagagataaaaacaattagctgggcatggtggcacattctgatagtcccagctacttgggaggctaaggcacaaggatcacttgagccctggagacggaggctgcagtgagctatgaatgtgccattgcattacagccttggtgacagagtgaggccctgtttcaaaaaacaaaataaaaacataaacaaaaaaccagcaacaaaagaaaaaatagttaaattagacttcaccaaaactaaaatgtctgtgcatcaagggacacaatcagcagagtgaaaagacaagccacaggatgagagaacgtatttgcaaatcatatatttgatgagggattaatatccagaatgtacaaagaactcctacaacttaacaagaaaacaaacaatacaattttaaaaatgggcataggacttgattagacagttctccagagaaggtatgtaaatgaccaataagcatatgaaaagatgatcaacatcactaatcattagggaaatgtaaattaaaactacaaggagatactacctcatactgattagaatggctagtataaaaacacatcaaaaaataacaagtgttggtgaggatatggagaaattgcgctgttgatgggaatgtaaaatggcacagcctctatggaaaatagtatggcaattcttcgtaaaattaaaaacagaattaccatatgattcagcaatttcacttctgggtatatactcaaaagaatcgaatgcagggtcttaaagagatgtttgtatatccgtgttcatggcagcattattcacaacagccaaaagaagaaagcaactcaagaatccatagatagataaatggaaaaaatgtgtgacatacatacaatggaatattatcagttttaaaaaggaaggaaattctgacgtgttggcttaaaaaatcacacattttttatacatttagaaaggagactttatttcttataaagggttacatcctgcagggtggccatctgacaggctgagaagtgtagcctctggttttttaaagccattcagccactcttatatcttttgattggagaatttagttcatttacattcagtgttataattgataagtaaggacttactcctgccattttgttatttgtttctggttgttttgtggtcttctcttccttctttccttcctgtcttccttttagtgaaggtgattttttctggtggttatgttttaatttcttgctttttattttttatgtatctgttgtatgtttttgatttgaggttaccatgaggcttgaaaattatatcttataacccattattttaaactgattacaacttaacactgagtgtgtaaacaaacaagcaagcaaagagaaaactaatgaaaactctacattttaactggcttaccccactttttaacttttttgttgtttctatttatatcttattgtattgtttatgtcttgaaaagttgtggtaactattatttttaattgcttcctcttttagtctttttactcaagatatgagtagtttacacaccacaattactgtgttaaaatattctgtgtttttctgtgtatgtactattaccagtgagttctgcaccttcagatgatttcttattgctcattaacgtccttttctttcagattgaagaactccctttggcatttcttgtacagggctggtgttgatgaaatccttcagcttttgtttgtctggaaaagtctttatttcttttatgtttgaaggatgtggctcgctgaatagactattctaagataatttttttttccttcagcactttaaacatgacatgccactctctcttggcctgtaaggtttcccctgaaaagtctgctgccagacgtattggtgctccattgtatggcattttttatattttttattttttatttttttatttttttttgagacatagtctcattctgttgcccaggctggagtgatgcaatctcagctcactgcaacctctgccaaccaggtttaagtgattctcttgcctcagcctcctgagtagctgggattacaggcacccactaccacacctggctaattttgtatttttagtagagacagggtttcactatgttggtcaggctagtctcagactcctgacctcaggtgatccacctgcctcagcctcccaaagtgttgggattacaggcgtgagccactgtgcccggccaggaacctttctttatccttgagccttgggagtttgattatttaatgtcttgaggtagtcttatttacgttaaatctgcttggtgttttataaccttcttctacttggatattgatatttctctaggtttgggaagttctctgttattatccctttgaataaactttctacccctatctctttctcaacctcctctttaaggccagtaactctcagatttgccttttgaggctattttctagatcttgtaggtgtacttcattttttaaaattattttttcttttgtctcctcccactgtgtattttcaaatagcctgccttcaagctcactaattctttcttctacttgatcaattctgctattaaaggattcagatgcattcttcagcatatcaattgtatttttcagctccagaatttcgggcttaattcttttcaattatttcatttgcttcattaaatttacctggtaggattctgaattccatctcatgttttcttgaatttcattgagtttcttcaaaagagctattttgaattctctgtctgaaaggtcactctgggattgatgccttatttagtttgtttggtgatgtcatgttttcctggatggtcttgatgcttgtgaatgtgtgtcagtgtctgggcattgaagagttaggtacttattgtagtcttcacagggtgggcttgtttgtattcatccttcttgggaaggctttccaggtattctaagggacttgggtgttgtcatttaggtttgggtcactgccatcatatctgcattagagggcacctcaagctcaggaatgctacggctcttgcagactcagaggtaccaccttagtggtcttgcataagatctgagagaatctttccccagctgctgctgtaggatgagggaggggtagcgtctgcaattcaagactgtcttctctacgcttttcagtgcctctttcagtgatatgaagttaaaacttggtactgcaatggcccacttgatctttggttcttattaaggtgttttttgttgatagttgttcattttgttgttcttgaagggaggacaattggtggaagcttctatttggcatcttgccccacctcccttagattttgataaattttaagttttcatactgccaaattgcttacccaactaaacattgtgtgtgagtgctatcacatagcacccatgccaggctgtaatgttatttattaattttttgccaacttaatgtgtgaaaattgtgtgttcttgttttttttttttttttttttttttttgagacggggtcttgctcagtcacccaggctggagtgcagtggcacgatctcggctcactgcaacctctgcctcccgggttcacgccattctcctgcctcagcctcccgagtagctgggactacagacacccgccacgatgcctggctaattttgtttttgtatttttagtagagacggggtttcaccacgttagccaggatggtcttgatctcctgacttcgtgatccacccaccttggcctcccaaagtgctgggattacaggcgtgagccaccatgttcttgttttactatgcatttcattgagctttttgcaatatatttttgtttcctacttttatttccctcctcctttttctagtgggttgtctataaatgtgtcttgctcatctataattgatttctaatgttttcttattgattgtattaactctatatataattttaaaattacactttgcaaatttcttgcaaatatcccagtctattgcttatctttaaattttggctattatggccaagcatggtggctcacacctgtaatcccagcactttgggaggctgaggcaggtgcatcacttgaggccaggagttcgagaccagcctggccaacaaggcaaaaccctgtctctactaaatagccaggtgtggtggctggtgcttgcctgtaatcccagccactcaggtggctaaggcacaagaattgcttgaatctgcagtgagctgagatcatgccactgtgcttagcctgggtgacacagtgagactgtctctaatacatacatatatatatatatatatatatatatatatatacacacacacataaattttggctatttttatttgatgtttctgattgcctgtgtttaaatctgcctttatctcctttgtgttcgccggtgaatttaaagtgcatatgtagacaggggttaagtgtaaatcacactgaacctatattaacaacagcatcttttagaaataatataggagctgttatcacatccctgtccctgagtttgacactacctgagttgagttcttattctgccactccctctgccaaacccttggatctagagttgacagataaaatacccagttaagtttgattttcagatacccaggatgtaaatttgaatttcagatataccattttttttttttttttttggtagagatggagtttcatcatgttggccaggctggtctcgaactcctggattcaagttatctactcacctcgacctcccaaagtgctgggattacaagcttcctgtaagtacttaaaaaaaataagtatatcccaaatattgcatgggtcatagtgatactaaaaagttacatattgttcacctgaaattatttacttatttttttgagacagagtccggctcagtcacccaggttggagtgcagtggtgcgatctgagctcactgcaacctctgccgcccgggttcaagcgattctcgtgcctcagcctcccaagtggctgggattacaggtgcaggccaccacacccggctaatttttgtatttttagtagagacggggtctcaccatgttggccaggctggtctcaaactcctggcctcaagtgatcctcctgctaccgctcctaaagtgctgagattacaggcgtgggccaccgcgcccagcctgaaattcaattttaattgagtatgctgtatttttatttgctaaatctggcactcctatttggggctagtttactaacacctgcttactgaacaccatccagtaccaggttttggggtgagtgggttggggggaagcagaaagaaaagatagctccagctcttggagagttcatactctggtttcctggagaattctaaaatcattaaaataatcctctcgaccattacaatgactgctagatgaaatttctgagagcacagcttccgagtttccctgctgcctagggcagagttatccaccttcaccttatcatagaaccacctgagacgcccctgccatggacagtctgatgcttttggtttggggagggatccagaagcccgaggttttaatgagagccacgtgattctgctgagataagtctggagaactctggcaagcctgtctcttggctcaggcttggaggcctccgagcagcaacatcgtcccaattataccccgttggagcatcttcagatcttccactcttttcacaacgcaatcaaaatcttcgtacccattttgcagtagtgatctctgtaagttgctttacaattcataaagtttattctatttgatcttcactctaatttacaaagaaaagcagggaagtctatttctgttttacagaggtgtacagggaggctcacaggggctaagttcacacagtaagccctcgaagctgccagggctgcaaagcccaccctctttccaccgcaccgaactacctcctttcgcctacaaaacgtaggtggggaccactggtgttggaatgacggcccacctcgagtttcaggtgacttccactctgcaattaacttgcaggcagccccagacctgcaatgaacacacgggtgggggagagatatgcacgccagggtcagtgggaaccaacagccgaggggtgagcggggctaggggccccgggccgccggcggggcaaacgcggttcagaaacgcaggccgcgctctggcccgccccctgcagcagcacggcctgctcgccatcgcccggagagcgccgcgggttcccgagtccgggcgcggagggcgcgcgggcacggcggcaggggcgtgctcggaggacgcgcgctgcgctgctcctccaaagggcagctccgggggaaagagggtggcgtcccggggaagcccgcagccgccgccgatgtcgctgggactcggaagtgccgaaagaggggtgttgggaactcgcggcgcgcgtgaacgttgccgtcgccgccgcccgggacagcccggaggttggtaactggtgaccatagggggtcctggggaggttagatgctgaattttctgcgtcagtttactctgttaaaaaaaaaatgcacaaaacgctttccgtttcctacccaagttcccgtgtgcgcgcccgagggcgggacagaggaagttcccggtcgggcgaagaagacaaaagcggcgggggccgcgcgcgcagtgcgcccgggcaaaggcggggatctaggcgccgggacaagtccgcgcacggccctgcccacgtcctctctccttggcttcgtccccagcttccggaactgctgcggggagttgcgaactctggtcctcttggcagtatcggcggtgcgcctgcctgcctgctgtgactccagggactctaaagttagagacttcctttgcgttctatcttcaggactcagttttcttcctctgttctgagtctaaccttcaggtggcaggtctttatgcggaaaaaccctcccgctaatcctcaccagaggtactttacgggtagcattggtgttaagaaatgtgctgctacctgtgtacattgctcttggatcagggttgtagggctagggcatttggcatcctcagaggtttgcattacgtgggagtgagacattgcttctctttctgtttttgttgttgtttgtgtttttgaggcggagtttcgctctggtcgcccaggctggagtgcaatggcacaatctcagctcactgcaacctcagcatcccggtttcaagcgattctccagccttgcctcctgagtagctgggattacaggcatgcgccaccacgcccacctaattttgtatttttagtagagacgagggtctcaccgtgttggccaggctggtctcgaattcctgacctcgggtgatctgcccacctcgacctcccaaagtgctgggattacaggcgtgagccaccgtgcctggcatctcattcattctcagagctaaggacctatttcaatgtgattaagtgctatgggaatgcaaggagaggagagggaaggcttcattgaagaggcggtagttcattgaaggagactttgaggaatgatttttttccccttccattcctcatgttccattttccctgtgatttttctccctcctttctcgttgccagtcagtccctaattgtgattgtttgataaggacagctctgacctgagagattcaattaatgttaatttaaggagactgtgtgcttattaggtgctttagatacattatttctaaaccttacagtaactgggaaagataagtgttgttatctcttttcacagtaggatagagaaagccttggaggggagccaaagccacaaactagtacatgtcagggccgggttttggactcctcttttggatcaacgcctgtgctttatctactgtttactttgccccctccttggaagtaggttagatggatgaacttagggtgaaagtcaattctttggagggagcagccgtttttgtgggtggccagatgttggtgggagctctgtaggtagcatcaggaacttgcgagcatgggccttacctgcaccccctgcttccagcttaggacctggcccagggggaatgttccctaaagcagtggtccccaacctttttggcaccaaggaccggtttcatggacaataagtttttcatggactgggggaagggggatggtgttgggataattcaagcacgttacatttattttatttatttgttttgagacaagagtctcgctgggtcacccaggctggagtgcagtggcacgatactggctcactgcaacctccacctctggggatcaagcaattctcgtgcctcagcctccggagtagcttacaggcatgcgacaccacatctggctaatttttgtatttttagtagagacaggatttcaccatgtcaaccaggctggtctcaaattcctgagctcgaactcctgagctcaagccatcctctccttggcctcccaaagtgctgggattacaggtgtgaatcaccatgccccacctgcattacatttattgtggactttatttctattattattacattgtaatatgaatacaactcaccatagagtagaatcagtgggacccctgagcttgtttttctgcaactaggcagtcccatctgggggggtgtgttggtagacattgacacccaaagtgtgtttgcttatgtccagcctacttcatagtctcattttggttgctgtcactgcagaagaccctgcttcacaaagataggatgttggaaatggaagcaggcttttcggtgcttttgtggcaatttcaggatactttgccttgactttaatccagaatgtatggatatttgaagttgtcttaaacatacttctagggcccggtcatttgctatctcaaacagttggtcctcttctagcatggacaaagtcaattcacctggcttattcacaaatggatctaggatccttcccagttcgggtgtcttttgtagttgggaagtaatgctcaaactcttttgaaagctgagataggtgatcatgcaccagctgggagagagaaggccctggcttagtctctttcaaaatctctgctaatgtttgaaacgtgtcagaaatcccagtgttcacttgtcgccgcaataattccagtttggttttgagtgcagccacttatctgccgacttgaacacagttctcccctgaagggacagatggagttcattgaggaggtaagcaagtaagcaagttttgtaaccccttctatgaaatgtgctgccagtggtgactacttttctagaagaaatctctggagtggccctcataactcaaactccggccagtgatctatctttagaaagccatcccacttctgtgtataaaagatgtgtgtgctctatgtccatctcacagagctgtgtgaacagatgtgagttaagggcatgtactttaatgtggttgataattttaatcacatcctgcaaaatgttcttaagttcaggtgacattttttggctagccaacacttctctatggatgtcacagtgcatagactcacattcagaagtgacctctttggcccgagtagtgaaaccagtcgtagcagtcgctctgcccaagcacatactacccaaaaggaccaattcggtttttctgataggtaatcattcaaagacttgaatagttgtgcagctgtggtgttggttagcaacaaaagtgcaagtgacatatcctcgtgcacctaacatcttcatgtatatcctcctgaaaactgtatcacaaaaaaacaagcattgttgccttgtcaacactggtagactagtcaacccagattgcgtaccgcagtgactcattaatcctctctaccaattgtgcctcaatatccgctgctatttcaattcgcctagtttactcttcaccaatagtaaagggcttcttagctttagcaatacggttagccactaagaatgatactctcattgcagacacatttgatgaaatggtagccttcaataattgcttctgttctttgtgcttatgttttttcttttgaaaaactccgaagccttgtcttttaatgcagggtgcttggtctccatgtggtgaagcagttttgaaggtttcatggcttcattggatagccagtggccacatattacacaaagtgggcttggagaatgtgagtcacctgttgcaatgaacctgtaatttgagtatgactcctggtattttcttttaaatgcagcttgctttttgttggcaatcttacagtcttctgtctcatcattgggtcttcccccttttcaaagaagcttaccagtgatgtttgttttttactcatttcggctagggttagcttgtgggcttaccaaaactgtgactgagacaaatgtgcagtgcaggaaacaggcacacctggaagtggtaaataatgggcgggccatgagtggactaaaataagtgtcggattctgactgaaagcctgcccacagatgcagctgtacgatggaagtacatcaactcacttgccactataaagcctgccaccaggcagcattaagctacttgttacttgacactcactgataggattttgatatgagtctgcaagcaattgatttattatggtctctgtgtagtcaaacctccctcttaatgctaatttgtatttgcagccactccccagtgctagcatcacttgtagtcccaactacttgggaggctgaggaggaaggatcacttgagcccaggaggtcaaggctgcagtgagctatgatcaggccactgcactctagcctgcatgacagagtgagaccctgtctcttaaaaaataataataaaatgaaaaaactaaaaaagctccaaatgtatgagtatatgtacttctttatcaatgcagtaagtaacaaaattcagtgcagtagcaagtaactcctgtaatttcaaagtagtgatgcccatgtaaatggtattttgtagtattttcaaaggctacacagtagtatgaaagtatctgacttttactggtgacattcgtcagagctgcttttactactatgatttttttttttttctgagacagcgtctcactatgtcacacaggatggagtgcagtggcatgatctcggctcactgcaaccttcgcctcccgagttcaagcaattctcatgcctcacccaccccagtagctgggattacagatgttcaccaccgtgcctggctaattttgtagttttagtagagacagggttttgccatgttggccaggctggtcttgaactcctggcttgaagtgatctgcccaccttggcctcccaaagtgctggaattacaggtgtgagccattacatctggctggaactgctcttactactgtgagtcgttgtccacatctataatccaatgaaatgctaattttcagccagaaattcatgaaaataaagatatttgagctcatgtccccctgaattctctctatggacaccttgggagtggagggctggggatcctgggttacatacaaccctacttagtggttgtttttcatctaagtacttgctggccactttagcgtgtcattttttttttttttttttttgagaaagggtcttcctgtgtttcccaggctggatcacagctcactgcagcctcaacttcccaggctcccacctcagcctgctgagcagctggggctactggcatgcaacaccattcctggctaatttttgtatttttagcagagaagggatttcgccatgtcgcccaggctggtctcaaactcctgggctcaagtcgtctgcccacctcagcctcccaaaatggtgggattacaggcatgagccaccacacccagcctgttagtgcattactgatagcagtttccttctccttcagttagttttcccctttttagcccgggttcacagttgtttctgtttgatgaaagcttttgagaggggattgctggattgtttatataatctacctgccctgctccttctgtgggtaatatggttggagaatattcctgaaatagtggatgtatgtcatatagtgtatacaccctacctttttatttttttatttttatttttatttttttttttgcgaatagaaatgaaccttagtggtagatgatgttattagtgtcagggaagaaaaatgaactactatcacatatcccacagacagaagctcttaagatgttatgaacgatttcatggtaatacatttgaaaattcagatgaaattgacaggtttttccaataaaatatattaccaaagacacaaaaactagaaaaaatgagtagtcctatatctaccaaaaacattgaatttgtagttaaaaacctttccatagcaaaattttcaggcccagatggctttactagtgaaacttccaaacatttaagaaaattaaagaggaaccactttccggttgcatttatgaggccagcacaatcttgttactaaaaattgataaggatattacaagaaaattataggccaaatgctcataaagacagacacataagtcttaaatatggtaagtcaaatctagcaatctataaaaaggataataaatcatgaccaagttggatttatttcaggaatgtaaactttggctaacactacgaaagtcaacaaatgcaatttaactccatatatgaagtaaaggagaaaaagtatttgatacaactcagcacccattcatgatgaaaaaaaaaaaagcctctttgcaagctggagcattgagagaaattagatttaaaataacagagggtaaggtattgctctgcaaatctatagattcgggccaatcccaatcaaaatcccggcaaattttttcttcaaaaataggtgataagcagattggaaatttatttggaaattctagacagtcttaagagcaaaactggaggacctaagctactagatcaatatgtagtcatgtcagtgtggtattgcataaagctacacagattatggaactgagtaaagaatccataaacaggcttatacatctgtggtcttttgatttatgacagaggcaacactgcagggcagtggagagaagatggtcttctcagtaaatgacactgggtcgattgactatccacatagacaaaatgaatctagatcatgtacctcatctcatatacaaaaattaatcaagataacaacatacacctaaatgtgaacgctaaaacaaagcacctggaagaaagcaaagtaaaatatctttatgacctagggacaaggtttcttgaataggccacaaaaagcactaattggtacagtgataagaatgaacaaattattgcctcacataacatggatgaatcttgtgacacaaagctgagcaaaaccaagatagatgtaaaagagtaaatgcaatgtgattccattgatgtaaagttcaaaaccagacaactaaataaaccatggtggtagaagttaggctagtggtcatctttgatggagttagtgactaggaaagggcagaaggggcttctgaggcattcttttgttttttggagacaggatctcgctctgtcacccaggcgggagtgcagtggtgtgatctcagctcactgcaacctccctgacctgggctcaagcgatcctgtcactgcagcccacctgagtagctgggactacaggcatgcaccactgtgcctggctaatttttttttttttttttttttttagagacagggtcttaccatgttgcccaggctggtcttgaacccctaggctcaagtagtctacccatctcctcctctcaaagtgctagaattacagatgtgagccactgcctctggcctggcgtgcagtttttatctcagtgacaattacttggtaattacataaggctttccacttcttgaaagccctaagggctgggcatgatggctcattcctgtaatcccagcactttgggaggctgaggagggaggatcacttgaggccaggagtttgagatcagcctggccaacatagcaagatcctgtctctaaacaagactaaaaaattagcagggggtggtgatgcgagcctgcaatcccagctactcctgaagctaaggcaggaggatctcttgagcccaggaatttgaggctgcaatgagctatgatcatgccatgcactgtagtctgggtgacagagtgagaccctgtttaagaaaaaaataaaaaataagaaaaaggaagccttaaggttttttcttcatttaagtgtattgtaataaagtttacttaaaatcttgtaaaaagttaggttcattctgatgctcccaggctggggagtgtaagatgtggtgggcacaagccttgctgattaaaaaggcttaaaataggttgagaattttcaggggaaagaatgcaatatcacatcagtagcttttttttgaattagggacttatataattgactcccttttgccaatctttaatggcagagatctggcttgagggaatttcatataaaaagacttagagttatgtttgattataagattgatatcagtgtggggggaaattagaaaagctaagggagtattaagtagaaatttttgttttcagatttaattttcttccaatttaagttttgaaagtttatgaccactggattaaaaaacttttcttccaatttaagttttaaaagtttatgaccattggattaaaaaacaatctgttttctataaatcctttcagttaggtactttcctcccataaggccatgaactaactgagggcagggatggcatatgagtttcctattaaacctgaactaaattaacacaaattcagtggcttcaaaaaacacacatttattaccttatggttctggatgtcagaagtccaaaatgggtcagcagggttcatttgttctgaaggttctagggaacaatctttttgttgtcgttgccttttccagcctctagatgactcttagattccttcatccaggagcccctcctccatcttccaagcacaccactctaacctctgcctccatcatcacctcacatttcctctctgtctctgacccttcagcttccctcctgtaaggaaccttgtgattactttgggcccacccagataatccaggctaatctctcaatcagaagatccttaatcatattggcaaaatcccttttgctgtgtaaggcaacatagtcacggttccagggttgaggacatggacacttctaggggacccatctttggtggaccccacagaggggatctattttgtcttcacaaagagcacacttcctggttgtcagtagaagttcattcgtatttgttgaatgaagacatgggtctaagatattatttgagtgcagtttctgaaagaaaagtgatggtcttgtcctcctctcactgacacaattggagctttgggttcagttttaggtaaatgtactatacagagtcaactgacaggcagaggatctggggacaggcatggtggctcatgtttgtaatcccagcactttgggaggtgtaggtgggaagatcacttgagtccaggagttcaagaccagcctgggcaacatagtgagacccgcccccatttaaaaaaaaaaatgggtgtagtggctcttgtctatagtcccagctactcgggaggctgagatggaaggattgcttgagcctgggaagttgaggctgcagtaagccaagattgtgccactgcattccagcctgaacaacagagagtgagaccttgtttcaaaaaggagcctggaaccaagtcattgaagtaatggttgaaggaatcatagatgttggtctggaagagggtttggatggagtagatggcattaattatctttaaacatttgaacgagtattattggaaagaataaaaaagcctttttaagcatactcaataatagtaatagcattaaaaacaacaaaaataagcatttcagagtttactatgcctaaggcactgttttatcattttataaattcacttaatcctcatatcaatcttctgaggttcgctattactgtgttttacagataaggaaattgaggctcagagaggttgtgcaccttgtcctaggtcacacaaccatgaagcagcaaagctggaattcaatctttggcattctgactccagagccacccctgaaaccatatcacactatgctgtctccatgcctttagttccagaaggtagaagaggactggtggcagaagaaatccacccctgtatttttttagaaatctgtattttttagaaatacggggtagatttcaaggaaaaacacaacaatcagaactgctagccaggcacagtggtgtgcacctgggaggctgaggcaggaggatcacttgagcccaggagttagagctgtttggagctgcaatgagctatgatcacgccactgcattccagcctgggtgacagagtgggaccctgtctcaaaacaaaaacaacaacaaaagcaagaactgcttaggaacagagtttctctgccttgtaatgttactggaaatggtcaagtaggctgttataaaaggaattcccaaactggctggagatgagaccaaaaggcaatagagactccactgattttgaaattctgatttgggaacatattttttttccattacatatataagaaggtagggaacaacctttgtgacattttatgtaataaagatccattgtgaaaggtagcttttcaactaattttccagattttattgattagtaactatttataatatacctggtgtgctagatgtgtgcccacccctttctaaggtacccttgctgctcctcccataaagaagtatggtctgttttctcctccttgaatccgggctggtctttggacttgctttgaccaataatgtgttctgtgaactctggagcctggtccttaagggatgttgcacctcttgcctctgttcttttggaaccctgaaaccccactgctgtgaaaaagccaagtctagcctaccagaggaggagccctggcctgggggagaagggaggtgacttgtgtgagctggcgccaaatgccagacatgtgcatgaggtcatcatggccccctccagccccagtggagttgtgtggtgacagaagtcacatgagtgacctcaggagggacatgaacagaactgtccagactgccatcccacaaaatccttaaaaagaataaatgttcattgttctaaggcatcacatgttgtgatggtttcttatgcagcaatacataactaatacataatatgttggtgcggatgtggaagtagtgggtatatattttaaactattctgtaattagacttttttccccactccagtgcacctcttccagtctatctagtcattcttctgtgttggtgaaacctttctgggtttggagaagtgtttcctcttagtattatgtgggttgaagaataagtctttgtaagactcttaaatggggactgggcacagtggcccacacctgtaattccagcagtttgggaggctgcggcgggaggatcactcgaggccaggagttcaagaccagcctgggcaacatggcaaaacccagtctctactaaaaacacaaaaattagtggggcagcacactccggcctgggggatagagcaagactctgtctcagaaaaaaaaaaaaaaaaaaaaaaaaaagactcaagtggggtttggagagaattgtgatatgggaatctggacttggtggttttcttggagaaaatcatgtaatttagagtctacaaaatgggattcagtttcatgaaaattggaccctggaaaaggcaaaagtctcataccactttttccgaatatgctagaatattgcactactatttcattttctttaaagccgttgtcatttcagtgggcatgtgcttctttcacttttattgcttgtggtttccagagtgctcatttgttcctgaatttagagctatttcaattttactcttatctctgcataactgctgactttcccctcttatttccaaggtaaatcggttaggtttagtttgcctttttcagtaaatcttttaaggaatgtatgtgagttagatatttcatgtgtattttgattacattttattgatttaaatttttttatcagagagtgtctaacgttatgcataacgtttaaaaattctattacatttagaccacttatattctagctttcctaatggattgatttcattatagattttggaaaaaatgagtccagtacactctgtaagaatagtgaggtggctgagggaaggctctggagttagacttactgggtatgaatctaagctttgctgcttaccagctgtgtgatttggggcgggtttacttatcctttctgggccttggtttcctcttgtgttaagtgaggttatcagaagcaccaacctcaaaggtttgttatgaagattaagtgagataatacttgtaaagtgccttttcagcataggaaatctgtaaatagtacttgttatagtacagctattactaaagcataagaaaactcagtagagggaaatcttcatttaggacattaagcagtgagtcagtagaagtgacgatggtgatgctggtatggagggattgttagcttaatgatgagagctgtcttgttaaagttctctggtgcatgtgagtattgggttatagcccatttagtgcttgatatcaagatttaaaagcagaaaaaatttaaaatggaagtgttggaatccattagttgcctgcatcagaagtaaagctaaagtatttttgaaatgatattggaagttgctgggggaaaagcatcttgcagccgttatgtttatgtatgtttcaggctttggcaaggtgtgctgtacttttcttccaagatcaaggaacaggatttctgcctgtatgacagtgggggttgggaattttggttctaatttttgctccattgctggcttctctgtccgtgggtagatcgctgcttcttcctgagcaggattctgattcctgaaagggacctaaaaacttagccctcctgagaggatccgagtagatggcatctttgaaagcaggtggagtgttaaattccaaagtaaatgcaaatgcaagtggctccagtatagaaaaagttctgtgagctgagagattcttgccattttacagctaagattttattctgtggccctcttgagttctataattcccagataaatatattttttgaaatattcaaccttggggtgtttgtacccaatttggaggtggagaaagctccctattcctccagtctgaattccttccctctgattccagggaaaactttgctatgatttcctttaacatctagtattaaatgcacgttctaccgctttgtcctcacttgcctcaaaattctcactcttttcaacaacatttagcttcaagatcctgttgtcttacagctttggagttgctgttttatcttcttcatcttcctcttttttccccctaccagcttctggactattttgatgccaaggacaactcaatttttccccatctgtgtggcttggttccagcactctctccactttcactaagggcctaaatcatcaacctccctgcctcttgggtctaccacagcatcaaggggctgctttgtagagcttcattcaaataattttatgtactggcttgcaagcctgaggtttctgcaggaaataaaatttaaacatgaaatcgtatgttttaagactccttaccacttggctcctgttctcccttccctgaaccatccacactttatcttctttacagttccgaccagtattcccacactggggaagtgttcttagacacatctcaccatcacacatccctacaaccctccttcactattacatatcaatagtgcaatctcatttgtgtagattaatcaggtagactgctacttaaacacaggctgtgtccctatagattggccgttttctatagaaatgatgctgtaagtggtgatgacttttctaggctatctcacagctacccacttagctgataatgttggtgcaggactgactgcatgaaaacagaaaagaaacatcacttacacatttgagtaagaacctccttgatttcagcctgattgctctgcctaaagagggacatgcttgtttagagtatgagaaatggaaacttggtaattttgtgagagagtttttgggaacctctaagggcctggacattttaaaaaggttccagttatattcccaaatatatagttttccttttcttttacattgtgtcataaatcccttaagacatatctactctgatttactttctggctgcacagctgaaataaacagggaaaacaaagtagggaaataattttcctaagataagtgggcgagtgttgaaggccgaaagaatgagggtcgtgatcaactcagtataccactggagactatatgagtaaacagcaaactgtttctcatgaaagcaggttgttggcaaactgacaaactgtgtctgcctcccagaaagaatgctggggggcagtcaccacccaggcacagtgtttcttgtgattaggcaaatctgaagcctgttagcaataacgtgaacctgtgatcaatcaagcagctgaccagtcattacctcctcctccctgctctttctgcccaataaaaacaaagggctgtagaagctcgaggttgctgcctttgctccctagaagcagggagctctcttcttcccctggccccttcctttaaaatagttacttttaagttttcatttctgccttcgtcctccttccttcagtctcctaatgactgtctcaagtagtaacagtagtgactgtcgtagtgacagtctcaaatagtaaccattgcagtcagctacaggcaagagttgaaaagagagtgtgtgaggaagaaagctctgttaaggaggatgggtgagtgtctgtgtggtggtggtgtttcgaggtggcattcgtgtaatggagaggtgaaaatgaaagtggaaagtactgcctgtcattcccttgggagtagcagagacgtaggtggtgaggaagaggcaccgggctgaaagcctgcgggtggtccccggggatagtttgcttgctgtccagggtggctttggattgggcgtcagaagaggaatgagacattaacgaaatccctggggatgccaacttcctgaaagaggtccagatgcacgtaggatgggcataccccaggaagttcagccagatttctttgattcagggagaaaatcagggtcagggcttaggtaggctcctgatgagtgaaattcactaactagtaactactaatgtttgttgagtgcttattcactgccaggccctgggctaagcattttacatttaaccccttcaacaaccctataagaaaacatctgggaggccgttatctacccgtttccttaaccaataaatgacacagcctgggactctccctgcaccagcccacccctcctccctgaaccccacaggtgggtttggtgccagaatgtatcactgtgctgtcaagtggagactatttggttcaattcctaaattttgggggtgaggggacagctagtttccctgcttagttacctggtgttttgccgctagttactatgtatctctgtgtatttgtctacaaaacatagagcattgttgaaactatgttattgtttcattgaaacaatgttattgtttccttataccactgagtagaagaaaatggagtttctgctggggccactgtctgtggagtttgcacattctcgctatgtctgcaggggttttctctgggtacttggtttcctcccacatcccacagctgtgcccattaggtgaattggtgtgtctaaatggtcccagtgtgtgaatgtaactgagtgtcctattaagtttttctgtgatggcatcaaatgcctgttgatgctcatctgtccaaggcagggggctctgaatctagtcccttttaaaggcctcataaagtggcttagccatcaaccccaaatttggaattcaaattcaacaaaagccagacattcctagaaatccctgcaattgcctcccgttttggggagcctttggggccactgttatctgctttcagtagggtctttaggctccttcagcctgaagtcgaggttccagagactagaccttgaaatagtacaggcacctgtgaaaatctcccctaccaggagatggctttgagggtacagttaatttacaacccagctgagccccagatgttgccagcccgttcacaagatggagcaacaattcaagacgagtcatcggaacaagtcatgccggcatcggaacaagtcatgccggcctgcactgcctcaccccatgccgcaacttgcttccccttcttaaacctttgcactttgcttggaaatttgaagtggttccattaaggcaagagtctagaccgtcttccccatggctagctttggtctgtaataaagtcactttctttctgccatacctctatcttgctaatttgttttgcaagtggtgagcagctgaacctgtgtttggtaacgagtgtgggggagtgagtatgagtgggttctgcgctgggatggcatcctgtccagggctggttcctgctttgcatcctgagctgctggaatgggctcagctaccagagaccctaaattggaacaagtggggtggaaaatgaatgaatgaatacaaattaataaaaatttgtaaagtctatgataatcatacaaatgcatgacaaaaaaaatgtagtatgaaagcgctcagtgagcccaccctaattgtaaatgttttgaactgcatggtggcaggaggtgctccttataatttttgctttgcaaacattttattccttggtttaaccgaccaccatcacaactgccatcacttgctgattcaccaaacttgggtaaataatgatcttacctgtgcttattaatctttaagtgtatgtgtatagctcttgtttatttcagtgtttactattagaagtgttttggtctttatttagatgtatgatgtttttgtgaccagaaatatgcagtaggaacttactttttgcttatatcaattagcctattgtaaaattagtagcattatacattgttttgtttaaagttacaatttccaagaccctactggtgatgttcagtaaggactcactgtacaatccagctaagagcagcactaagctgggtgcagtggctcacgcctgtaatcctagcactttgggaggccacggtgggcggatctcctgagcttaggagtttgagaccaacctgggcaacaacaacaataaaaaactagcctggcattgtggtgcatgcctgtaatcccagctactcaggaggctgaggcaggagaattgcttgagcctgggaagttgaggctgcagcgagctgagatcatgccactgcactcctgcttgggcaacagagcaagaccctgtctccaggaagaaaaaaaaaaaaaaagcagcaccaaaatgaaaaattattaaaccgaattttctagttccctgaggattaaatccttaatgcaggaggattgtctcagatagaatgtccctgaaaagcatctaatggcaggccttctaaaactttcattcagtctacaagatcatttgtgttcaaatttcagtcgcccaattaggagatcagctttttgctaatcagattcttcatgaggcaaagaggtcatccgatgtaataccaacatcttttgacaggcgagacattaaattataagccaagaagttaaaattaccttcccactaaagggaagactaccaaattcctgaaaagttccagaaaggagtcttgttattctaaagatgaaagtatttaaaaataaattgtgaatagaaatggataaagctagaagcagttctgaaaaatagtaaggaacttgagaaagtgttgttgaaatactagggcttaggcttgtgttttaaagcatgaatgattgcttctggatctcttaggttgcaggaaaagtccagaccaaactttctgggtgacttttaggtaacgaaatggggcactctgggtgcaagactgcttatttctgaaatcgtggtttatcaaggctgaagtttatttcccttcctgctctgtctcccagtggtctgaagaaaggagtttgtgtgtgcggcagattctaagccaggctctaagtctgagtaactgtacactggcattaatgggattggccatggcagagtggaggggcaggggcctgggtccaaagacttggctttgagccttggctcagttatttacttatttgtttactcacatatttagacaaaaattgtacatatttatggtgtacaatgtgatgtctagctatacattgtgagatgattaaatcaaggtaattaacatacccatcaccttacctgcttatcattttatggtgagaacatttaagatctactcttagcacttttcaagaatataatacattattgttaactataatcaccatgctgtataatagatcctcagaatttattcatcctgtccaacatcttttaaccaacatcttccccacttcccccgccccagcccctggcaaccacttctgtgagtttgactttttttaggtttcacatataagtgagatcatgcagtatttgcttttttgctctggctcagttatttctggctctgtgacctcatcacatttgtcatctataaaatgcctacctcccctgttccacttccacctacttcaccaggctgttgtgaaaacaaaatgagataatgtgtgaattctggggtttggcatgactgtcacatgttagaagtacttggtggggttggtgggaggtgctgcttaaaattttgctcttattttggcatccacaatgagacatacttgagaggtttaaataaagcagtaaaggccataaatgcgtttaaatttagtgaactctttgttacttggaacatttggaatcatttaatttgctgaattttaggacctaactttcctataccttctctattacttagagtatagtcatggctgccatgatggagagatctagaataggagaggcttaaacaacctagaaatgcatttctctttcctgtaacagtctagatctaagtagtctggggcactttggggcttgggggtggtacctggatttggggactgagaggcctctgtcttgtccatgtggctttcacctcttcatccacggaggctgttccaattctgttcaacaggaaagggagggaaagaaagagatggccacagccatgtcccttcactcacacccttttgaatggagctattcaggtgtccacacttagctacagtgtagtgttggtgtccagaggaaattttaattgatgtgtaagaagagagactgaattctgaaaaggggtagtgaggggcggtgggtaacaagcagtgtctgtcacagatgtctgtgattatgtcattaactgccctttaagaaatgtacagatgaggcctggcacagtggcttgtgcctataaacccagctactcaggaggctgaggtgggaggatcacttgaggccaggaaatcaagatcagcctgggaaacatagaccctgtctccaaaaatacataaataaagtgcatagatgcatggcagacagctgattttaagtttttattttattattgcttttagagaggggatctggctatgttgcccaggctggtctcgaactcctggcctcaagtgatcctcccatcttggcctcccaaagtgttaggattacaggcatgagccaccatgcctggcctatagtatgatacttgaaagggacaacaaggatggtgaacctgttgatttagaggtttgtatactgtttgtgcttttcagactttttgaagccatttattattcacagagcacctggtagtcccttcttgctacatcccaggcactgtgctaggggctggtgagtcagagatcatggtccctgctatctgagggtccactccacagaagagacaggcatattatgcaatgggtagagaactgtctgatgtatactctgatgggagactgtgggaactcctaggaaaagacctgacccctttgacaggcaggatgcacatgtgtggtgtatgtgtgcgtgtgtgtgtgtgtgtgtgtgtgtgttggatgcaggatggagtaagttcacagggaggaggaagcttgattggggttatgtctgtatcaccttgaatagtgatgggtctccgggagtgtgaactaactgaattgatgtttagatgctgttctctagtgtcatgttcatggcttaaagttttgtctctgtttctcagaaactctcagcgtaggcatcgggaaccttcgtgccaaggagccatgctgccccgatgggaactggcactttacctacttgcctcactaggcttccacttctattccttctatgaagtttacaaagtctccagaggtaaggccccaagcttttcagacctcctatcaaacaaggaaactcctgtcaaaaaaaggagcagaggtggaagattcaagaagatgatccaatagtgtcaagatgatgtgggccttgatttgcttccccatgtcttggatagtttgaatcagtgacctgagtccattgagttttctaccctaaacctaggtcttttaggtgatgctgtggcttgtcttctataattggtgggtttgattcaaaagctattgaaggccgtggaggggatttgcgttcagaattcaaagtaaactcttaaatttctctttcatcattactcctctgagacatattagatctgggttcgttttgtcttcttctgtcatttttagtgttgcctttgtctgagtgttggagataaatcatcatcaggtcacattccagcccaaaggaag

SEQ ID NO: 4000 - DNA, 2422 bp, Homo sapiens
acaagcagaagtcaattgtccggtcccacttacaactcatcaaagctgtgagccagttaatagccgatgctgggattggaggctctcggtttcaacattcgcttgcaattaccaataatttcgccaatggagataagcaaatgaaaaacagcaatttcccagcagaggtgaaggacctgactaagcgtataaggactgttttgatggccacagctcagatgaaggagcacgagaaggaccccgagatgctggtggatctccagtacagcctggcaaactcctacgcaagcactcctgaactacgcaggacctggctggaaagtatggccaagattcatgccagaaacggagatttatctgaggctgccatgtgttacatccatattgctgctctcattgcagagtatctgaaaagaaagggttactggaaagtggaaaagatttgcacagcatccctgctctcggaggatacccacccctgtgatagcaactcattactaacaactcccagtggaggaagcatgttctctatgggatggccagcttttttgagcattacaccaaacattaaggaagaaggagcgatgaaagaggattctggaatgcaagatacaccatacaatgagaatatcctggtggagcagctatacatgtgtgtggagtttctctggaagtctgagcgatatgaactcattgctgatgtcaacaagcccatcattgctgtctttgagaaacaacgagacttcaaaaaattgtcagatctctactacgacattcatcggtcatatctgaaagtggcagaggtggtgaattcggagaagcggctgtttggtcgctactatcgtgtggcattttatgggcagggcttttttgaagaagaagaaggtaaagagtatatttataaagagcctaagctgacaggtctgtccgagatttcccaaagattactcaagctctatgcagataaatttggagcagacaatgtgaagataatccaggattccaacaaggtaaaccccaaggatttggaccccaaatatgcctacatccaggtgacctatgtgacgccgttctttgaggaaaaggaaatcgaagaccggaagtcagatttcgaaatgcaccacaacatcaaccgctttgtcttcgagacacccttcacgctgtcgggcaagaagcacggtggggtggcggagcagtgcaagcggcggacgatcctgacaacgagtcacctgttcccctacgtgaagaagagaatacaagtaattagccaatcgagcacagaactgaatccaattgaagtggcaattgacgagatgtccaagaaggtttctgagcttaatcagctttgcacaatggaagaagtggacatgatcagactgcagctcaaactgcaaggaagtgtcagcgtgaaggttaatgctgggccaatggcctatgcacgagcttttcttgaagaaaccaatgcaaagaagtaccctgacaaccaagtaaagcttttgaaggagatcttcaggcaatttgcagatgcatgtgggcaggcccttgacgtgaatgagcgcctcatcaaagaggaccagctggagtaccaggaagaactgaggtccactacaaggacatgctcagcgaactctccacagtcatgaatgagcagattacgggcagggacgacctgtcaaagcgcggagtggaccaaacctgcactcgagtaattagcaaagcaactccggccctacccacggtctccatctcatctagtgctgaagtctgagggctctgcagcatcagacccacctctaagagaactttctgaatttgcagctaatctcggggaagagaaagataggtttaatttatttgaagttttcatggtgttaatatttttgtttacctcgctagcttcagaattttgccaacctctgaatttgcacattttgtataattttttttttctttgagcagtgttgatcaagccaagttgaatatttgccatgaaattccagtgaatgtgtagctcaaatgcaaaccataagtttgctgtcagttattgtatggtcagtaccccagtcctagtacacatattttaaaggttaaagtgaatgtttttgtaacatttaagcatatttcagatgtaaataaaagattgtaaaatatacggtttttaccaaatttaaaagatcctttttagttaatactatgacagtactaaaaatatatgaataacatttcagataccattatattaaaatatttgtgtatgtgtacaaaagcgttgataaatactaatctttaaagtttgtggagttcctttatttgtaatatatgtgctcttaaaagcaatgggatgtgaaattatgaaagtattttattgttcatagaaataaaaaacacagttactttgcaaaaaaaaaaaaaaaaaaaaaaa

SEQ ID NO: 4001 - protein, 500 aa, Homo sapiens
MKNSNFPAEVKDLTKRIRTVLMATAQMKEHEKDPEMLVDLQYSLANSYASTPELRRTWLESMAKIHARNGDLSEAAMCYIHIAALIAEYLKRKGYWKVEKICTASLLSEDTHPCDSNSLLTTPSGGSMFSMGWPAFLSITPNIKEEGAMKEDSGMQDTPYNENILVEQLYMCVEFLWKSERYELIADVNKPIIAVFEKQRDFKKLSDLYYDIHRSYLKVAEVVNSEKRLFGRYYRVAFYGQGFFEEEEGKEYIYKEPKLTGLSEISQRLLKLYADKFGADNVKIIQDSNKVNPKDLDPKYAYIQVTYVTPFFEEKEIEDRKSDFEMHHNINRFVFETPFTLSGKKHGGVAEQCKRRTILTTSHLFPYVKKRIQVISQSSTELNPIEVAIDEMSKKVSELNQLCTMEEVDMIRLQLKLQGSVSVKVNAGPMAYARAFLEETNAKKYPDNQVKLLKEIFRQFADACGQALDVNERLIKEDQLEYQEELRSTTRTCSANSPQS

SEQ ID NO: 4002 - DNA, 305 bp, Homo sapiens
ttttttttttttttttatctcccaaataaactttattttgaaaagaatatcacaatatagtcatgtaaatttaaatatggcacactgagcagtattgacgcaaattatatagtcatgtaaccatgtttcggtcaatgtacaatatatatatgatgggggccccacagattataatggagttgaaaaattcctgtcacctgctagggatgtcttgatcctgaccctgcataggcctaggctagtgtgtttgtcttggtttttgaccaaaaagtttaaaaattcaaaatttaaatagataaaagctt

SEQ ID NO: 4003 - DNA, 475 bp, Homo sapiens
ttttttttttttttttttttttttttttttttaaaggaccaacctgttaaatggtccatattttattcctgtatcagaaaataaaaaaagaaaaattttcccaagccctgatttataaatcatgtttataagcagcatccaaaaagttaagtttcataaccaataccattcagggatctacttaaatccaatggtaatccttactttaaactaagggcaataataatttaatccatagagtaaatccccacaaaacctgtgtattcaaaactacaaacatggtttccatagccacgtatggttttagtcaaggacacatttccacaatgaacaagtccttacaaatatgttaataaaacactaccccaaaggcttaccctgccatcagctttttaaacaaggccattcctgctactgaaagcatttatttttagaagctggaatctgctctgggaaaacgggttctcctaaaact

SEQ ID NO: 4004 - DNA, 434 bp, Homo sapiens
ttttagtatgactcatttctttttcttcattcctgtcgcacatcttacctcctcctcactttgtgagtcaaacttaccttcaagcaacttaggcaatctctgtgtgtcctgagaaaatgacaatgacaatagcaggattgggaaaccagaaaggcagaacttgccccactgactttattaagttcagttcatgttcagtataacagtttagagcttacagatgttgcgtcgtgaccattgacatttaccaccaacctatgaggttggcaaaacaagtaacatcatcatcatttcccacttagagctaaaaaacctaagatttcagaagattcagtggcacatccagcagcccataccaaacaacaggcggacctgggtgagatgctggttcctgactccaaaccttaactccttccctggactgaagcctctat

SEQ ID NO: 4005 - DNA, 1003 bp, Homo sapiens
taagtaaacagacattggagaaaatatactgggagttgttaacagatgacggcaatattgatgaggctgttcaagtgttttacataaggtaataagaggtaccaccatcaccagaacccctacaaatttttacatttcatataaaaagagtaaaaatagttcattggcatgtaactagcatcattctctgtaatctatgagccataataagcctgaacaatttcagtctcttcagagcaaaacaaagtattttattccactagcagcatgtttctccaaaaacaaaaaacaaaccaatacaaccacaaatactacccacacacaaccctgaaacataagttgccatattccagtggtcctgaattttaacatgttttgctctacattaattcaagaaataaaatgagaaacagctttgaaaatgagattaactcctttgctgtaattatacttactctataattcaagactatttagctgaagtcagttaacgagtaaaaaccgcggatacagctcaaactgctcttaacttctttaaagtgtttactgttctattcaaaactcagacccaagctgcacaggtgtaacttgaggcactaacaatcttcctaccagacgtaatagttttatgtgttcttaaagctgggcgcatatacaaaatcactgtacatcacacataaacatcagaaacttttcttggccacaactagaccaaatagtttcctctattattaatgtatgttgaaatcacgcatgtgttaccagttcagcatttaaaagaactccatgttatgatttaaaaggatgctcaggttgagaaataccttgagtactggcaaagaaccgccaaaaggaaacagattgaatgggggtttactgtgaaccttaggagacccggtttcaacaaaaagcaccaaaacggtgactggattagttaagcaagttccccctacacactaatagggtttacccctggtttccaaaagttaaaggggtctcaagt

SEQ ID NO: 4006 - DNA, 441 bp, Homo sapiens
tgctcacatttcagggggcttaatgtcagggaacactgagtcaggacttcacgcggggcttctcagtacgactgcacctaagaatgcttttggctaacgtgctttagctgatcatcagcctctcttcgtttctgggcctgctagggtgaagcttttctttgagggctcagcaatgtgctatttctctaacactcgtatcagcatgttaaataaacagcatgtgcccaacgaggccaagaaagttaaaggcagtgggattatgtggcagagaaggctcagagaaataaaatatatcaacaatcatcatgtgtttgcttttattaagttcaccttcattaagaaaaatgaaagagattctatcacattgagctggataactgtgggcacctcttggtgggtgccgcaaggagtgccgcaaagtctgaggggctgcacgagacc

SEQ ID NO: 4007 - DNA, 346 bp, Homo sapiens
tgtcaggagccacagggctcaataaaacggaatcagtgtctcaatatacatgacctatgttcatagcaatgttcagccatttgggtttgaagaaaaccacattaaagccaagacccgtttggagcgaactgccttgttctttgctgtgtggaaggttctgtccctactgctgaactccagttcctccccaagcaccctggcctcagaaatcctggcttccccaagttagtgctgtctgacctgagccaggccactgcttggtgcctctacaggccactgtgcatgttgagaattgcccaaaaggattagtgaagctcctgaccctggcgaggcataatgaacactg

SEQ ID NO: 4008 - DNA, 961 bp, Homo sapiens
tttccctatctgctggttatcccagagagtttaagtcttctccagctcaatcctaatccaccccatttcccatggtctctactcctgggagaccagccctggtggcatctcttcctcctgtccctgggccagaatctgctggagtcaggtctgctgggtagaggcgagtccaggtactgactgtagtggtttgctactgaagtcttgcttgctgtcctgatctctttacctggtaggtcctgggactgccactttcctggggggctgcacgattgctgcgagtggcacccatgacaggaagatttagtcgctgggaaacaggaaccttgtgtccactttcccgcactctgtgtcctgcagtgcttggtcttggaagcccttttcgagttgacagagaatccggaggtagggcacctctgccaggtggcacactccggctggtgagtggcattcggctggcaggcctggggatggccgagggaatgggcagttgactggaagcatttagcagctgctccctgcggccggggcaggcgttgagagttgctggtagaaggctgtggggccaggacggatctgatgggggtgggtgggctggctgctgctctcccactgggcccggctctcccccggactgggggagtcgatcgggtaagaggagaagatgctgggcttcttggattgcagaacagattgcaagtgggtgaacctcttccatgttgagacggcctctttaccgatgtagcccggagagccctgatgaccccttccctatccattactcccggaattgacggctcaacagctgcctgggaggggatcccccgttcaagagttcccactgggccccggtcccggcacgctttctctcaccacaagttctcgccagatcgggtctctgcgaggcagcccccgtttccgtttaggactggtctagcaacgtggtcgggcacccccgagg

SEQ ID NO: 4009 - DNA, 326 bp, Homo sapiens
caccgcagacggcgcggatcgcagggagccggtccgccgccggaacggagcctgggtgtgcgtgtggagtccggactcgtgggagacgatcgcgatgaacacggtgctgtcgcgggcgaactcactgttcgccttctcgctgagcgtgatggcggcgctcaccttcggctgcttcatcaccaccgccttcaaagacaggagcgtcccggtgcggctgacgtctcgcggatcatgctaaaaaatgtagaagatttcactggacctagagaaagaagtgatctgggatttatcacatttgatataactgctgtctagagaatatattt

SEQ ID NO: 4010 - DNA, 5703 bp, Homo sapiens
gcacatccctgcactagtggccgcaaccgagacgccgcgctccagcagctgctgccgcccagcccggccccgccgccgccccccagccctgcagccccgcagccccggccgcgcccagcccggcgaggacagcaccaggaggcggcccccagcgcggccacaaagacccccggcggcgtctctccgcggaccggtcctacttgaagtccatcatgtccttcggcagagacatggagctggagcacttcgacgagcgggataaggcgcagagatacagccgagggtcgcgggtgaacggcctgccgagcccgacgcacagcgcccactgcagcttctaccgcacccgcacgctgcagacgctcagctccgagaagaaggccaagaaagttcgtttctatcgaaacggagatcgatacttcaaagggattgtgtatgccatctccccagaccggttccgatcttttgaggccctgctggctgatttgacccgaactctgtcggataacgtgaatttgccccagggagtgagaacaatctacaccattgatgggctcaagaagatttccagcctggaccaactggtggaaggagagagttatgtatgtggctccatagagcccttcaagaaactggagtacaccaagaatgtgaaccccaactggtcggtgaacgtcaagaccacctcggcttctcgggcagtgtcttcactggccactgccaaaggaagcccttcagaggtgcgagagaataaggatttcattcggcccaagctggtcaccatcatcagaagtggcgtgaagccacggaaagctgtcaggattctgctgaacaagaaaacggctcattcctttgagcaggtcctcaccgatatcaccgatgccatcaagctggactcgggagtggtgaaacgcctgtacacgttggatgggaaacaggtgatgtgccttcaggacttttttggtgatgatgacatttttattgcatgtggaccggagaagttccgttaccaggatgatttcttgctagatgaaagtgaatgtcgagtggtaaagtccacttcttacaccaaaatagcttcatcatcccgcaggagcaccaccaagagcccaggaccgtccaggcgtagcaagtcccctgcctccaccagctcagttaatggaacccctggtagtcagctctctactccgcgctcaggcaagtcgccaagcccatcacccaccagcccaggaagcctgcggaagcagaggagctctcagcatggcggctcctctacgtcacttgcgtccaccaaagtctgcagctcgatggatgagaacgatggccctggagaagaagtgtcggaggaaggcttccagattccagctacaataacagaacgatataaagtcggaagaacaataggagatggaaattttgctgttgtcaaggaatgtgtagaaagatcgactgctagagagtacgctctgaaaattatcaagaaaagcaaatgtcgaggcaaagagcacatgatccagaatgaagtgtctattttaagaagagtgaagcatcccaatatcgttcttctgattgaggagatggatgtgccaactgaactgtatcttgtcatggaattagtaaaggggggagacctttttgatgccattacttccactaacaaatacaccgagagagacgccagtgggatgctgtacaacctagccagcgccatcaaatacctgcatagcctgaacatcgtccaccgtgatatcaagccagagaacctgctggtgtatgagcaccaagatggcagcaaatcactgaagctgggtgactttggactggccaccattgtagacggccccctgtacacagtctgtggcaccccaacatacgtggctccagaaatcattgcagagactggatacggcctcaaggtggacatctgggcagcaggtgtaatcacttatatcctgctgtgtggtttccctccattccgtggaagtggtgatgaccaggaggtgctttttgatcagattttgatggggcaggtggactttccttctccatactgggataatgtttccgattctgcaaaggagctcattaccatgatgctgttggtcgatgtagatcagcgattttctgctgttcaagtacttgagcatccctgggttaatgatgatggcctcccagaaaatgaacatcagctgtcagtagctggaaagataaagaagcatttcaacacaggccccaagccgaatagcacagcagctggagtttctgtcatagcactggaccacgggtttaccatcaagagatcagggtctttggactactaccagcaaccaggaatgtattggataagaccaccgctcttgataaggagaggcaggttttccgacgaagacgcaaccaggatgtgaggagccggtacaaggcgcagccagctcctcccgaactcaactcggaatcggaagactactccccaagctcctccgagactgttcgctcccctaactcgcccttttaataagacccttttactcaaagtcctagcttaaccctttgagactctgagatttttttcccccaaatttgtgtaaaacagtttcatctgatctatctagcgctcaatgcttgaatggcagaactgaaagtgttttcaggtatctttgtagcggtttccctttactgaataagatgacacgtggtgattgtgaagatggtaatttgctgctaatagagtcctcaaagggttaaggccaatttgcaatttttttttaaacttagaagcaatgaatgttttcatcagtcaagctaggatctgcagtatgtaatatagcacttgttaaccctctgagtgcatagaattttattgagaattcttgtttgggaatttttcaggcctttggatgtatacacacatgtttcttgattttactgcagatcaaggggtgttgttagatgctgaaatgtccagaaaagaaggacatttagaatgatatcttgtttgtccttttctgtgggtttagaacgtggcaggtttataacttagacacacgcacggttctttcttcttcacaatcctattcagaaacagattttttttttcattagagatatgactgtcagttgcagtgagttctgcatcccaagtggagggaattgggtttgtggcaaagagcttgacccaggaaatagatggtgccccccaaattgtctccacatgaagatgtactgatgacgccccagaaatgctgcttccatatcagctgctgctagcgccagcgcagactctcagggagtcaccacagcttgtcttgtgcttggtgagtgagggtctctctactcagtgtcagacatctacaggaaagaaacaactggtggaaaagagcaataaattgcccggtgctctgcagggctggaatttcaaacagaaagagggaataagatcctgtgatttttctcacctgcttttccacgcactgtggtcatcactgtgcaatctacatctagtatgaaatccacacataggagagctggggcacaaggggactggaggcagttgctttgcaagatggctgaggagaaagcacactgggaacacaatccagaatgttctaacaataagttttcagtgaataaaccactggcaagacatttccatgtgcacctttaggttacctatatagtctcctaggaagatcaggatgaaagacctagatgatacccctgaggataaaacctccatcccctaaaatgattttttttaaataccactgtctttagctgtccaggaggtcagagtgttttttctgtctttgggccaagtcctgtctgagacctgtattttcactcttgttaccaaatctatctccctagtgcagtgtctccaggcctgagtttcttctggaacagattccattttagaatggggattcacaggttctgtgcatcaccacagtgctcagagaggattctcctggggtgtcttagaggcaggtgcccaactcaaatgtattcccaaggtttgctgggctctgggatccacgagacaaccagagagggatatctcatgaaatttgcatctggtggctgaacagtacctatgttctctgttttgaatatactttaatacctgagagtcttaaaatttgtgaacaacgtttctatagtcctttattttcaaatgcacattgatcttcacttgctgcatttttactcttcaaccctgaaactatggtctacattaatatggatttttaaatcacatgtcattacttttgcaacaccatcaccaaaattttttgctcttttacatttaggttcatctctgtggtctgtgttgtcctgacatgtaaaaagcatatcgtttattgaggtttttttcccccccttttagagcatccggaagtgataacacgcaaaatcacaaagtagcataaatcagtaaattagttgagttgtttttgggggggaggtgggggtagggggcacagaacaccagaaagagtgttggtgtgtaggtagattccatattaatgaggaacactgaactagttggaaattactgctttctctagaaatataaagcaaagcactattccaaggctatggagtagctctacagcctggcctcaactctaaaagtgtgaagaatgcaatgggcagagacctacctgcagtggactgtcattttcctttctttctctgaattactgctttttctgtgggcattaactatattgctacagcatctagtgtactgagcctgcggtgcatggctcaggccttttcccatcgacgtctagggggactctggaccgtgtgaagctagggggtgtttctcagcacactgcagaagggcagctcagaagaatgcagggcccattcagcatggggatcccagcacatcactgtagaatttgagtgatctatgctgaataaacagtggaatgtgaccagtcaagtagaaatcttgagtaatcagatggaatgcaatctttctaacattaagctaccaagatcctgaatgtcagagatgtactcagagggttaacagacaagcacaaggcatgctgactacattggtgtatccagattgctttgcttttagccagtgctttctaatttttttctcgacattcttgggatagttcaagtttgaaataattaagtggtggtgttctttaaggaatttctataaccaaattgatcttatttttgatttcacttatcatagaacaaatatgtatcattatggcagtgtatctatgtaattatcaatttaatcatcaccaccggtgtttccatattttttcccaagtatttaatatagctctcttatggtggtggcctggtgatggggaccgtctttcttttactgacacatgaccaatcatatggtattttcaagggaattttaagattcatcttttcagtttgatagtagactagttaaggaagaactctttcattacttgcatcgtgtaaatcatctctgtagacatgtgttcatattaatgaacacattttttctcaacattgtagcagaaatcattttattcgtcatgatcaatgaatatgtgatttgctccagatcgttagaaggaaaagtaagatttcagtcatcaaaaatgtttttaccgtagccctcatctaacttacacgtggtgcatattaaaataagcagagaaaaaaaaatgtgaataaactactgaaaac

SEQ ID NO: 4011 - protein, 729 aa, Homo sapiens
MSFGRDMELEHFDERDKAQRYSRGSRVNGLPSPTHSAHCSFYRTRTLQTLSSEKKAKKVRFYRNGDRYFKGIVYAISPDRFRSFEALLADLTRTLSDNVNLPQGVRTIYTIDGLKKISSLDQLVEGESYVCGSIEPFKKLEYTKNVNPNWSVNVKTTSASRAVSSLATAKGSPSEVRENKDFIRPKLVTIIRSGVKPRKAVRILLNKKTAHSFEQVLTDITDAIKLDSGVVKRLYTLDGKQVMCLQDFFGDDDIFIACGPEKFRYQDDFLLDESECRVVKSTSYTKIASSSRRSTTKSPGPSRRSKSPASTSSVNGTPGSQLSTPRSGKSPSPSPTSPGSLRKQRSSQHGGSSTSLASTKVCSSMDENDGPGEEVSEEGFQIPATITERYKVGRTIGDGNFAVVKECVERSTAREYALKIIKKSKCRGKEHMIQNEVSILRRVKHPNIVLLIEEMDVPTELYLVMELVKGGDLFDAITSTNKYTERDASGMLYNLASAIKYLHSLNIVHRDIKPENLLVYEHQDGSKSLKLGDFGLATIVDGPLYTVCGTPTYVAPEIIAETGYGLKVDIWAAGVITYILLCGFPPFRGSGDDQEVLFDQILMGQVDFPSPYWDNVSDSAKELITMMLLVDVDQRFSAVQVLEHPWVNDDGLPENEHQLSVAGKIKKHFNTGPKPNSTAAGVSVIALDHGFTIKRSGSLDYYQQPGMYWIRPPLLIRRGRFSDEDATRM

SEQ ID NO: 4012 - DNA, 4905 bp, Homo sapiens
gaggctacaagatcatagttcatttaaagcccccatccctgcaagtggtgctttctaccaatatgaatcttttcaacctggaccgttttcgctttgagaaaaggaataagattgaggaagcgcccgaagcaacccctcaaccttcccagcctggcccttcttcaccaatttctcttagtgctgaagaggagaatgctgaaggggaagttagcagggcaaacactcctgattcagatataactgaaaaaacagaagattctagtgttccagaaactccagataatgaaagaaaagcaagtatatcatatttcaaaaatcaaagaggaatacagtatattgatttgtcttctgatagtgaagatgtcgtttccccaaattgctccaatacagttcaagagaaaacattcaacaaagatacagtgattatagtttctgagccatctgaagatgaagagtcccaaggccttcctaccatggcacgtagaaatgatgatatttcagaactggaagacctttcggaattggaagaccttaaagatgctaaacttcagactttgaaggaactttttccacaaagaagtgacaatgatttacttaagttgattgaatcaacaagcactatggatggagcaattgctgctgccttgctgatgtttggtgatgcaggtggtgggcccaggaaaagaaaattatcttcttcttcagagccatatgaggaagatgaatttaatgatgatcaatctataaaaaagacaagactggatcatggagaggaatcaaatgagtctgcagaatctagcagtaattgggaaaagcaggaaagtattgtactgaaattgcaaaaggaatttcccaattttgataaacaggaacttagagaagtactcaaggaacatgaatggatgtacacagaagctttagaatctctaaaagtgtttgcagaagaccaagatatgcaatatgtatcacaaagtgaggttccaaatggaaaagaagtttcttcaagaagtcaaaattaccctaaaaatgcaactaaaacaaaactaaaacagaaattttcaatgaaagcacaaaatggctttaacaagaaacgtaaaaaaaatgtttttaatccaaagagagttgttgaagactctgaatatgattcaggttctgatgtcggtagttcactagatgaggactatagtagtggtgaagaagtgatggaggatggctataaaggtaaaattcttcacttccttcaagatgcttcaattggtgaacttactttgattcctcagtgttctcagaaaaaggctcagaagataacagaactccggccctttaatagttgggaggctctgttcacaaagatgtccaaaactaatggcttatcagaagatttgatatggcactgtaaaacactgatccaagaaagagatgtagttataaggcttatgaacaaatgtgaagacatttcaaataaattgaccaaacaagttaccatgcttactggaaatggaggtggatggaacatagaacaaccttccattctaaaccaaagtttgtcactcaagccctatcagaaggttggtttgaattggctggcattggtacataaacatggacttaatggcattttggcagatgaaatgggcctaggaaaaactattcaagccattgcatttctggcatacctctatcaggagggtaataatggtcctcatttgatcgttgttccagcttcaactatagataactggttaagggaagttaatttatggtgccctactttgaaggtcctctgttactatggttctcaagaagaacgtaaacaaattagatttaacattcatagtagatatgaagattacaatgtaattgtgaccacatataactgtgcgatcagcagttctgatgaccgtagtctgtttcgacggctgaaacttaattacgcaatttttgatgagggccatatgctgaagaatatgggctccattcgctaccagcaccttatgacaattaatgcaaataaccgtttgctgctcacaggcacacctgtacagaacaatctgttagaactcatgtcgctgttgaattttgttatgccacacatgtttagtagtagcaccagtgaaatacgaagaatgttttcctctaagacaaaatcagcagatgagcaaagcatatatgaaaaggagagaatagcacatgcaaaacaaattataaagccatttattctcagaagagtaaaagaagaggttctcaagcagttaccccccaagaaagatcgaattgagttgtgtgcaatgtcggagaagcaggagcaactctatttgggtcttttcaacagattgaaaaaatctatcaataacttggtcacagaaaaaaacacagaaatgtgcaatgtcatgatgcagttgaggaaaatggccaatcatcctttattacatcgccaatattacacagctgaaaaactcaaggaaatgtctcagcttatgctaaaggaacctacacattgtgaggctaaccctgacctgatctttgaagatatggaagttatgacagacttcgaactacatgtactttgtaaacagtaccgacacattaataactttcagttagacatggacttgattttagattctggaaaatttcgagttttaggatgcatcttgtctgaattgaaacagaagggtgatagagttgtgttatttagccaatttaccatgatgctggatatcttagaggttctattaaaacatcatcagcataggtacctcagattagatggaaagactcagatttctgaaaggattcatctaattgatgagtttaataccgatatggatatctttgtgtttctgctatcaacaaaagctggtggattaggaataaatctgacttcagcaaatgttgttatacttcacgatattgactgtaatccttataatgacaaacaagcagaagatagatgccatagagtaggccagactaaagaagtactagttataaaactaataagccaagggacgattgaagaatccatgctaaaaattaaccaacagaaattgaaactagaacaggatatgactacagtagatgaaggtgatgaagggagtatgccagcagatatagccacattactaaaaacatcaatgggcctgtgaaataagaactgtgaactctcaattgatgaggaaatatcaacttggtgcactcaaggacatttacattatgatgaccatggggtttatgaacatttataactttttataatttccatattacatttctcatagtatggacaactttttgccactaactgaattctccaaatactcacacgtgaaatttcaaaaaagaagccacaaatatgtagttctgaagatgttgaataatcattttacaaagcagttttctgaatggggattagttggtgattgtttgtaacaaatatgctaatgctttagaaatgtcagtatttttgtaattatttctacctccaaatatatatatattgtctttcactggataatgtgtgtagatttttacatgtgccttatttgacaatgcttatgtcttgtttttgcttgtctcatttgaagttcttttttattatgttaaagaatgcagctgtatagattatatagctttcattttattgctatttgaagcagatgttcaccaatgtcagcaagaactcaacctgaatttaaaggtggcattccatatactaacatcccccaggtcctctcaagtacttctgctgaaacaaatttatttggctaggcactaagttgttttccagtgaatagtaactaaagaagcccctaccttgctccatggattaattccttctgttcattttccaactgcactaattgtgcatattactctgcctaatcttgtgcatgttttcattgatttccctctcccggcttttgcttctcttgaaactgttgcccagtcacttctgctccaattctcttcctctctaaatagtagtttattactgccacatctccatgcatcagcaaaatgttggtgacatttttctagcctggcagaacagattacttaaagctatttcatttcaaagcagactgaatgtgacttcatctaaaggcagcattaggtactgcatggaaataggtcattaacttgaaactcttatcaaaatatattttaccagtttccagaatttccagtacaggaccgcctgaagagagagccattgttcaattccaattcagtgtgagtgacaaagtgaaatttagaagtgaagttgtctatttgatatttaactctttattaaatctttctttaaatttctgcctgtcagtctatattgctgtttttattatacatcagtttctttgtataacttgtgagttccatgtgttttgtttttattatgtaaatatcattataaataaacttatttataaatcaaagatttgttaatttttggaaatcatgcttttcaaagcatcctaacttgctaagatgctaggtagtacgaccctctggatttggaaggcaaataaaactcttacagtgattatttagatattaaagactgagaactcacggcttaaccccagtcttgatggtatattgaacagactgaatatattttaccattacagggctaaaaggagtcttcatgtgttaatactacctccttgtacatcactatacccaaatcagttattcaaattgttaggaattttaccttttaaaatctcataatggatatctcatgttttctgtattaatgtattttcaatgataggctgtttctttttttgttgttattgttgttgttgttatatccatacttttatctctaatgaaatgtagttgggttcttcctgtaatgcgctattatgtcttgggcttaataaaaatatttgtgatcat

SEQ ID NO: 4013 - protein, 1048 aa, Homo sapiens
GYKIIVHLKPPSLQVVLSTNMNLFNLDRFRFEKRNKIEEAPEATPQPSQPGPSSPISLSAEEENAEGEVSRANTPDSDITEKTEDSSVPETPDNERKASISYFKNQRGIQYIDLSSDSEDVVSPNCSNTVQEKTFNKDTVIIVSEPSEDEESQGLPTMARRNDDISELEDLSELEDLKDAKLQTLKELFPQRSDNDLLKLIESTSTMDGAIAAALLMFGDAGGGPRKRKLSSSSEPYEEDEFNDDQSIKKTRLDHGEESNESAESSSNWEKQESIVLKLQKEFPNFDKQELREVLKEHEWMYTEALESLKVFAEDQDMQYVSQSEVPNGKEVSSRSQNYPKNATKTKLKQKFSMKAQNGFNKKRKKNVFNPKRVVEDSEYDSGSDVGSSLDEDYSSGEEVMEDGYKGKILHFLQDASIGELTLIPQCSQKKAQKITELRPFNSWEALFTKMSKTNGLSEDLIWHCKTLIQERDVVIRLMNKCEDISNKLTKQVTMLTGNGGGWNIEQPSILNQSLSLKPYQKVGLNWLALVHKHGLNGILADEMGLGKTIQAIAFLAYLYQEGNNGPHLIVVPASTIDNWLREVNLWCPTLKVLCYYGSQEERKQIRFNIHSRYEDYNVIVTTYNCAISSSDDRSLFRRLKLNYAIFDEGHMLKNMGSIRYQHLMTINANNRLLLTGTPVQNNLLELMSLLNFVMPHMFSSSTSEIRRMFSSKTKSADEQSIYEKERIAHAKQIIKPFILRRVKEEVLKQLPPKKDRIELCAMSEKQEQLYLGLFNRLKKSINNLVTEKNTEMCNVMMQLRKMANHPLLHRQYYTAEKLKEMSQLMLKEPTHCEANPDLIFEDMEVMTDFELHVLCKQYRHINNFQLDMDLILDSGKFRVLGCILSELKQKGDRVVLFSQFTMMLDILEVLLKHHQHRYLRLDGKTQISERIHLIDEFNTDMDIFVFLLSTKAGGLGINLTSANVVILHDIDCNPYNDKQAEDRCHRVGQTKEVLVIKLISQGTIEESMLKINQQKLKLEQDMTTVDEGDEGSMPADIATLLKTSMGL

SEQ ID NO: 4014 - DNA, 696 bp, Homo sapiens
  misc_feature (696)..(696): n is a, c, g, or t
tctgcggaggggctcggctgcaccggggggatcgcgcctggcagaccccagaccgagcagaggcgacccagcgcgctcgggagaggctgcaccgccgcgcccccgcctagcccttccggatcctgcgcgcagaaaagtttcatttgctgtatgccatcctcgagagctgtctaggttaacgttcgcactctgtgtatataacctcgacagtcttggcacctaacgtgctgtgcgtagctgctcctttggttgaatccccaggcccttgttggggcacaaggtggcaggatgtctcagtggtacgaacttcagcagcttgactcaaaattcctggagcaggttcaccagctttatgatgacagttttcccatggaaatcagacagtacctggcacagtggttagaaaagcaagactgggagcacgctgccaatgatgtttcatttgccaccatccgttttcatgacctcctgtcacagctggatgatcaatatagtcgcttttctttggagaataacttcttgctacagcataacataaggaaaagcaagcgtaatcttcaggataattttcaggaagacccaatccagatgtctatgatcatttacagctgtctgaaggaagaacggaaaattctggaaaacgcccagagatttaatcacggctcagtcggggatattccgagcccgtgtgttgcn

SEQ ID NO: 4015 - DNA, 4933 bp, Homo sapiens
cagaaatgcaacaagtagtacccggggtctgcagagcgccccgcgccgcctgacttggccgggcgaagcccgcctgcagagacccgggccggcctccggacaaaggacggaggaggggctggacggcgctgcgaagtccgaaagaggccatttagcgactctggccaggctaaggggaatgcagaggagacacagagccggcgggccaagaggacgatccggccgctgcacgcagggcgggaggcgatggaggctgcccgcgccttgcgcctcctgctcgtggtgtgcggctgcctcgcgctcccgccgctggccgagcccgtgtgcccggagcgctgcgactgccagcatccccagcatctcctgtgcaccaacagggggctccgcgtagtgcccaagaccagctcgctgccgagcccccacgacgtgctcacctacagcctcggcggcaacttcataaccaacatcacggccttcgacttccaccgtctggggcagctcagacggctggacctgcagtacaaccagatccgctctctgcaccccaagaccttcgagaagctctcgcggctggaagagctgtacctggggaacaacctcttgcaggcgctcgccccgggcacgctggccccgctgcgcaagctgcgcatcctctacgccaacgggaacgagatcagccgcctaagccgcggctccttcgagggcctggagagtctagtcaagctgcggctggacgggaacgccctgggggcgctgccggacgcggtcttcgctcccttgggcaacctgctctacctacatctggagtccaaccggatccgctttctgggcaagaacgccttcgcccagctaggcaagctgcgcttcctcaacctctctgccaacgagctacagccctccctgcgccacgcggccaccttcgcaccgctgcgctccctctcctccctcatcctctcggccaacagcctgcagcacctcgggccgcgcatcttccagcacctgccacgtctcggcctgctctcgctcaggggcaaccagctcacgcacctcgcgcctgaggccttttggggcttggaggccctgcgcgagctgcgcctggagggtaatcggctgagccagctgccaactgcgctgctggagcctctgcacagcctggaggcgctggacctgagcggcaatgagctgtccgccctgcacccggccaccttcggccacctgggccggctgcgcgagctcagcctgcgcaacaacgcgctcagcgccctatccggggacatcttcgccgccagcccagccctttatcggctggatctagacggcaacggctggacctgcgactgccggctgcgaggcctgaagcgctggatgggcgactggcactcgcagggccggctcctcactgtcttcgtgcagtgtcgccaccccccggccctgcgaggcaaatacctggattacctggatgaccagcagctgcaaaatggatcctgcgcggatccctcgccctcagcttccctgaccgctgaccgcaggcggcagcccctacccacggccgcaggggaggagatgacgccacctgcaggtctcgcggaggagctgccgccgcagccgcagctccagcagcaggggcgatttctagctggggtggcctgggatggggccgccagggagctggtaggcaaccgcagcgctctaaggctgagtcggcggggcccgggcctccagcagcccagcccctccgtcgctgccgccgcgggcccggctccacagtccctagacctgcacaagaagccccagcggggccgtccgactcgggcagatcccgccctcgcggagcccaccccaacggcctctcctggctctgcgccatcgcccgccggcgacccctggcagcgcgcgacgaagcatcgtctgggcacggagcaccaggagcgtgccgcccagtccgacggtggggccgggctgccgccgctggtgtccgacccatgcgacttcaacaagttcattctgtgcaacctgacggtggaggcggtgggcgcagacagcgcctcggtgcgctgggccgtgcgcgagcaccgcagtccccggccgctgggcggcgcgcgcttccgcctgctctttgaccgctttggccagcagcccaagttccaccgcttcgtctacctgcctgagagcagcgactcggccacgctgcgcgagctgcgcggggacaccccctacctggtgtgcgtggagggcgtgcttgggggccgtgtctgccctgtggctccccgggaccactgcgcggggctggtcaccctaccggaggccgggagccggggcggcgtcgactaccagctgctgaccttggccctgctgacggtcaacgcgctgctggtgctcctggccttggcggcctgggcgtctcgctggctgcgtaggaaactgcgggctaggcggaagggcggggccccggtccacgttcggcacatgtactccacccgacggcccctgcgctccatgggcaccggcgtgtccgccgacttctcgggattccagtcgcaccggccacgcaccaccgtgtgcgcgctcagtgaggcggacctcatcgaattcccctgcgaccgcttcatggacagtgcgggcggcggcgcgggcggcagcctgagacgggaggaccgtctcctgcagcgatttgccgactaggtccagggcatatagagaccatctcattggccctaaggagccgcctctccgtgaggcccaccagcccacctcaggggaagtgccgttttgtgcacttgccagagaggccggtggggacagagggccaattcgggcaccatcccccaattcccaatactcgagaagtaaatggatggtacttggtggtcagagccagagtaggggacaaatggatggtgggatgctgaggtcggaggcttcgcttggaggctttgacacagctatgcgaatggcttttgtagcactgcaatgcagaagccaggctttgggggtagaaagggggtgcttgtgcccccaacatggccagaaatatttgggtgcatgctttttgtttgctcagtgtcaaacagagaagttttgtttctatttaaggaaggaacttattaccattacaaaggaggcttggccagggactccactggtttggtgatctctgccaagaagggggatgtaaacaggtggtaaagtttaacatacccgccaaggaactcgtttatgttggctgatagagcattcaggataccttaaagtttaataagagacgcatttttttttttcaaaaatgtgaaaagctctgacatttaacgaactgaccaatagactcaaggactgttttagttggactgggccattttattatgttccttttaatattaacagtacaagagcgcttgctgacttcgaggataactaagattacatactttctcaggagaaggctgcatgcaagacttctctgtcagggttgctcctgtggcttttttaattttatttttttaaacctatatatggaaaaggaaatttcaatgccagatttgataaaagaatgtgatgtatatgtagctgatgacccactggggaacaccagtgttccagttcacttaccacatctgtgacagtgtgtttagattggaataaatgtgatgcattacttcttatgtttttatcagtgacatggttgactgtgccctaattctcttgagttgcagttaagcaatgaaggttatttcctaatagggaagcaaaaggtgattgtcaattgatagtttaatgtttgaccacattagtgtctttatatgaaatagtagaggggaagaaattatagaaaacaaatgtgaaaaaaatacaccagtgggtatctgttctactaaaaccagaagattgttatgagtacttaaacctcactgtgaaataatgatatattttgcaattaatccctccccaactgagtgtcttactgtgttattaaatcttatcttttagttaatagttgcagtatttcttttaaatgtttttgttttaaacttaggggtaggatcctttatttgttcagttgtttccaactatttgggatactttcattccctgctatttatgaagtacatgtttatcactaagtgtagtggtttggtttacattaataattttatgtgtggtctaaaaatgcagtcactaagagaatgtacactgtggttatggtcacagtggttatggatttattggcagtggagtaccatggaggtcactgcaatggtgctaaggctgacagtggaatcttctgtttagggccttaagcccctgagggtcctggtgactcagggaatccatcacagccccgggtctttcaccccagttcactccttttatgtttggcctagattgacccatgcctgccctcttctcaacagctgagtagggaaccagccatctgaatgagctgatcgttgtttatgttcaaatgagtaaatgtccagaccacttaaaactacagctgcttttctggcagtctcgtctgcggggccaaaacttaataaaccacaggaaatagactgtcattcttagtttgctgccagggcttattttagattgagagcatactggtacatgagagcagtagtgttgtttgctcttattttcaaccagggagctatctggcaccttttgtgctcctggcttttttcaatcatagcactattgcatctcctagctatttcttttgcccagcagggtaatattgagtcccattgcaagtatggacaaggcctctggttctcctcaccacccaccttttcagccatagaacatcactgaaaatgcctaatgcctggatctgtgttctactttagtttcactgggaagtctttcagtgggagatgaataaatgttatacattgttatgtccagttatgtcaataaacccactaatagagat

SEQ ID NO: 4016 - protein, 811 aa, Homo sapiens
MEAARALRLLLVVCGCLALPPLAEPVCPERCDCQHPQHLLCTNRGLRVVPKTSSLPSPHDVLTYSLGGNFITNITAFDFHRLGQLRRLDLQYNQIRSLHPKTFEKLSRLEELYLGNNLLQALAPGTLAPLRKLRILYANGNEISRLSRGSFEGLESLVKLRLDGNALGALPDAVFAPLGNLLYLHLESNRIRFLGKNAFAQLGKLRFLNLSANELQPSLRHAATFAPLRSLSSLILSANSLQHLGPRIFQHLPRLGLLSLRGNQLTHLAPEAFWGLEALRELRLEGNRLSQLPTALLEPLHSLEALDLSGNELSALHPATFGHLGRLRELSLRNNALSALSGDIFAASPALYRLDLDGNGWTCDCRLRGLKRWMGDWHSQGRLLTVFVQCRHPPALRGKYLDYLDDQQLQNGSCADPSPSASLTADRRRQPLPTAAGEEMTPPAGLAEELPPQPQLQQQGRFLAGVAWDGAARELVGNRSALRLSRRGPGLQQPSPSVAAAAGPAPQSLDLHKKPQRGRPTRADPALAEPTPTASPGSAPSPAGDPWQRATKHRLGTEHQERAAQSDGGAGLPPLVSDPCDFNKFILCNLTVEAVGADSASVRWAVREHRSPRPLGGARFRLLFDRFGQQPKFHRFVYLPESSDSATLRELRGDTPYLVCVEGVLGGRVCPVAPRDHCAGLVTLPEAGSRGGVDYQLLTLALLTVNALLVLLALAAWASRWLRRKLRARRKGGAPVHVRHMYSTRRPLRSMGTGVSADFSGFQSHRPRTTVCALSEADLIEFPCDRFMDSAGGGAGGSLRREDRLLQRFAD

SEQ ID NO: 4017 - DNA, 3233 bp, Homo sapiens
gacggcggtggcggcgtcggaggcgcctccgggggacggtggcggctcccggcggtgaggccgcgcctgtccggggatcgtcgagggacggcgggagcttgggccagcggcggcggcggcctgggacgcaggcggagccccgcgcaggcccaaggtcccggaggctatggcagcggctaccatcgtgcacgacacgtctgaggccgtggagctctgccctgcttacggcttgtacctgaagcccatcaccaagatgaccatcagcgtggcactcccgcagctgaagcagccggggaagtccatctccaactgggaggtgatggagaggctgaagggcatggtgcagaaccaccagttctccacgctgcgtatttccaagagcaccatggacttcatccgcttcgagggggaggtggagaacaagagcctggtcaagtcttttctggcctgcctggacggcaagaccatcaagctcagcggcttctccgacatcctgaaggtgcgcgcggccgagttcaagatcgacttccccacccgccacgactgggactccttcttccgcgacgccaaggacatgaacgagaccctgccgggggagcggccggacaccatccacctggaggggctgccctgcaagtggttcgccctgaaggagtcgggctccgagaagcccagcgaggacgtcctggtcaaggtgtttgagaagttcggggagatccggaatgtggacatccccatgctggacccctaccgggaggagatgacgggccgcaacttccacaccttcagtttcggggggcacttgaacttcgaggcctatgtgcagtaccgtgagtacatgggcttcatccaggccatgagcgccctgcgcgggatgaaactcatgtacaagggcgaggacggcaaggccgtggcctgcaacatcaaggtttcttttgattcgaccaaacacctgagtgatgcctcaattaagaagcggcagctggagaggcagaagcttcaggaactggagcagcaaagagaagaacaaaagcgcagagagaaggaagcggaggagaggcagcgagcggaggaaaggaaacaaaaggagctggaagagctggagcgagagaggaaaagagaagagaagcttcgcaagagggagcagaagcagagggaccgtgagctgcgccggaatcagaagaagctggagaagctgcaggcggaggagcagaagcagctgcaggagaagatcaagctggaggagcgcaagctgctgctggcccagaggaacctgcagtccatccggctcatcgccgagctgctcagcagagccaagttgtgataagtccccgggaaggagcatgacaagaggctgagacatgtggcagcccagtccttacctcatggctgtgaagctacgggaacaggagcagaaggaggagaagctgaggctccagcagcaggaggagcggcggcggctgcaggaggccgagctgcggcgcgtggaggaggagaaggagcgcgcgctgggcctgcagcggaaagagcgggagctgcgcgagcggctgctgagcatcctgctgagcaagaagccggacgacagccacacacacgacgagctgggcgtggcacacgccgacctgctgcagcccgtcctggacatcctgcagaccgtgtcgtccggctgtgtgagcgccaccacgctgcaccccctcgggggccagcccccggccggtgcccccaaggagagcgcggcccacccagaggccgacggcgctcccaaaagcgtgaacgggagcgtggccgaggaggccccatgcaaggaggttcagagctcctgtcgtgtggtccccgaggatggctctccagagaagaggtgcccgggcggcgtcctctcctgcattcctgacaacaaccaacagcccaagggcatccctgcctgcgagcagaatgtctccagaaaggacacccggtcagaacaggacaagtgcaaccgggagcccagcaagggccggggccgggccaccggagacgggcttgctgaccggcacaagcgggagaggagccgggccaggcgggccagcagcagggaggacgggaggccacgcaaggagcggcggccccacaagaagcacgcctacaaggatgacagcccccgccggcgcagcacgagcccggaccacacccggtcccggaggtcccacagcaaagacaggcaccggagggagcggagccgggagcggaggggcagcgccagcaggaagcacagccgccaccgccgccgaagcgagcggtcgcgctcccggtccccgagcaggcaccgcagtacctggaacaggtaatgacgggcacggcctccccacggcctgtccgggaaagaccaggacctgctcgagcctcctggccgctccttggccgctctccgtccacccctgcaaagccaagacccttctgcagccacgaacgtccacggagcctgccggcaggaaggaagacaccatgctttagagatccatctttctccactcaccgcagcgtacttggcacttcagtttcaaacacgtagtcctttaaaacttgatccgatagctttaatgcggccggtcctctctcagtcaggaaaattgcacagaccgacagtcgtgaggatggcagagctgctgcattcccccacacggggatttctgtgtctgcttggcgacctccctgcgtgcacggcctaggaggtgcacgggccaccatagtcacactggcactgaaaagaaagcgttgccctggtgattctttcccccccgtttgtaatgttaactgatcaggaagtgcagtttgggtgggatgccgaatcgtcgtgctgacattgagtcacggatgaggaaggtacaagtcctttaagatcaaaactcaaacgggccgttctttctaaggtgtcggtatgtggggagtggtacaaaatggtctgatgctccttcaaaaacattcactttttacaacgtcaaggaattaagcataaaaaagattggttaaaagctttggtttctagtaaaggttagtgtgtgtggtttttttaagaagctgttttgctaaattatttttacttggaatgtttcaaacagatttcaggctgcaaacttgttttataatcgtttgcttctccaagtgaagctcagaaatacctaaaaatagctgtaacgttcgcgttaggaaagatggtgtttattccagtttgcatttttatggtgaaataaaatccg

SEQ ID NO: 4018 - protein, 695 aa, Homo sapiens [sequence omitted]

SEQ ID NO: 4019 - DNA, 2977 bp, Homo sapiens
tagcaagtttggcggctccaagccaggcgcgcctcaggatccaggctcatttgcttccacctagcttcggtgccccctgctaggcggggaccctcgagagcgatgccgatggatttgattttagttgtgtggttctgtgtgtgcactgccaggacagtggtgggctttgggatggaccctgaccttcagatggatatcgtcaccgagcttgaccttgtgaacaccacccttggagttgctcaggtgtctggaatgcacaatgccagcaaagcatttttatttcaagacatagaaagagagatccatgcagctcctcatgtgagtgagaaattaattcagctgttccagaacaagagtgaattcaccattttggccactgtacagcagaagccatccacttcaggagtgatactgtccattcgagaactggagcacagctattttgaactggagagcagtggcctgagggatgagattcggtatcactacatacacaatgggaagccaaggacagaggcacttccttaccgcatggcagatggacaatggcacaaggttgcactgtcagttagcgcctctcatctcctgctccatgtcgactgtaacaggatttatgagcgtgtgatagaccctccagataccaaccttcccccaggaatcaatttatggcttggccagcgcaaccaaaagcatggcttattcaaagggatcatccaagatgggaagatcatctttatgccgaatggatatataacacagtgtccaaatctaaatcacacttgcccaacctgcagtgatttcttaagcctggtgcaaggaataatggatttacaagagcttttggccaagatgactgcaaaactaaattatgcagagacaagacttagtcaattggaaaactgtcattgtgagaagacttgtcaagtgagtggactgctctatcgagatcaagactcttgggtagatggtgaccattgcaggaactgcacttgcaaaagtggtgccgtggaatgccgaaggatgtcctgtccccctctcaattgctccccagactccctcccagtacacattgctggccagtgctgtaaggtctgccgaccaaaatgtatctatggaggaaaagttcttgcagaaggccagcggattttaaccaagagctgtcgggaatgccgaggtggagttttagtaaaaattacagaaatgtgtcctcctttgaactgctcagaaaaggatcacattcttcctgagaatcagtgctgccgtgtctgtagaggtcataacttttgtgcagaaggacctaaatgtggtgaaaactcagagtgcaaaaactggaatacaaaagctacttgtgagtgcaagagtggttacatctctgtccagggagactctgcctactgtgaagatattgatgagtgtgcagctaagatgcattactgtcatgccaatactgtgtgtgtcaaccttcctgggttatatcgctgtgactgtgtcccaggatacattcgtgtggatgacttctcttgtacagaacacgatgaatgtggcagcggccagcacaactgtgatgagaatgccatctgcaccaacactgtccagggacacagctgcacctgcaaaccgggctacgtggggaacgggaccatctgcagagctttctgtgaagagggctgcagatacggtggaacgtgtgtggctcccaacaaatgtgtctgtccatctggattcacaggaagccactgcgagaaagatattgatgaatgttcagagggaatcattgagtgccacaaccattcccgctgcgttaacctgccagggtggtaccactgtgagtgcagaagcggtttccatgacgatgggacctattcactgtccggggagtcctgtattgacattgatgaatgtgccttaagaactcacacctgttggaacgattctgcctgcatcaacctggcagggggttttgactgtctctgcccctctgggccctcctgctctggtgactgtcctcatgaaggggggctgaagcacaatggccaggtgtggaccttgaaagaagacaggtgttctgtctgctcctgcaaggatggcaagatattctgccgacggacagcttgtgattgccagaatccaagtgctgacctattctgttgcccagaatgtgacaccagagtcacaagtcaatgtttagaccaaaatggtcacaagctgtatcgaagtggagacaattggacccatagctgtcagcagtgtcggtgtctggaaggagaggtagattgctggccactcacttgccccaacttgagctgtgagtatacagctatcttagaaggggaatgttgtccccgctgtgtcagtgacccctgcctagctgataacatcacctatgacatcagaaaaacttgcctggacagctatggtgtttcacggcttagtggctcagtgtggacgatggctggatctccctgcacaacctgtaaatgcaagaatggaagagtctgttgttctgtggattttgagtgtcttcaaaataattgaagtatttacagtggactcaacgcagaagaatggacgaaatgaccatccaacgtgattaaggataggaatcggtagtttggtttttttgtttgttttgtttttttaaccacagataattgccaaagtttccacctgaggacggtgtttcggaggttgccttttggacctaccactttgctcattcttgctaacctagtctaggtgacctacagtgccgtgcatttaagtcaatggttgttaaaagaagtttcccgtgttgtaaatcatgtttcccttatcagatcatttgcaaatacatttaaatgatctcatggtaaatggttgatgtattttttgggtttattttgtgtactaaccataatagagagagactcagctccttttatttattttgttgatttatggatcaaattctaaaataaagttgcctgttgtgactttt

SEQ ID NO: 4020 - protein, 810 aa, Homo sapiens
MPMDLILVVWFCVCTARTVVGFGMDPDLQMDIVTELDLVNTTLGVAQVSGMHNASKAFLFQDIEREIHAAPHVSEKLIQLFQNKSEFTILATVQQKPSTSGVILSIRELEHSYFELESSGLRDEIRYHYIHNGKPRTEALPYRMADGQWHKVALSVSASHLLLHVDCNRIYERVIDPPDTNLPPGINLWLGQRNQKHGLFKGIIQDGKIIFMPNGYITQCPNLNHTCPTCSDFLSLVQGIMDLQELLAKMTAKLNYAETRLSQLENCHCEKTCQVSGLLYRDQDSWVDGDHCRNCTCKSGAVECRRMSCPPLNCSPDSLPVHIAGQCCKVCRPKCIYGGKVLAEGQRILTKSCRECRGGVLVKITEMCPPLNCSEKDHILPENQCCRVCRGHNFCAEGPKCGENSECKNWNTKATCECKSGYISVQGDSAYCEDIDECAAKMHYCHANTVCVNLPGLYRCDCVPGYIRVDDFSCTEHDECGSGQHNCDENAICTNTVQGHSCTCKPGYVGNGTICRAFCEEGCRYGGTCVAPNKCVCPSGFTGSHCEKDIDECSEGIIECHNHSRCVNLPGWYHCECRSGFHDDGTYSLSGESCIDIDECALRTHTCWNDSACINLAGGFDCLCPSGPSCSGDCPHEGGLKHNGQVWTLKEDRCSVCSCKDGKIFCRRTACDCQNPSADLFCCPECDTRVTSQCLDQNGHKLYRSGDNWTHSCQQCRCLEGEVDCWPLTCPNLSCEYTAILEGECCPRCVSDPCLADNITYDIRKTCLDSYGVSRLSGSVWTMAGSPCTTCKCKNGRVCCSVDFECLQNN

SEQ ID NO: 4021 - DNA, 286 bp, Homo sapiens
  misc_feature (36)..(36): n is a, c, g, or t
  misc_feature (51)..(51): n is a, c, g, or t
  misc_feature (132)..(132): n is a, c, g, or t
  misc_feature (139)..(139): n is a, c, g, or t
  misc_feature (189)..(189): n is a, c, g, or t
ggcgagcgggctggcgtgcggcgccgttgcgggcgngagcggctgcaacgncggtgcctgaggagcgatgccgagggaaatcatcaccctacagttgggccagtgcggcaatcagattgggttcgagttctngaaacanctgtgcgccgagcatggtatcagccccgagggcatcgtggaggagttcgncaccgagggcactgaccgcaaggacgtctttttctaccaggcagacgatgagcactacatcccccgggccgtgctgctggtacttggaaccccgggt

SEQ ID NO: 4022 - DNA, 305 bp, Homo sapiens
agcgaaaaaatgtccgcctgaagagaccacaagttctattcggggggaccgacagcccgccccgggaggaaggggcggccaggcccgaaagccgcctccccctcccagacccgagagctcgtgcggggcaaagtgaaccgagccgctgggcggtgcaaggggaagcccaagcccgttctcccggccaaagtgaactttaatcggggtggttggatgcggagacggggcggcaggacctgctaaaagtggccgaagatgaatccccagcaacaacgcatggccgctatagggaccgacgaggagct

SEQ ID NO: 4023 - DNA, 966 bp, Homo sapiens
aatgaattaatgatagttggggttagaatacataaaaggaaattatactagaaactacaattttgaaaataaagccaatataacaggaacaaaatatacataacatgagaggaatgtttgatttttgacccataatgcattccttatctttacaattaacctaaatgtctgttagaacaaaactgtataccttggtctaacttcagcgctttcttttaaaaaagcaacaacactctagaacactttttcttttgctttgagatatttgagattcacacatttgttcaagtacacagattctgattcaatagcagatctacagatcttgttatctcttaatatcttgagtagcatgtacttctgagcaagtactatctgaaattctaaaactgctgattcttgaaataaaatttacttcaggttgtgggtttttcaataacttgagatgaaagtaaaattcacccactgcccccctcccccaggaacaaagagctcttcttaaaagtatagaaactcaagtctatctttctactctaaagaacatttcctactaacatttctggtaaggcaataaatgctccagaataatcttcatactacgcttgcaaagattacactgtttaatatcaataacaaaaaacaagcagcaaatcaacagagacaaacgaaagaataacgagacgcttcgaaatcttcagggcctaaaactatgcactaagaagcacacgtaaaccgggcactatcttccttcgcaacctgactgtaaaaatgtaatatacttatccagataactgtccgtgccttatttaacaactacaggcttaagtgaccttacgagcactgttacaaggcaactacgactcgccggagggtccattcttctaaacattaattcccacagaggtaattaataacacagagatgattatagcacttcggacactaagcacagtgcactctacctct

SEQ ID NO: 4024 - DNA, 544 bp, Homo sapiens
  misc_feature (492)..(492): n is a, c, g, or t
atccttaattaaattaatccccccccccccggcaactcgctcggccgccgccatcttgcgagctcgtcgtactgaccgagcggggaggctgtcttgaggcggcaccgctcaccgacaccgaggcggactggcagccctgagcgtcgcagtcatgccggccggacccgtgcaggcggtgcccccgccgccgcccgtgcccacggagcccaaacagcccacagaagaagaagcatcttcaaaggaggattctgcaccttctaagccagttgtggggattatttaccctcctccagaggtcagaaatattgttgacaagactgccagctttgtggccagaaacgggcctgaatttgaagctaggatccgacagaacgagatcaacaaccccaagttcaactttctgaaccccaatgacccttaccatgcctactaccgccacaaggtcagcgagttcaaggaagggaaggctcaggagccgtccgccgccatccncaaggtcatgcagcagcagcagcagaccacccagcagcagctgccccagagg

SEQ ID NO: 4025 - DNA, 355 bp, Homo sapiens
ttttttttttgccttttgtaagaacatgttttatgtatgattgaagtttttacaacactccggaaaagccatccgatgttagatttaaaaataaaatcgaaagcattttctgacatagtacacatgaaaaattggaaattccaatatcttcaatagaagttatagaaagtgtatgtcttcttggagtttgacacccacttaacacagcagaaaataaggtactatactgtaaacaaaaaagtacagtaaaggacaattgtaaatttacataagaatagttcataaacattgtggtctttccataacagtttttatataaaatgaataaaaaaacctttagacagctgtcatcact

SEQ ID NO: 4026 - DNA, 653 bp, Homo sapiens
  misc_feature (430)..(430): n is a, c, g, or t
gagtcccacccggccatcggctttatatttctgcataagacaggcaaagttaagatgctggcttctggcttcaaacctgtgctaaagcaaggcttcttttttccttatgttacttttttgagaaaaggtctcactctgtgacccaggatggagtgtggccacacaatcatagctcactgcaaccttgatttcccaagctcaagtaatcgtcctgcctcagactcccgaatagctgggattacaggcgcacaccaacaggcctgactcttttttttttcctccggtagagatggggtctcctatgttgtccagaatggtttcaaactcctgagctcaatgatattcccgcctcggcctcccaaagtgctgggatttcaggtgtgagccaccatccccggaccttttcttttcaaaacatacataaaaatgngaatgaataggaccaaccagtggctgtgatgcagacaaaacgccctgtctggaaagcatgcgtctaggtaatcttcctccgctttaccaggcggtctgagatctgggctagagcagcgggagggacagggtgcccaattagtgatcatcttcactgacggcgccacagacacccttcttttggagatctacagcctacaagctttggctatctccctcgtgcc

SEQ ID NO: 4027 - DNA, 399 bp, Homo sapiens
gcaagattgcttcagtttgtgacaggatcctctcgagtgcctctgcagggcttcaaagcattgcaaggtgctgcaggcccgagactctttaccatacaccagattgatgcctgcactaacaacctgccgaaagcccacacttgcttcaatcgaatagacattccaccctatgaaagctatgaaaagctatatgaaaagctgctaacagccattgaagaaacatgtggatttgctgtggaatgacaagcttcaaggatttacccaggactctatttatacaaccctgactgacagcctcctttcagcagagtttcaaagaatatgctgaaatacaggaaaacactccccccgcccccttttttttgtgtttttacattttaggacactgtgaggggaaag

SEQ ID NO: 4028 - DNA, 374 bp, Homo sapiens
  misc_feature (230)..(230): n is a, c, g, or t
  misc_feature (234)..(235): n is a, c, g, or t
  misc_feature (246)..(246): n is a, c, g, or t
  misc_feature (249)..(249): n is a, c, g, or t
  misc_feature (251)..(251): n is a, c, g, or t
taaatatttttgtacatcgcttctttttcaaaactagttcttaggaacagactcgatgcaagtgtttctgttctgggaggtattggagggaaaaaacaagcaggatggctggaacactgtactgaggaatgaatagaaaggcttccagatgtctaaaagattctttaaactactgaactgttacctaggttaacaaccctgttgagtatttgctgtttggcagttcaggnaagnnagttttgtttngtntngtctatatgtgcggcttttccagaagaaatttaatcagtgtgacaggaaaaaaaaatgttttatgggtagctttttactttttattgaaaaaaaaattatttgccttttaaattcttttcccc

SEQ ID NO: 4029 - DNA, 496 bp, Homo sapiens
  misc_feature (301)..(301): n is a, c, g, or t
ttccacttttgctgtctcttggcaaatccttcacccatcctctacgctaccatctgttatggcctttctcattcttcttttctctgtctcaggttttctactgctctctctctcagtctcccgatccctttggccaacacaatcacaggagggctttgaagtaagacgcctgcatcccggaggagcgcattttccaggggctggtgcagggcaggcaagaacacacggtgtcataggacagccccgggcacctccccaacgcgggctcaggagaaacggtgattacggagggaagacctgnggagcataagggcccggcacgaggagggaggtggggggcgacggcgccttaagacaagactgggaggcgcccagggcgggaatccgcctcgcggtaaggactttaaaaagtgcgggttgggaggagtcagaaaaaagttttgagcaggaaaactacgcgatgggaagtgtatacgttaccctatagcagaaagat

SEQ ID NO: 4030 - DNA, 463 bp, Homo sapiens
cacagtgctagggaaagttttatttagatacatttatgtccacatgaaacgcttagacttgcatcctattacatatggaattcggagtttacaatacaccatgaacggcagattggctagcccacgctacttaagaggacactcacagattccacatgggatggtacattatgtacagaatacagtagtagagaaccttcgagggaggctctggaacttttgtctctcagcctccggccccctcccccatcatgcccctgcctcccggaactgaaatcctgtctgagacaatacattctgattatttgatagccaggtgtttggattaaggttgcccccctgcaggtccccgacaagagggatggattttatttatatgtttttgggttttagtttacttacttttttttggtagaaaaaaaagaaagaaaaagaaaacaaacatattacagtattaaagtat

SEQ ID NO: 4031 - DNA, 610 bp, Homo sapiens
gtcaattgttctcacagcatatcatttaataatgaatactttagaacaatgcttatgggctggagaattgtatttgattagcccattcagtttgatagcccaaatgctgaacagcacagcgggatcctagcagtgcaagttcaaaagtaagtccaatcatttctgtgatactcgccctggtagcaaacagatcatctcagccaagctcttcatgtatctttgacctattaggtgaacaaatgaacctcacaggacacacagtattttttaaaggcagactcgctctctttttcgccagtgagcagttctagctaaccaagttacacactgtgggtattcctgcctgcctcttgaatacaaaggcctagttcaagtgtgctttttttatttcaaatcaattttttcttctttccttttcgagataaaactattaaaagtactactatatatatacaaatctcaaatcaacttttcggcctcctcctcgtgtaccaggaagtatattctgacgaagggccccactttgcaggtcttgcacgcccctcccttacccagaactgcagagcttcaggatggcgaaggtcacccaagggcatgagtagggagtggg

SEQ ID NO: 4032 - DNA, 4789 bp, Homo sapiens
ggaaaagagttcccaagtaatcctagtgttctaagtagaatcttaatcttggattgttaactcaatgaattctcatttcagatttgttcttgcctcaagacttcagtctgattggatgttgatgctgtattttgcacatactcatttgactgtgacagtcaccattgggttgcttttgattccaaagttttcacattcaagcaataacccacgagatgatattgctacagaagcatatgaggatgagctagacatgggccgatctggatcctacctgaacagcagtatcaattcagcctggagtgagcacagcttggatccagaggacattcgggacgagctgaaaaaactctatgcccaactggaaatatataaaagaaagaagatgatcacaaacaacccccacctccagaaaaagcggtgctcgaagaagggcctaggtcgttccatcatgagacgcattacggagatcccagagacagtcagccggcagtgctctaaagaggacaaggagggcgccgaccatggcacagccaaaggcactgccctcatcaggaagaaccccccagagtcttcagggaacacagggaaatccaaggaggagaccctgaaaaaccgagtcttctcactcaagaaatcccacagcacttatgaccacgtgagagaccaaacggaagagtccagtagcctacccacagaaagccaagaggaggagacaacagaaaattccacactggaatccctgtcgggtaaaaaactaacacaaaaactaaaagaagacagcgaggctgagtccacggagtcggtgccgttggtgtgcaagtcagcaagcgctcacaacctcagctcagagaagaaaactgggcacccacgaacatcgatgttacagaagtctctcagtgtcatagcaagcgccaaggagaagactcttggattagctgggaaaacccaaacagcaggtgtggaagaacgcactaaatcccagaaacctttgccaaaagataaagagacaaacagaaatcactcaaattctgataacacagagactaaagatcctgccccccaaaactcaaatcctgcggaggagccaagaaagcctcagaaatctgggattatgaaacaacaaagggtcaaccccaccactgccaattctgacctgaacccaggcaccacccagatgaaggacaactttgacattggggaggtgtgtccttgggaggtttatgacctgacccctggtcctgtgccttcagaatcaaaagttcaaaagcacgtatctattgtggcttctgaaatggagaaaaaccccactttttccttaaaggagaaatctcaccacaagcctaaggcagctgaggtttgtcagcaatccaatcagaagcgcatagataaggctgaagtatgcctttgggagagccaaggccagtccattttggaagatgagaagcttttgatttccaagactccagttctcccagagagggcaaaagaggagaacggaggtcagcctcgtgcagccaatgtgtgtgctgggcagagcgaagaactgccccccaaagctgtagcatcaaaaacagagaatgaaaatctcaaccaaataggacaccaggaaaaaaagacatcttcttctgaggagaatgtgcgtggctcctataactcaagtaataacttccagcaacctttaacatcacgagcagaggtttgtccttgggagtttgagaccccagctcaaccaaatgctggaagaagtgtagctttacctgcctcttctgctctaagtgcaaataagatagcagggcctaggaaagaagagatctgggatagttttaaagtgtagcatctccaggaagaagaggaaaaggagggaaccccggattggatatgagacagaagatataagaatcaaatattcccaaggaggatttgtcaatcaaggaaaacatgacagatggtgaggtaaagtcaaaggcatgggtagaagaggaccaggggggcaagagcaacaacgtcataatggagaagtcagactttggtcaagaaagtccttcccttggtaacactaggaaaatctttccatttcagcatgtttaaggaaaatagcccacaatgtctgccctgatcaatatgtatccatgggactttgaagatcctaagccaggtaaaccaggagacacagaagacgtaccagatttgcaaagaaagaaaaggtataagacatatataactgaaattctaagtagctgaccgagaagaacttactttacctatttaaccttgatagcactgctaacttaatgcatcccaaaaatatcttttatattaatgattgctctcattttcttataaatgtatgtttcagtatatcgttgtgtctcatattcaagcattccagattgtataatttttgcaaataactttggtattatgtgacacaacacatttatgcaatctgcagctattcaattgttattgcaccttacagaatacctgctatctatcaactttagttgattcttgaagtacagtaagctttctctggcttgggaagccataactgttactataaaaacttttagttttggctgtggtttatatattgtgactttgaatttgactctattatttcacatcatggtttgttatactgtcttaatcagggttttttatacaagttgagttacttgttttgcacttcttgttaggactcagaagctttattaatattggagatcaagtggtcctacttagtcatatgtctcaataagttaaggacaacttatccgttgtttattcaaagtcagagatagataacgccttcattccaattaattgtcccttttaactctttcagtatttcctacttagcagcatttccaaaggaagaagctaagagtgagaaaaatataccgtgcattattattactattggaaagggaagactctagggatgacataagaattatagcagtactataaacccaggaagtttgcctttcaaaaaaaaacacaggtagctcctgatagcactttcaagggattatttttttaaagagaaaaattatggtagcatcaagatcattgtatggatatatttttattatgtgtactgaaaatacagtattttaaaataccttaaagtatttattctcataaactcttattcattgcttcagctacaggtagaacttgctgggctcaaatcccaaagaggttttataaccttatttattcaaaacctataaggtggtatggaatcttcattctcccaagcactggaaaatgtctaagtcctgcaaattgccattgtgagccacttgctcgacatgtaacatgtaaggtccatttgcaaagcaaagcagcccccaaagcatattttataaagcttattgcattccacactgatctcttggcatgggaatcctaagctgccgactaagccctaccgacatgatcatgcagtgagattccaaagctcagtctcatttcatttaaagaagaatcactcagaaatagaaccgagacttccctttttctccctgtaaacacccaagtatcaactgcttatttggccaggacactcccagcacaaataactattttttatgtcacaatcagcaaggaggacatgctagggtgataaaagatggagaaacaggatcagagggtggatatagggctgttcttagagagtattttcagtggaaggtaaaaacagaattctccatattcatcatcaaatttttctcagtgatttttttattcaggagtaagcaagcacttcactgtttcacaaagctgtgcgcaaatcttcctcacccatttgctgactttatgcattactcaggttggtggggtcggtttgagaagatatagaaattctatttttgtgtctttacaccatttatttcttttatctcttccttttcaatgaaggcctatatgcttggtgacctcctttaaggaatctttgtgaactgggttggaagttcctagacccacatatttgtttcatttatgtctgaaatctgttagcacttgattcctttcttgagaattatgcagtcaagcatcagtgactttctattgcacttcaggattgatcctgctagagatgtgagttaaaaagacttgccaaattatatcttagcgacattctatagttcatagattattctccaccagcataaatcagtgagagtgcctagagtctttctgagagtttcattgccattatcaacaagagaagttgaaatttacaagtcaggaggttatttttccagattgataaccatagaaagtgaataaacacttttaaggtcgcaaacatttgctaggttgtccttctcaatgcatgtgcaggctgcatcctgtccttgtttttaagccagggtttataaataagtagatttataccaatcttaatagaattgtatattttatgcaagaattaaatgctttacaacatgaagtataactcaacccattgtaaactttggtggcaatatggatttgaaactcgacagttctcttgtatttgcttcctaggtttctgcatgcaagttatgacaggtaggactgaaaaaacactgccttttgacttctagcatttagcaaccgagagtcgtagagtcaataaagctgtaagtgtcttcacttaatctgtggttctcctaaaactattatctgaaacctacagcatcccaccatgaaatatttggtaaatttatgttgtgacgtgttgcagcatgtaaataattataacttctctgcaataaaacatatttatatg

SEQ ID NO: 4033 - protein, 596 aa, Homo sapiens
SWIVNSMNSHFRFVLASRLQSDWMLMLYFAHTHLTVTVTIGLLLIPKFSHSSNNPRDDIATEAYEDELDMGRSGSYLNSSINSAWSEHSLDPEDIRDELKKLYAQLEIYKRKKMITNNPHLQKKRCSKKGLGRSIMRRITEIPETVSRQCSKEDKEGADHGTAKGTALIRKNPPESSGNTGKSKEETLKNRVFSLKKSHSTYDHVRDQTEESSSLPTESQEEETTENSTLESLSGKKLTQKLKEDSEAESTESVPLVCKSASAHNLSSEKKTGHPRTSMLQKSLSVIASAKEKTLGLAGKTQTAGVEERTKSQKPLPKDKETNRNHSNSDNTETKDPAPQNSNPAEEPRKPQKSGIMKQQRVNPTTANSDLNPGTTQMKDNFDIGEVCPWEVYDLTPGPVPSESKVQKHVSIVASEMEKNPTFSLKEKSHHKPKAAEVCQQSNQKRIDKAEVCLWESQGQSILEDEKLLISKTPVLPERAKEENGGQPRAANVCAGQSEELPPKAVASKTENENLNQIGHQEKKTSSSEENVRGSYNSSNNFQQPLTSRAEVCPWEFETPAQPNAGRSVALPASSALSANKIAGPRKEEIWDSFKV

SEQ ID NO: 4034 - DNA, 740 bp, Homo sapiens
ggctaggctacgaggtcgtgcgtgttttacttcggccgaggctagaggcttctggtcataggatctagactgtctgtgccacgtctacgtccggaatgataagtcttgcagcgtgtggtcattgctgacaatgaagtacccatcccgggtggcctttaccttgctggagaaggtactacgatgaattctccacatgcaagtcgacaggatagactggccgtctgatgatcccctgctacaatccattacccagccctggatggtcacctcagtagataccagaacccacgagaagctgatcccatgactaaagtgcaggccgaactagatgagaccaaaatcattctgcacaacaccatggagtctctgttagagcgaggtgagaagctagatgacttggtgtccaaatccgaggtgctgggaacacagtctaaagccttctataaaactgcccggaaacaaaactcatgctgtgccatcatgtgatgcagcctgccagaggcccaatgctggaatggcaccatcattcacatcagaactgcagccccctggaaaacgaagagacagccatagacgaggagccagagtgggggcagactggccatttttattttgaagtcctgcgagaaatggttggtggaagggtggcgaatgttcaaattcatatgtgtggctagtgattcttggacagaatttgacggtcccaaaggtgtatttttgggcaatgaaccataaactcg

SEQ ID NO: 4035 - DNA, 374 bp, Homo sapiens
gtttttttccacaacaaccagcttaataactataatacaagctaatattaacatgtgtcttatggctcaaatcaaattacagtattacgccttctcatcacgatttgaacaaaagcaaaatgcttgacatgagtccagtctaacccaaataatcagtgatgtataacaagtgaactaagtatgggaaaatcaaatcttatgctacagaaagctgacttatactacagtcaacaaccactaagccttctttggcaatgaaacgtacaaaattgcaagctctgatgcagtctcagtgattgccatatactgttccaaacactatgaactactaaaaacattaagtttgaggatggtccgcacaagaggaatcctct

SEQ ID NO: 4036 - DNA, 788 bp, Homo sapiens
gaaaagcgcgcgcggggattccaggagtcgtggtttcttgccttgatgtactggagcaatcagatcacacggcggcttggagagtgagtgcaaggttttatgagtggaattagccctcagcagatgggggagccagaaggcagttggagtgggaagaacccagggaccatgggcgcctccaggctctataccctggtgctggtcctgcagcctcagcgagttctcctgggcatgaaaaagcgaggcttcggggccggccggtggaatggctttgggggcaaagtgcaagaaggagagaccatcgaggatggggctaggagggagctgcaggaggagagcggtctgacagtggacgccctgcacaaggtgggccagatcgtgtttgagttcgtgggcgagcctgagctcatggacgtgcatgtcttctgcacagacagcatccaggggacccccgtggagagcgacgaaatgcgcccatgctggttccagctggatcagatccccttcaaggacatgtggcccgacgacagctactggtttccactcctgcttcagaagaagaaattccacgggtacttcaagttccagggtcaggacaccatcctggactacacactccgcgaggtggacacggtctagcgggagcccagggcagcccctgggcaggagacgtggctgctgaacagctgcaaaccatcttcacctgggggcattgagtggcgcagagccgggtttcatctggaattaactggatggaagggaaaataaagctatctagcggtgaaaaa

SEQ ID NO: 4037 - protein, 179 aa, Homo sapiens
MSGISPQQMGEPEGSWSGKNPGTMGASRLYTLVLVLQPQRVLLGMKKRGFGAGRWNGFGGKVQEGETIEDGARRELQEESGLTVDALHKVGQIVFEFVGEPELMDVHVFCTDSIQGTPVESDEMRPCWFQLDQIPFKDMWPDDSYWFPLLLQKKKFHGYFKFQGQDTILDYTLREVDTV

SEQ ID NO: 4038 - DNA, 2091 bp, Homo sapiens
gaaggggacagaaggcagttcacctctgctcccgacagcctgggaacccgcaagagccccagcatttgaagtctggtcttgtgaaaccccaccctcctctggctgtgtgattgaatgggatgccctcgaggtacacctcacctgagagggttttgggcagatcagcagtaaggtgttaaattttagaagcctgaaaactccagaagagaaaggccaaccaactcaaacttgaagacatgaaatccccaaggagaaccactttgtgcctcatgtttattgtgatttattcttccaaagctgcactgaactggaattacgagtctactattcatcctttgagtcttcatgaacatgaaccagctggtgaagaggcactgaggcaaaaacgagccgttgccacaaaaagtcctacggctgaagaatacactgttaatattgagatcagttttgaaaatgcatccttcctggatcctatcaaagcctacttgaacagcctcagttttccaattcatgggaataacactgaccaaattactgacattttgagcataaatgtgacaacagtctgcagacctgctggaaatgaaatctggtgctcctgcgagacaggttatgggtggcctcgggaaaggtgtcttcacaatctcatttgtcaagagcgtgacgtcttcctcccagggcaccattgcagttgccttaaagaactgcctcccaatggacctttttgcctgcttcaggaagatgttaccctgaacatgagagtcagactaaatgtaggctttcaagaagacctcatgaacacttcctccgccctctataggtcctacaagaccgacttggaaacagcgttccggaagggttacggaattttaccaggcttcaagggcgtgactgtgacagggttcaagtctggaagtgtggttgtgacatatgaagtcaagactacaccaccatcacttgagttaatacataaagccaatgaacaagttgtacagagcctcaatcagacctacaaaatggactacaactcctttcaagcagttactatcaatgaaagcaatttctttgtcacaccagaaatcatctttgaaggggacacagtcagtctggtgtgtgaaaaggaagttttgtcctccaatgtgtcttggcgctatgaagaacagcagttggaaatccagaacagcagcagattctcgatttacaccgcacttttcaacaacatgacttcggtgtccaagctcaccatccacaacatcactccaggtgatgcaggtgaatatgtttgcaaactgatattagacatttttgaatatgagtgcaagaagaaaatagatgttatgcccatccaaattttggcaaatgaagaaatgaaggtgatgtgcgacaacaatcctgtatctttgaactgctgcagtcagggtaatgttaattggagcaaagtagaatggaagcaggaaggaaaaataaatattccaggaacccctgagacagacatagattctagctgcagcagatacaccctcaaggctgatggaacccagtgcccaagcgggtcgtctggaacaacagtcatctacacttgtgagttcatcagtgcctatggagccagaggcagtgcaaacataaaagtgacattcatctctgtggccaatctaacaataaccccggacccaatttctgtttctgagggacaaaacttttctataaaatgcatcagtgatgtgagtaactatgatgaggtttattggaacacttctgctggaattaaaatataccaaagattttataccacgaggaggtatcttgatggagcagaatcagtactgacagtcaagacctcgaccagggagtggaatggaacctatcactgcatatttagatataagaattcatacagtattgcaaccaaagacgtcattgttcacccgctgcctctaaagctgaacatcatgattgatcctttggaagctactgtttcatgcagtggttcccatcacatcaagtgctgcatagaggaggatggagactacaaagttactttccatatgggttcctcatcccttcctgctgtaaaaaaaaaaaaaaaaaaaa

SEQ ID NO: 4039 - protein, 618 aa, Homo sapiens
MKSPRRTTLCLMFIVIYSSKAALNWNYESTIHPLSLHEHEPAGEEALRQKRAVATKSPTAEEYTVNIEISFENASFLDPIKAYLNSLSFPIHGNNTDQITDILSINVTTVCRPAGNEIWCSCETGYGWPRERCLHNLICQERDVFLPGHHCSCLKELPPNGPFCLLQEDVTLNMRVRLNVGFQEDLMNTSSALYRSYKTDLETAFRKGYGILPGFKGVTVTGFKSGSVVVTYEVKTTPPSLELIHKANEQVVQSLNQTYKMDYNSFQAVTINESNFFVTPEIIFEGDTVSLVCEKEVLSSNVSWRYEEQQLEIQNSSRFSIYTALFNNMTSVSKLTIHNITPGDAGEYVCKLILDIFEYECKKKIDVMPIQILANEEMKVMCDNNPVSLNCCSQGNVNWSKVEWKQEGKINIPGTPETDIDSSCSRYTLKADGTQCPSGSSGTTVIYTCEFISAYGARGSANIKVTFISVANLTITPDPISVSEGQNFSIKCISDVSNYDEVYWNTSAGIKIYQRFYTTRRYLDGAESVLTVKTSTREWNGTYHCIFRYKNSYSIATKDVIVHPLPLKLNIMIDPLEATVSCSGSHHIKCCIEEDGDYKVTFHMGSSSLPAVKKKKKK

SEQ ID NO: 4040 - DNA, 497 bp, Homo sapiens
tttttttgcattatttaagtaaaaagctttatttttttccctcagtgtctgaatcttctttattgtttaccaggattcatgattccttttgtaacttgttctcagtcatttattcagttgagtaattacactttgtcagacaaatatctaaagttttattatgtaacttgcagattttcaggacgagtgaaggaggaaaatggcagaagagttcaggaaagacaaaaatgcaagactgtgtctaagtttatgcctctcttgagtttgatgatccaattttaatttaatcatttgagtatctcttagggattcttcctccacagtggaggaaagtgggctctactgaattcattggaacaccgtcctttaaggagaaagaaactttgaacaatagacgtctttttcaacaactactgccaatgttttgaaagttgtcatttgttttcagctagataacaaaggctgaagagttgccttctttccaattgatccgatgg

SEQ ID NO: 4041 - DNA, 420 bp, Homo sapiens
gtctgtttaatatctttaataattatatcatttctaaagctttccacaaaagggtattacagttttttaacttattgcaaacatatcttaaaaaaaaaaagtcagccttaatactgaaactataacatgaattttaaattatggacacataccataaaacacaatgaagaacattttatttaaataaaaagagaatatttcgctaagcaataaacccaacatatttcttttctctccatatctacatccaatggtgatattttataggctagtttctaaacagatgcaaatttttacaaagcgatgaaagccacgttttgctcaggaatactacggttcacataccatataggttgttttacagcagatactagtttgccaagcttcagatggcaaaatgctaagttgtgaattgagtat

SEQ ID NO: 4042 - DNA, 1490 bp, Homo sapiens
ggcgcgcgcggggcccgcacgtggaggccggcgcgggggcgcgggcagggccggctgctgagacgcgctgctgccccccgcgcgggcgccgcggcttcaatggcgccatcgcccaggaccggcagccggcaagatgcgaccgccctgcccagcatgtcctcaactttctgggcgttcatgatcctggccagcctgctcatcgcctactgcagtcagctggccgccggcacctgtgagattgtgaccttggaccgggacagcagccagcctcggaggacgatcgcccggcagaccgcccgctgtgcgtgtagaaaggggcagatcgccggcaccacgagagcccggcccgcctgtgtggacgcaagaatcatcaagaccaagcagtggtgtgacatgcttccgtgtctggagggggaaggctgcgacttgttaatcaaccggtcaggctggacgtgcacgcagcccggcgggaggataaagaccaccacggtctcctgacaaacacagcccctgaggggccccgggagtggccttggctccctggagagcccacgtctcagccacagttctccactcgcctcggacttcacccgttctctgccgcccgcccactccgtttccctgtggtccgtgaaggacggcctcaggccttggcatcctgagcttcggtctgtccagccgacccgaggaggccggactcagacacataggcggggggcggcacctggcatcagcaatacgcagtctgtgggagcccggccgcgcccagcccccgccgaccgtggcgttggccctgctgtcctcagaggaggaggaggaggaggcagctccggcagccacagaaggctgcagcccagcccgcctgagacacgacgcctgccccaggggactgtcaggcacagaagcggcctcctcccgtgccccagactgtccgaattgcttttattttcttatactttcagtatactccatagaccaaagagcaaaatctatctgaacctggacgcaccctcactgtcagggtccctggggtcgcttgtgcgggcgggagggcaatggtggcagagacatgctggtggccccggcggagcggagagggcggccgtggtggaggcctccaccccaggagcaccccgcgcaccctcggaggacgggcttcggctgcgcggaggccgtggcacacctgcgggaggcagcgacggcccccacgcagacgctgggaacgcaggccgctttattcctctgtacttagatcaacttgaccgtactaaaatccctttctgttttaaccagttaaacatgcctcttctacagctccatttttgatagttggataatccagtatctgccaagagcatgttgggtctcccgtgactgctgcctcatcgataccccatttagctccagaaagcaaagaaaactcgagtaacacttgtttgaaagagatcattaaatgtattttgcaaagcctaaaaaaaaaaaaaaaaaaa

SEQ ID NO: 4043 - protein, 165 aa, Homo sapiens
GARGARTWRPARGRGQGRLLRRAAAPRAGAAASMAPSPRTGSRQDATALPSMSSTFWAFMILASLLIAYCSQLAAGTCEIVTLDRDSSQPRRTIARQTARCACRKGQIAGTTRARPACVDARIIKTKQWCDMLPCLEGEGCDLLINRSGWTCTQPGGRIKTTTVS

SEQ ID NO: 4044 - DNA, 786 bp, Homo sapiens
taggctagtacgaggccgggtgtgtaatcggccgaggggaagccctggggcgctgccgccgctttccttaaccacaaatcaggccggacaggagagggaggggtgggggacagtgggtgggcattcagactgccagcactttgctatctacagccggggctcccgagcggcagaaagttccggccactctctgccgcttgggttgggcgaagccaggaccgtgccgcgccaccgccaggatatggagctactgtcgccaccgctccgcgacgtagacctgacggcccccgacggctctctctgctcctttgccacaacggacgacttctatgacgacccgtgtttcgactccccggacctgcgcttcttcgaagacctggacccgcgcctgatgcacgtgggcgcgctcctgaaacccgaagagcactcgcacttccccgcggcggtgcacccggccccgggcgcacgtgaggacgagcatgtgcgcgcgcccagcgggcaccaccaggcgggccgctgcctactgtgggcctgcaaggcgtgcaagcgcaagaccaccaacgccgaccgccgcaaggccgccaccatgcgcgagcggcgccgcctgagcaaaagtaaatgaggcctttgagacactccaagcgctgcacgtcgagcaatccaaaccagcggtttgcacaggtggagatcctgcgcacgccatccgctatatcgagggcctgcaggctctgctgcgcgaccggacgccgcgcccctggggccgagccgcttcttgcgcggcccgtg

SEQ ID NO: 4045 - DNA, 3344 bp, Homo sapiens
aagctggggagcatggaccagaccccgcagcgctggcaccatgacgctcgcccgcttcgtgctagccctgatgttaggggcgctccccgaagtggtcggctttgattctgtcctcaatgattccctccaccacagccaccgccattcgccccctgcgggtccgcactacccctattaccttcccacccagcagcggcccccgacgacgcgtccgccgccgcctctcccgcgcttcccgcgccccccgcgggcgctccctgcccagcgcccgcacgccctccaggccgggcacacgccccggccgcacccctggggctgccccgccggcgagccatgggtcagcgtgacggacttcggcgccccgtgtctgcggtgggcggaggtgccacccttcctggagcggtcgcccccagcgagctgggctcagctgcgaggacagcgccacaacttttgtcggagccccgacggcgcgggcagaccctggtgtttctacggagacgcccgtggcaaggtggactggggctactgcgactgcagacacggatcagtacgacttcgtggcggcaaaaatgagtttgaaggcacagtggaagtatatgcaagtggagtttggggcactgtctgtagcagccactgggatgattctgatgcatcagtcatttgtcaccagctgcagctgggaggaaaaggaatagcaaaacaaaccccgttttctggactgggccttattcccatttattggagcaatgtccgttgccgaggagatgaagaaaatatactgctttgtgaaaaagacatctggcagggtggggtgtgtcctcagaagatggcagctgctgtcacgtgtagcttttcccatggcccaacgttccccatcattcgccttgctggaggcagcagtgtgcatgaaggccgggtggagctctaccatgctggccagtggggaaccgtttgtgatgaccaatgggatgatgccgatgcagaagtgatctgcaggcagctgggcctcagtggcattgccaaagcatggcatcaggcatattttggggaagggtctggcccagttatgttggatgaagtacgctgcactgggaatgagctttcaattgagcagtgtccaaagagctcctggggagagcataactgtggccataaagaagatgctggagtgtcctgtacccctctaacagatggggtcatcagacttgcaggtgggaaaggcagccatgagggtcgcttggaggtatattacagaggccagtggggaactgtctgtgatgatggctggactgagctgaatacatacgtggtttgtcgacagttgggatttaaatatggtaaacaagcatctgccaaccattttgaagaaagcacagggcccatatggttggatgacgtcagctgctcaggaaaggaaaccagatttcttcagtgttccaggcgacagtggggaaggcatgactgcagccaccgcgaagatgttagcattgcctgctaccctggcggcgagggacacaggctctctctgggttttcctgtcagactgatggatggagaaaataagaaagaaggacgagtggaggtttttatcaatggccagtggggaacaatctgtgatgatggatggactgataaggatgcagctgtgatctgtcgtcagcttggctacaagggtcctgccagagcaagaaccatggcttactttggagaaggaaaaggacccatccatgtggataatgtgaagtgcacaggaaatgagaggtccttggctgactgtatcaagcaagatattggaagacacaactgccgccacagtgaagatgcaggagttatttgtgattattttggcaagaaggcctcaggtaacagtaataaagagtccctctcatctgtttgtggcttgagattactgcaccgtcggcagaagcggatcattggtgggaaaaattctttaaggggtggttggccttggcaggtttccctccggctgaagtcatcccatggagatggcaggctcctctgcggggctacgctcctgagtagctgctgggtcctcacagcagcacactgtttcaagaggtatggcaacagcactaggagctatgctgttagggttggagattatcatactctggtaccagaggagtttgaggaagaaattggagttcaacagattgtgattcatcgggagtatcgacccgaccgcagtgattatgacatagccctggttagattacaaggaccagaagagcaatgtgccagattcagcagccatgttttgccagcctgtttaccactctggagagagaggccacagaaaacagcatccaactgttacataacaggatggggtgacacaggacgagcctattcaagaacactacaacaagcagccattcccttacttcctaaaaggttttgtgaagaacgttataagggtcggtttacagggagaatgctttgtgctggaaacctccatgaacacaaacgcgtggacagctgccagggagacagcggaggaccactcatgtgtgaacggcccggagagagctgggtggtgtatggggtgacctcctgggggtatggctgtggagtcaaggattctcctggtgtttataccaaagtctcagcctttgtaccttggataaaaagtgtcaccaaactgtaattcttcatggaaacttcaaagcagcatttaaacaaatggaaaactttgaacccccactattagcactcagcagagatgacaacaaatggcaagatctgtttttgctttgtgttgtggtaaaaaattgtgtaccccctgctgcttttgagaaatttgtgaacattttcagaggcctcagtgtagtggaagtgataatccttaaatgaacattttctaccctaatttcactggagtgacttattctaagcctcatctatcccctacctatttctcaaaatcattctatgctgattttacaaaagatcatttttacatttgaactgagaaccccttttaattgaatcagtggtgtctgaaatcatattaaatacccacatttgacataaatgcggtaccctttactacactcatgagtggcatatttatgcttaggtcttttcaaaagacttgacaagaaatcttcatattctctgtagcctttgtcaagtgaggaaatcagtggttaaagaattccactataaacttttaggcctgaataggagtagtaaagcctcaaggacatctgcctgtcacaatatattctcaaagtgatctgatatttggaaacaagtatccttgttgagtaccaagtgctacagaaaccataagataaaaatactttctacctacagcgtgc

SEQ ID NO: 4046 - protein, 875 aa, Homo sapiens
MTLARFVLALMLGALPEVVGFDSVLNDSLHHSHRHSPPAGPHYPYYLPTQQRPPTTRPPPPLPRFPRPPRALPAQRPHALQAGHTPRPHPWGCPAGEPWVSVTDFGAPCLRWAEVPPFLERSPPASWAQLRGQRHNFCRSPDGAGRPWCFYGDARGKVDWGYCDCRHGSVRLRGGKNEFEGTVEVYASGVWGTVCSSHWDDSDASVICHQLQLGGKGIAKQTPFSGLGLIPIYWSNVRCRGDEENILLCEKDIWQGGVCPQKMAAAVTCSFSHGPTFPIIRLAGGSSVHEGRVELYHAGQWGTVCDDQWDDADAEVICRQLGLSGIAKAWHQAYFGEGSGPVMLDEVRCTGNELSIEQCPKSSWGEHNCGHKEDAGVSCTPLTDGVIRLAGGKGSHEGRLEVYYRGQWGTVCDDGWTELNTYVVCRQLGFKYGKQASANHFEESTGPIWLDDVSCSGKETRFLQCSRRQWGRHDCSHREDVSIACYPGGEGHRLSLGFPVRLMDGENKKEGRVEVFINGQWGTICDDGWTDKDAAVICRQLGYKGPARARTMAYFGEGKGPIHVDNVKCTGNERSLADCIKQDIGRHNCRHSEDAGVICDYFGKKASGNSNKESLSSVCGLRLLHRRQKRIIGGKNSLRGGWPWQVSLRLKSSHGDGRLLCGATLLSSCWVLTAAHCFKRYGNSTRSYAVRVGDYHTLVPEEFEEEIGVQQIVIHREYRPDRSDYDIALVRLQGPEEQCARFSSHVLPACLPLWRERPQKTASNCYITGWGDTGRAYSRTLQQAAIPLLPKRFCEERYKGRFTGRMLCAGNLHEHKRVDSCQGDSGGPLMCERPGESWVVYGVTSWGYGCGVKDSPGVYTKVSAFVPWIKSVTKL

SEQ ID NO: 4047 - DNA, 2969 bp, Homo sapiens
gccctggctctggaggagaatgccacctcccagaaggtgctggatatctttgaacagcggctggagcaggttgagagtggcctccatcgggccctgcggctacagcgcttcttccagcaggcacatgaatgggtggatgagggctttgctcggctggcaggagctgggccgggtcgggaggctgtgctggctgcactggccctgcggcgggccccagagcccagtgccggcaccttccaggagatgcgggccctggccctggacctgggcagcccagcagccctgcgagaatggggccgctgccaggcccgctgccaagagctagagaggaggatccagcaacacctgggagaggaggcgagcccacggggctaccgacgacggcgggcagacggtgccagcagtggaggggcccagtgggggccccgcagcccctcgcccagcctcagctccttgctgctccccagcagccctgggccacggccagccccatcccattgctccctggccccatgtggagaggactatgaggaagagggccctgagctggctccagaagcagagggcaggcccccaagagctgtgctgatccgaggcctggaggtcaccagcactgaggtggtagacaggacgtgctcaccacgggaacacgtgctgctgggccgggctagggggccagacggaccctggggagtaggcaccccccggatggagcgcaagcgaagcatcagtgcccagcagcggctggtgtctgagctgattgcctgtgaacaagattacgtggccaccttgagtgagccagtgccaccccctgggcctgagctgacgcctgaacttcggggcacctgggctgctgccctgagtgcccgggaaaggcttcgcagcttccaccggacacactttctgcgggagcttcagggctgcgccacccaccccctacgcattggggcctgcttccttcgccacggggaccagttcagcctttatgcacagtacgtgaagcaccgacacaaactggagaatggtctggctgcactcagtccctcaagcaagggctccatggaggctggcccttacctgccccgagccctgcagcagcctctggaacagctgactcggtatgggcggctcctggaggagctcctgagggaagctgggcctgagctcagttctgagtgccgggcccttggggctgctgtacagctgctccgggaacaagaggcccgtggcagagacctgctggccgtggaggcggtgcgtggctgtgagatagatctgaaggagcagggacagctcttgcatcgagaccccttcactgtcatctgtggccgaaagaagtgccttcgccatgtctttctcttcgagcatctcctcctgttcagcaagctcaagggccctgaaggggggtcagagatgtttgtttacaagcaggcctttaagactgctgatatggggctgacagaaaacatcggggacagcggactctgctttgagttgtggtttcggcggcggcgtgcacgagaggcatacactctgcaggcaacctcaccagagatcaaactcaagtggacaagttctattgcccagctgctgtggagacaggcagcccacaacaaggagctccgagtgcagcagatggtgtccatgggcattgggaataaacccttcctggacatcaaagcccttggggagcggacgctgagtgccctgctcactggaagaggtgagggccagggtgctggggggtggcccccaggagtgaagaccttgacaatgaggatacaaaggggaggtatggtggaaagtcaggaaaggcatctcgtccccaaatcagtgggactggctgggaggccctctgtgagactgagggtcattccagggagccaagagggctttcccacaccagcaccccaccccccactccccactctctgcagccgcccgcacccgggcctccgtggccgtgtcatcctttgagcatgccggcccctcccttcccggcctttcgccgggagcctgctccctgcctgcccgcgtcgaggaggaggcctgggatctggacgtcaagcaaatttccctggccccagaaacacttgactcttctggagatgtgtccccaggaccaagaaacagccccagcctgcaacccccccaccctgggagcagcactcccaccctggccagtcgagggatcttagggctatcccgacagagtcatgctcgagccctgagtgaccccaccacgcctctgtgacctgggtgagtcagcatccccaatttctaccacatccagcactcctaccatcttgcatgtaccttccttcctgtccccggctacttgggagtcagcttcttccctctcccaactcatctccctcttctctcctggcttctagagaagatccagaacttgcgtgcagcttctcctctcagcacactttgggctgggatggcagtggggcataatggagccctgggcgatcgctgaatttcttccctctgcttcctggacacagaggaggtctaacgaccagagtattgccctgccaccactatctctagtctccctagcttggtgccttctcctgcaggagtcagagcagccacattgcttgccttcataccctggaggtggggaagttatccctcttccggtgctttcccatcctgggccactgtatccaggacatcactcccatgccagccctccctggcagcccatgttctcctcttttctcaccccctgactttccctgagaagaatcatctctgccaggtcaactggagtccctggtgactccattctgaggtgtcacaagcaatgaagctatgcaaacaataggagggtgtgacaggggaaccgtagactttatatatgtaattactgttattataatactattgttatattaaatgtatttactcccaaaaaaaaaaaaaaaaaaaaaaaaaaaaaaaaaaaaaaaaaa

SEQ ID NO: 4048 - protein, 658 aa, Homo sapiens
ALALEENATSQKVLDIFEQRLEQVESGLHRALRLQRFFQQAHEWVDEGFARLAGAGPGREAVLAALALRRAPEPSAGTFQEMRALALDLGSPAALREWGRCQARCQELERRIQQHLGEEASPRGYRRRRADGASSGGAQWGPRSPSPSLSSLLLPSSPGPRPAPSHCSLAPCGEDYEEEGPELAPEAEGRPPRAVLIRGLEVTSTEVVDRTCSPREHVLLGRARGPDGPWGVGTPRMERKRSISAQQRLVSELIACEQDYVATLSEPVPPPGPELTPELRGTWAAALSARERLRSFHRTHFLRELQGCATHPLRIGACFLRHGDQFSLYAQYVKHRHKLENGLAALSPSSKGSMEAGPYLPRALQQPLEQLTRYGRLLEELLREAGPELSSECRALGAAVQLLREQEARGRDLLAVEAVRGCEIDLKEQGQLLHRDPFTVICGRKKCLRHVFLFEHLLLFSKLKGPEGGSEMFVYKQAFKTADMGLTENIGDSGLCFELWFRRRRAREAYTLQATSPEIKLKWTSSIAQLLWRQAAHNKELRVQQMVSMGIGNKPFLDIKALGERTLSALLTGRGEGQGAGGWPPGVKTLTMRIQRGGMVESQERHLVPKSVGLAGRPSVRLRVIPGSQEGFPTPAPHPPLPTLCSRPHPGLRGRVIL

SEQ ID NO: 4049 - DNA, 397 bp, Homo sapiens
tttttttttttttttttttaatgccaaatgattaattttattggttgttaattcattatttctacctataagggtcaaatgaaaaagttttcccattcaagcaaattggggctattagcaaaagctagttgatttaaccacaccaaataagcagggttatctgctcagtggctgatattgaaccaaaagcttttgacaaaaatacctctggagcagccaacaactaaaatactttctcagacacagaggcaactttcgtcctattgtacagtcactttgcaattagagaccctaaccccattcttctccaagtggggctgtctcataaacccccattccctgggtgcaagttatacattatctaataatacccaagattggattcaattatctactg

SEQ ID NO: 4050 - DNA, 3483 bp, Homo sapiens
atggagaagtgggaggagctgaacagccatcagccaggagaggagtacgaccccagcaaagcgacctttgtgaaggtggtgccaacccccaacaatggctccacggagctcgtggccctgcaccgcaatgagggcgaagacgggcttgaggtgctgtccttcgaattccagaagatcaagtattcctacgatgccctggagaagaagcagtttctccccgtggcctttcctgtgggaaacgccttctcatactatcagagcaacagaggcttccaggaagactcagagatccgagcagctgagaagaaatttgggagcaacaaggccgagatggtggtgcctgacttctcggagcttttcaaggagagagccacagcccccttctttgtatttcaggtgttctgtgtggggctctggtgcctggatgagtactggtactacagcgtctttacgctatccatgctggtggcgttcgaggcctcgctggtgcagcagcagatgcggaacatgtcggagatccggaagatgggcaacaagccccacatgatccaggtctaccgaagccgcaagtggaggcccattgccagtgatgagatcgtaccaggggacatcgtctccatcggccgctccccacaggagaacctggtgccatgtgacgtgcttctgctgcgaggccgctgcatcgtagacgaggccatgctcacgggggagtccgtgccacagatgaaggagcccatcgaagacctcagcccagaccgggtgctggacctccaggctgattcccggctgcacgtcatcttcgggggcaccaaggtggtgcagcacatccccccacagaaagccaccacgggcctgaagccggttgacagcgggtgcgtggcctacgtcctgcggaccggattcaacacatcccagggcaagctgctgcgcaccatcctcttcggggtcaagagggtgactgcgaacaacctggagaccttcatcttcatcctcttcctcctggtgtttgccatcgctgcagctgcctatgtatggattgaaggtaccaaggaccccagccggaaccgctacaagctgtttctggagtgcaccctgatcctcacctcggtcgtgcctcctgagctgcccatcgagctgtccctggccgtcaacacctccctcatcgccctggccaagctctacatgtactgcacagagcccttccggatcccctttgctggcaaggtcgaggtgtgctgctttgacaagacggggacgttgaccagtgacagcctggtggtgcgcggtgtggccgggctgagagacgggaaggaggtgaccccagtgtccagcatccctgtagaaacacaccgggccctggcctcgtgccactcgctcatgcagctggacgacggcaccctcgtgggtgaccctctagagaaggccatgctgacggccgtggactggacgctgaccaaagatgagaaagtattcccccgaagtattaaaactcaggggctgaaaattcaccagcgctttcattttgccagtgccctgaagcgaatgtccgtgcttgcctcgtatgagaagctgggctccaccgacctctgctacatcgcggccgtgaagggggcccccgaaactctgcactccatgttctcccagtgcccgcccgactaccaccacatccacaccgagatctcccgggaaggagcccgcgtcctggcgctggggtacaaggagctgggacacctcactcaccagcaggcccgggaggtcaagcgggaggccctggagtgcagcctcaagttcgtcggcttcattgtggtctcctgcccgctcaaggctgactccaaggccgtgatccgggagatccagaatgcgtcccaccgggtggtcatgatcacgggagacaacccgctcactgcatgccacgtggcccaggagctgcacttcattgaaaaggcccacacgctgatcctgcagcctccctccgagaaaggccggcagtgcgagtggcgctccattgacggcagcatcgtgctgcccctggcccggggctccccaaaggcactggccctggagtacgcactgtgcctcacaggcgacggcttggcccacctgcaggccaccgacccccagcagctgctccgcctcatcccccatgtgcaggtgttcgcccgtgtggctcccaagcagaaggagtttgtcatcaccagcctgaaggagctgggctacgtgaccctcatgtgtggggatggcaccaacgacgtgggcgccctgaagcatgctgacgtgggtgtggcgctcttggccaatgcccctgagcgggttgtcgagcggcgacggcggccccgggacagcccaaccctgagcaacagtggcatcagagccacctccaggacagccaagcagcggtcggggctccctccctccgaggagcagccaacctcccagagggaccgcctgagccaggtgctgcgagacctcgaggacgagagtacgcccattgtgaaactgggggatgccagcatcgcagcacccttcacctccaagctctcatccatccagtgcatctgccacgtgatcaagcagggccgctgcacgctggtgaccacgctacagatgttcaagatcctggcgctcaatgccctcatcctggcctacagccagagcgtcctctacctggagggagtcaagttcagtgacttccaggccaccctacaggggctgctgctggccggctgcttcctcttcatctcccgttccaagcccctcaagaccctctcccgagaacggcccctgcccaacatcttcaacctgtacaccatcctcaccgtcatgctccagttctttgtgcacttcctgagccttgtctacctgtaccgtgaggcccaggcccggagccccgagaagcaggagcagttcgtggacttgtacaaggagtttgagccaagcctggtcaacagcaccgtctacatcatggccatggccatgcagatggccaccttcgccatcaattacaaaggcccgcccttcatggagagcctgcccgagaacaagcccctggtgtggagtctggcagtttcactcctggccatcattggcctgctcctcggctcctcgcccgacttcaacagccagtttggcctcgtggacatccctgtggagttcaagctggtcattgcccaggtcctgctcctggacttctgcctggcgctcctggccgaccgcgtcctgcagttcttcctggggaccccgaagctgaaagtgccttcctgagatggcagtgctggtacccactgcccaccctggctgccgctgggcgggaaccccaacagggccccgggagggaaccctgcccccaaccccccacagcaaggctgtacagtctcgcccttggaagactgagctgggacccccacagccatccgctggcttggccagcagaaccagccccaagccagcacctttggtaaataaagcagcatctgagattttaaa

SEQ ID NO: 4051 - protein, 1086 aa, Homo sapiens
MEKWEELNSHQPGEEYDPSKATFVKVVPTPNNGSTELVALHRNEGEDGLEVLSFEFQKIKYSYDALEKKQFLPVAFPVGNAFSYYQSNRGFQEDSEIRAAEKKFGSNKAEMVVPDFSELFKERATAPFFVFQVFCVGLWCLDEYWYYSVFTLSMLVAFEASLVQQQMRNMSEIRKMGNKPHMIQVYRSRKWRPIASDEIVPGDIVSIGRSPQENLVPCDVLLLRGRCIVDEAMLTGESVPQMKEPIEDLSPDRVLDLQADSRLHVIFGGTKVVQHIPPQKATTGLKPVDSGCVAYVLRTGFNTSQGKLLRTILFGVKRVTANNLETFIFILFLLVFAIAAAAYVWIEGTKDPSRNRYKLFLECTLILTSVVPPELPIELSLAVNTSLIALAKLYMYCTEPFRIPFAGKVEVCCFDKTGTLTSDSLVVRGVAGLRDGKEVTPVSSIPVETHRALASCHSLMQLDDGTLVGDPLEKAMLTAVDWTLTKDEKVFPRSIKTQGLKIHQRFHFASALKRMSVLASYEKLGSTDLCYIAAVKGAPETLHSMFSQCPPDYHHIHTEISREGARVLALGYKELGHLTHQQAREVKREALECSLKFVGFIVVSCPLKADSKAVIREIQNASHRVVMITGDNPLTACHVAQELHFIEKAHTLILQPPSEKGRQCEWRSIDGSIVLPLARGSPKALALEYALCLTGDGLAHLQATDPQQLLRLIPHVQVFARVAPKQKEFVITSLKELGYVTLMCGDGTNDVGALKHADVGVALLANAPERVVERRRRPRDSPTLSNSGIRATSRTAKQRSGLPPSEEQPTSQRDRLSQVLRDLEDESTPIVKLGDASIAAPFTSKLSSIQCICHVIKQGRCTLVTTLQMFKILALNALILAYSQSVLYLEGVKFSDFQATLQGLLLAGCFLFISRSKPLKTLSRERPLPNIFNLYTILTVMLQFFVHFLSLVYLYREAQARSPEKQEQFVDLYKEFEPSLVNSTVYIMAMAMQMATFAINYKGPPFMESLPENKPLVWSLAVSLLAIIGLLLGSSPDFNSQFGLVDIPVEFKLVIAQVLLLDFCLALLADRVLQFFLGTPKLKVPS

SEQ ID NO: 4052 - DNA, 354 bp, Homo sapiens
  misc_feature (224)..(224): n is a, c, g, or t
ttttgctgggaggagctgtttaatcgttcagggaggctgatagctgctgggactcactgggctcatgcgggaagggatggggtcacaattcatatttacagtgaccaaagggcattttcctaaagtacccacaaatagaagtatatatatatatttatatatatatttatatatatatatagagtacttcattaaatgttctgttgaaggaatgcagaaacttncagtctcctccccagcagctctgttccatccaatcacagaacccttagagcgcaacagcccggagccgtggccttgcctgtggctggaggagttggcaaagcgtggggcccgcggatgccagcacaggct

SEQ ID NO: 4053 - DNA, 381 bp, Homo sapiens
tcaacggagcagatcaagagagtgattacatgtcagtctaggagtcgttgatgattcaaaagcccaagacagagaagatctcattccagagagagaggcagaaggtcaaggagcacatcaaaaacgagagacagaaagaaagaagacaaaagaaacattcaaaaacacccccagaaagttacagcacggctagacattatagaagtacaaacagagagacaacaacgaagaagcaggagtggaacaagatctcctaaaaagtctcggtgtcctaaaagaaaattgtctctctcaccatcccccgggaaacataaaaagaagaagaaagataaagagagaaataggtatgaaagagaacgatcaacaagcaagaagatgagg

SEQ ID NO: 4054 - DNA, 252 bp, Homo sapiens
  misc_feature (70)..(70): n is a, c, g, or t
  misc_feature (125)..(125): n is a, c, g, or t
  misc_feature (164)..(164): n is a, c, g, or t
  misc_feature (198)..(198): n is a, c, g, or t
  misc_feature (205)..(205): n is a, c, g, or t
gtggcttgggagagcttaatgaaaagagaacggagaggaggtgtgggttaggaaccaagaggtagccctnggggcagcagaaggctgagaggagtaggaagatcaggagctagagggagactggngggttccgggaaaagagcagaggaaagaggaaagacacngagagacgggagagagaagaagagtgggtttgangggcggntctcagtccctggctgctttggcatttggggaactgggactccctgt

SEQ ID NO: 4055 - DNA, 226 bp, Homo sapiens
gccagagcgtgagccgcgacctccgcgcaggtggtcgcgccggtctccgcggaaatgttgtccaaagttcttccagtcctcctaggcatcttattgatcctccagtcgaggtgagtctccatcccgggaccgggagcccttcgcgcccagctccctctccccgggagccgggacggctcccgggaccccagcggccccgcgttcctcgagccccgcgcccgctttg

SEQ ID NO: 4056 - protein, 506 aa, Homo sapiens [sequence omitted]

SEQ ID NO: 4057 - DNA, 459 bp, Homo sapiens
  misc_feature (22)..(22): n is a, c, g, or t
  misc_feature (25)..(25): n is a, c, g, or t
  misc_feature (436)..(436): n is a, c, g, or t
gtcatggctgccgcggagggcntantttgttgcggttggctacgcttccagctcaccaaaaacagtctcaaaaacaaccatttcctctctgctgagagccagggaaggcgagctctgcgcacacgggcgtccctgcagcagccactctgctttccaggaccggccaactgccctggaggcatccacacaggggcccaggcagcacagaggagctgtgaacccgctccacaccggccaccctgcccggagcctggcactcacagcaggccggtgctaaggagtgtggcgcgggctcgactcccactgctgccggcctcccgagtgactctgttttccactgctgcaggcgagaagaggcacgcgcggcacaggccggcctccgctttcccgggaagacggcgcactcctggccctgggttctttgctgctgcccacnctctgctccctgggaatgggccc

SEQ ID NO: 4058 - DNA, 498 bp, Homo sapiens
  misc_feature (455)..(455): n is a, c, g, or t
aagccactctcccgaaaccagagcgatggggccggctgtgagtagaacggggatcgaaaagaggaaaacaagggcacgaagaccagcgagaaagaagaggacacctgggaaaggcggaacaggaaagacggggaagggaaaagaaacccatagcaggtggaaaccagatctagagcaacaccgtcagttcacagtttgtttttctagaagagaagaaagtacctgaggattgctcttttttcctaccgttaatgaaaactacttttgtcttcatcataaaagaaaaaactaaggggaggtaaaggcagtctcctgttttattagggggagaggtgaagggaaatccaggctcactttctgaataaagcccactgcctgggtgcacagagcagaacccatcctggtttctggaagacaccatcccttttcagcaggaattcccagccgggagtcgnctggcaacagttcctattttttataatttaaaatggtatggtt

SEQ ID NO: 4059 - DNA, 462 bp, Homo sapiens
cagaggtgggaggccagctcctagtgtacaagggtcaggcggcacttaggtgagtagaacgggccagctggggcccttggtgactggggaggcagtgtcccaggtagtgttgccaccgaagagccggcgtagccaggtggtcattcttcaagagaagctgtggatctggacttttatgtgaaatctaccaatttttaaaggttggctcagggtataaaccacccaggccaaagaaaacatgtcggctgggtggggccgggccaggggccccagtcagagagttctgctgaggccccgccgtggacaggacctcggaaatggtgggcgtaagccagtggttttcaaagtcatcattccatttgctcctgagaggcaagcaagagaaagaaaattcttggacccatttcagagtctgggacactgaggctgaggtgggttcctggcaggctcaaagttacagct

SEQ ID NO: 4060 - DNA, 3537 bp, Homo sapiens
cgttatttgcagtggctttggggactcagcagtggcaagtccctgtgcataatgtgaacctgcagacttcaagatggggcccctcctgcacccactaacatgtctgcccttttttgtttttatcctggaacaagtggagaaatggcagagctggctgactctggggacccttccctttttcccatggcttcatttcttcctcaccacaactaattcggggagctgagaagtcacacagggtattcctctcccttctctgatgttattaattaatagaccagagaataaggttgcagatattacatttgttgtgtttttgtgttttgtttttttttttaaggaaaatcccaaacaaagcccagcatgatttgagaaaagaggatgttttcccagggaaaataatttttttaacctgcctgagaatgatttatttatttgttggaggccattggtcagacagcctggagcttgggctgtggaagatttcaaaagcatagggctgtggtctctggaaacctattacagcctgcagctgtgagctgagccagtgacgaggtccctggaaactcaggaaggctgacaggtgggccttggggtattggtttgtggagaaggaagcattctttaggctgcggcactccttatagtttcccacccaccgagtgacattcaggcagaaattgagctcaggagacagccagccttcccacatcccacttcacttcccggtccacacgtaaagcagtgtgtctccaaggaggcagtgagcaattcccaaggtccccgtgttgtgagaagcgcgctgctttctccctttgcagggaaaaaaaaaggctttcctggtgagatcatgagtccttccggcttcatttctcattgtgggtttaacttctaaaacgcaaatggagtttagagaggatgagcagaaccacaggacctgcccccatctctcactcactgcaattgcttctactctgggcacaagtagggtgtctgaagaccatgtttccctctggttctctagtttgcagataacacagaagacactggctagaaccttaagctttctgccaaaaagatgcagagagcagggcagtagctactggcagtggggtgtgaataaagagtcctttcacaaccaagttcactgaggatttggagcaccagcttcccagcagtatcgaggggtggagaggtgtacattcaggtggaggggtacatctaggggtggagaggtgtacattctagaaacagctgttaacacactccactttaaagacagcaagctagacctgcaggatcaaagccacacactgtggtaggggttacaaatgtttatggggcccagaatactagcatagatgcgtgaaatggttggtgtgaggcaaaagggcatggtgggggcaaggatggggactgtggtcttactggcatgcacgtgacctacccagaatgagcagctgctactcagccccaacctgtcattgtttgtaaaaatgtaagcacagtgtagtggaatcttccaatttggaagggaagccggaaatccagatttaatggaaaaaatctgatttttcaacgtcgggttttttgtttgtttgtttttgttttttttaacagatagtgggcaaagaaaaattccactgttccacgtgtacactgccagcaacctctgctctctggagaggtggtttaaagtgagattatgcattgccctggtagaagaggaaaaaagccagcatcaggtcagggcaaaaataacagcccatgttgaactcggaatggggacctcttgctaagtcattccactcctcaagagaccattccacagaggggggatggatcattcagctctcctggtcccaagattgtgctgaagggaagaaggaatagaatctggagatctggactgctgccccttagatatgcagaggtccacatctgcctggggctacagcttgtgggactccatcaaaccaggccgaaatggcaaagacagtctaggaggaggaggaggtagggtgtgaaacagccaggctctctccaaatcccaagtgttgacacagccatcttgtcccatccctggaagcctctttggaaaccacatagagctgtgctggctcacgggatgtcctgtttgcttctgcctcagttaccttactttgcccatgggtctaccacaggcgctacctcattgtgtctgctgagaagtttacctgggaggggggaacaaagttgtccaaatctgcttgagctgaatgtatgatctatgcaaattctctctctcctctctctcttcctctctggctctcttagaagtttttttgttttgttttgttttgttttgtgtttaccttgcaaacaagatactgtataggaccctcttaagatggaggagggctttcttgcgccacctgtgtctacccctcacgttgtctttggctctggtcttaccaggcgtatgcagggagaaagtgacctctcttccctctccacttggctgggaatattccaactgcctctgcctacagataccaccagaaagcgggttctgcaccttgtcatccccctccctaacgtcatctactccatccctcatgttcctccaacttgcttctcccatccctccttcaaaaacaaaacaaaacaaaacaaaagccttaggtttctcctttttgaaatgtggccttaacattatttttgggaagctgaccatccatcctttccctcccatctccaccaacatcagagaagacagcatcgtgaagcttctgtggcagcctcctaaggaaggggctgccaatctgtagttggcagatgctataggaattgcttacaaatgtcgtctttaagaaaaatgttcttatatttttcctatgggcaaaatgaaggcttgggtgctcatctaaagctcagccaactcctgaagcactctctcagagcatactgctgctgtaatgggctggcttaattatcggcagagtgcttgaaaaggctttgcagacctcccctgcccccaagactgggtgactttatatgtacttcattcaagggtaaatcaggagacgttctccatttatctcttcgtccttcctgcctggaaagtgatagcactaaatattcccagcagatgggtagtgttctcaaaggaatcaccctttccctaccttcagactctattctttacccttccattgctccagtgctgatggaggccaaagacaaccccagggttttcataggaaattcactggaattgtgcgcaattgtctttgtagtccttttgccttttttttttttaaatattatgttgtcaatagcatttgtttgggtatttgttttagaggcctcactctaagttattaccgtccccttcattgttttcaaagacatgtggtgatatagtttttaaaaataactattttgttatagatcataatatgcataaaactgtacagaaatattttgtaatgtgttgattttaaaaaaagaatctgtaaataaagttttaaaaaaagaaaaaaaaaaaaaaaaagg

SEQ ID NO: 4061 - DNA, 350 bp, Homo sapiens
gatttgctctgccagcagctgtcggtgccgcgctcgacaccgagtcctagctaggcgctcacagaatacgcgctccctccctcccccttctctgtcccccgcctctcgctcaccccggcccactccagcggcgactttgagggattccctctctggcggcctctgcagcagcacagccggcctcattcggggcactgcgagtatggatctccaaggaagaggggtccccagcatcgacagacttcgagttctcctgatgttgttccatacaatggctcaaatcatggcagaacaagaagtggaaaatctctcaggcctttccactaaccctgaaaaagatatatttgtgg

SEQ ID NO: 4062 - DNA, 380 bp, Homo sapiens
ttttttttttttttttttttttttttttgggtaaacattttatttatggggccctctgaaacgagcaacctatgaaggcataaaataaaaagattttttttttaacccgggagggaaagctagatatatcaattaggaactgattcatggggggatgtcccccacatgttgaaagaaagccaaaaaggcgcaaaccatctttccttaattcaaaggacaaaaacaaaaaaaaccccagcatcttcttgctatgaggcaataaggcactgctaaaaaacttgagccccaaaatgattctctacaaattccttcctttttatactgcaaatactgcattattatattcaaacctttaaaaactagggaatacttaagattta

SEQ ID NO: 4063 - DNA, 470 bp, Homo sapiens
cttttaggaatactcagggtggaacctactatacaaaaccatcacactttgtaaataaaaagtatcagatacttgacttctttatccaccaacaaaaaaataaattattttcttgttttgtaaaagacctacaatgggaaaaagaattatatctcataattgtacaggaaacaaaacccacatcggtttcttgaattcaatttggcagttagaaatggttgggcaagatgaaaaacttatccagtgaactcaactttaaatattatattaatggctctgaacaacaacaacaacaacaaaatagcctgattacaaatccacacatttgtacagcacggttggagaaatttaaaattacacacagcacatatattatctatagaaacccccatacacctatggggacccctacagaaagtcactaagggctcgctatgggatttggtccataacttaacttttgaaagctc

SEQ ID NO: 4064 - DNA, 480 bp, Homo sapiens
ccgtcaccctctgcacttagttggtagaagtcaaattaagtttcatatcttcatgatattttacttattgcttaatgtagggaataagcgaattccttagagaagaactgggcaccaagttaaaatggaattacaaaatcctacgctgctgtaatccacttatacggggtacattggacctgctagagtgatggaatctttattactttttacaacaaattgtccttgaaaaactttttatttgctcccaaaaaggcttatttccatactaagtctaatattaagacaaaattgcttaaagcattatggatattcttctaaatgtaaatatgtttggtgaggatgttgaagctcaaagctaaatagaagctgaaaacggttgatttctccatttcaagagacttaacaagggagaacacacaaacacaaacattattctcctcacactattagaatcttaatgctcaaaaacaatacctg

SEQ ID NO: 4065 - DNA, 442 bp, Homo sapiens
  misc_feature (338)..(338): n is a, c, g, or t
  misc_feature (345)..(345): n is a, c, g, or t
  misc_feature (352)..(352): n is a, c, g, or t
  misc_feature (380)..(380): n is a, c, g, or t
  misc_feature (392)..(392): n is a, c, g, or t
  misc_feature (397)..(397): n is a, c, g, or t
  misc_feature (435)..(435): n is a, c, g, or t
attattaaactgaggtgatgcatgtaattgtgaatttggaatttgttccaacttaatggcttgcagtaccactttgataaaaatcagcatcaaaacattcctagtgttcaaatactgtggcattttccattgaaaattgctgaattttgcttattttataaatcacattagttaatacagtggtctttgaatactgtttcttaatgactcattttagcccctattttcaggggtagtgagagggtgtgggctccactaatttccagtttgtttttctattgtttgcccaactgtcagattaaatagccttataatattttgttgtaatcataaatgcngggttangtccccngtaggggaacttgtggggagagtaaccngatgccgggggnagccngaccctggggcccttgaggtggtcagcccgttttgggnaatgggg

SEQ ID NO: 4066 - DNA, 481 bp, Homo sapiens
caatatgtgtttcttgaacacctaccatcctggaacccggtaccatgctttgcagatctttattatagcaaatggtttcttcttcttttattctttcctttttttaaaaaaaaacctcctttatccaaaaaaaaaaatgtaagcatctattatggtgcccgacatccaacagaaaaacgattttttttactttcaattcagaaaacatctatttacctgctgtactatactaggaactagggataacagaattgaataatatatagcctttgaccccaaggagctcacaggtcatgaaagacccacatgtgaacagaaaacaaatggcattttgtccataaggcagagatggccagctgttcaaagatttgtgcactcctttcaatatgcaaaattattgctgggatgagaccagcaaggatctacatttcttgccccaacccctccagttgtctaaatgtagcagacaacagaatgagct

SEQ ID NO: 4067 - DNA, 733 bp, Homo sapiens
ccacccatctcccccccccccccccccccccctgcgctagctcgggccgtcggtggtaatcggccgaggcggaactgctgctccggcggctggaggcgtctgatggcggcctggacagcgccgagttggcggctgagctgggcatggagcaccaggcggtggtgggcgccgtgaagagccttcaggcgctgggcgaggtcatcgaggctgaacttcggtccaccaagcactgggagcttactgcggagggcgaggagattgcccgggagggcagccatgaggcccgtgtgtttcgaagcattcccccagagggcctggcccagagcgagcttatgcgactgcccagtggcaaagtgggcttcagcaaggccatgtccaacaagtggattcgggtggacaagagtgcggctgacgggccccgggtgttccgagtggtggacagcatggaggatgaggtgcagcggcggctccagctggtccgggggggacaggctgagaagctgggggagaaggagaggagcgagctgaggaagaggaagctgttggctgaagtgactctgaagacctactgggtgagcaaaggcagtgcctttagtaccagcatctccaagcaagagacagagctgagcccagagatgatctccagtggctcttggcgggaccggcccttcaagccctacaacttcttggccacggtgtcctccccgaaagcggccacttcacccggtgtcag

SEQ ID NO: 4068 - DNA, 1867 bp, Homo sapiens
gggctcacgttgtacgttcacatcaggtcccggcccgccggaacctgggcgatccacgatgccgagtttgccacgctgcgacagcccataggcttgcccccccgggcattcgggtggactacgaacacaaactgaagccctaggacttgtcgcccgtttgcgctctcgccgaggcacaggctgctcgcggaccaccctgctccgaaaactaagaggtaggtggtagcccattcatctggttactgatactggccggcatcagtggactgtcggcaggtccttgagcaactggtgtgtgaaatgggacggacgtcaaaggacaagcgggatgtctactaccgcctggccaaggagaatggctggcgtgctcgcagcgccttcaaactgctacaactggataaggaattccaactcttccaaggcgtgacacgggcagttgacctgtgtgcagccccaggcagctggagccaggtgctgagccagaagatcgggggccaagggtccggccacgtggtggctgtggacctgcaggctatggctccactaccaggtgtggtacagatccagggggacatcacccagctgtccactgccaaggagatcatccagcactttaagggctgccctgcggacctagtggtgtgtgacggggctcctgatgtaaccggtctccatgatgttgatgagtatatgcaggcccagctcctcctagctgctctgaacattgctacacatgtcctgaagccagggggctgctttgtggccaagatattccgaggccgggatgtgacgctcctctacagccagctgcaggtcttcttctccagcgtgctgtgtgccaagcccaggagcagccggaactctagcatcgaggccttcgctgtctgtcagggctatgaccctcccgagggcttcatcccggacctgagcaaacccctgctggaccattcttacgacccagatttcaaccagctggatggtcccacccgcatcattgtgccttttgtgacctgtggggacctgagctcctatgattcggaccgcagttacccactggacctagagggcggctcagagtacaagtacactccacccacacagccccccatctcgccaccataccaggaggcctgcacgttgaagaggaaggggcagctggccaaggagatccgcccccaggactgccccatcagcagagtggacacgtttccccagcccctggccgcccctcagtgccacaccctgctggcccctgagatggaagacaatgaaatgagttgttcaccttaacccattacgctggcaaactgatacaactcagaaactgctcaatgtcaggaaaaccggaacttgttgatgaacttgttttcaaaatatcatctcatcaacgaggcctggacaaacaagccctgaggagggatctgcaacaaccctgaagacaacaaggaaagaaaccatgaaagtctgtctgtactgcagtgggaattcttgagtgaggtcttacctcttctttaaacctcttcaggagtgtcctgattatgtccagaattttccctaaaggcagggattcttaacctggatagaagccaggggtaaccatgaacttgatggaagaaaatgttacatctttattttcagcaatgaaactgaaatttagccttactcccaagttataaatgctggcaacaaatcacagtagtaaaagcagtacctgggattttcccaccaatacaaaccagttacagcaactgtaatgtaacataaaaagggcatcttgaagtattgttcatatttgtcacctcttggaatgatagcagatcctgtaagttgatgtattaattaaaaagcccatatattactgcatctc

SEQ ID NO: 4069 - protein, 329 aa, Homo sapiens
MGRTSKDKRDVYYRLAKENGWRARSAFKLLQLDKEFQLFQGVTRAVDLCAAPGSWSQVLSQKIGGQGSGHVVAVDLQAMAPLPGVVQIQGDITQLSTAKEIIQHFKGCPADLVVCDGAPDVTGLHDVDEYMQAQLLLAALNIATHVLKPGGCFVAKIFRGRDVTLLYSQLQVFFSSVLCAKPRSSRNSSIEAFAVCQGYDPPEGFIPDLSKPLLDHSYDPDFNQLDGPTRIIVPFVTCGDLSSYDSDRSYPLDLEGGSEYKYTPPTQPPISPPYQEACTLKRKGQLAKEIRPQDCPISRVDTFPQPLAAPQCHTLLAPEMEDNEMSCSP

SEQ ID NO: 4070 - DNA, 427 bp, Homo sapiens
  misc_feature (194)..(194): n is a, c, g, or t
  misc_feature (285)..(285): n is a, c, g, or t
  misc_feature (336)..(336): n is a, c, g, or t
tttttttttttttttttaagcacatgggaggagtgactttattcacaataggtaaaataaacataattaatttttaaaaggagaacaaatgaaattaagatagataattgcaataatcaataatattgttggtttaattcataaattaaagttcaagcctgatgccataactcataggtcttatatttattttncccttatcctgttaaaagatgtgtgagggcagcccgaggatataatttttgcctattcttttctcatccatgagggcatggaaatatcagnccctaccgaggtaatgtggggggcaaatctatttccagtttaaaacttacngtggatttagggacagacggatggtattatttcacaatatttgtggccacaatacacccggggggccattatccaatgggggccaaatccc

SEQ ID NO: 4071 - DNA, 524 bp, Homo sapiens
  misc_feature (82)..(82): n is a, c, g, or t
tttttttttttttttttcatggaggcatcttctatattatggaaatctgaacaattgatataaaacatccttcgaaggcaantgatggaaaatgacttacttcagaaaacatgttaatatgtaatttctaaagacccagttctggctgcagcactatcatttgctatatgaatctgcacaggctgaattcactgctctgagattcagtgcattcatctaaaatgtattatatgcattattcacctcgttggggttgttttgaaccccaactgaagctcaaacatgtcaatacatcataacgctaaagcactttttaattcttgaaactgttcttaacaaacagtatagatttgagttgtttatactgtcatagagtgaaaactatatgtgtgtttcactaaaggtctgagggaaaagataattcagtatttcccactatcaaagcctcccatttcagaaggcatttggctcaaaatattgaaatttcaaaagttgggtgaaaacttggatcactattttcttat

SEQ ID NO: 4072 - DNA, 5656 bp, Homo sapiens
gctttgtttgatggtgatccacatttatccacagagaatcctgccttggttcctgatgctttgctagcctcagacacttgtctggatataagcgaagctgcctttgaccacagtttcagcgatgcctcaggtctcaacacatccacgggaacaatagatgacatgagtaaactgacattatccgaaggccatccggaaacgccagttgatggggacctagggaagcaagatatctgctcatctgaagcctcgtggggtgattttgaatatgatgtaatgggccagaatatcgatgaagatttactgagagagcctgaacacttcctgtatggtggtgaccctcctttggaggaagattctctgaagcagtcgctggcaccgtacacacctccctttgatttgtcttatctcacagaacctgcccagagtgctgaaacaatagaggaagctgggtctccagaggatgaatctctgggatgcagagcagcagagatagtgctttctgcacttcctgatcgaagaagtgagggaaaccaggctgagaccaaaaacagactgcctggatcccagctggctgtgctgcatattcgtgaagaccctgagtccgtttatttgccggtaggagcaggctccaacattttgtctccatcaaacgttgactgggaagtagaaacagataattctgatttaccagcaggtggagacataggaccaccaaatggtgccagcaaggaaataccagaattggaagaagaaaaaacaattcctaccaaagagcctgagcagataaaatcagaatacaaggaagaaagatgcacagagaagaatgaagatcgtcatgcactacacatggattacatacttgtaaaccgtgaagaaaattcacactcaaagccagagacctgtgaagaaagagaaagcatagctgaattagaattgtatgtaggttccaaagaaacagggctgcagggaactcagttagcaagcttcccagacacatgtcagccagcctccttaaatgaaagaaaaggtctctctgcagagaaaatgtcttctaaaggcgatacgagatcatcttttgaaagccctgcacaagaccagagttggatgttcttgggccatagtgaggttggtgatccatcactggatgccagggactcagggcctgggtggtctggcaagactgtggagccgttctctgaactcggcttgggtgagggtccccagctgcagattctggaagaaatgaagcctctagaatctttagcactagaggaagcctctggtccagtcagccaatcacagaagagtaagagccgaggcagggctggcccggatgcagttacccatgacagtgaatgggaaatgctttcaccacagcctgttcagaaaaacatgatctctgacacggaaatggaggaggagacagagttccttgagctcggaaccaggatatcaagaccaaatggactactgtcagaggatgtaggaatggacatcccctttgaagagggcgtgctgagtcccagtgctgcagacatgaggcctgaacctcctaattctctggatcttaatgacactcatcctcggagaatcaagctcacagccccaaatatcaatctttctctggaccaaagtgaaggatctattctctctgatgataacttggacagtccagatgaaattgacatcaatgtggatgaacttgatacccccgatgaagcagattcttttgagtacactggccatgaagatcccacagccaacaaagattctggccaagagtcagagtctattccagaatatacggccgaagaggaacgggaggacaaccggctttggaggacagtggtcattggagaacaagagcagcgcattgacatgaaggtcatcgagccctacaggagagtcatttctcacggaggatactatggggacggtctaaatgccatcattgtgtttgccgcctgttttctgccagacagcagtcgggcggattaccactatgtcatggaaaatcttttcctatatgtaataagtactttagagttgatggtagctgaagactatatgattgtgtacttgaatggtgcaaccccaagaaggaggatgccagggctaggctggatgaagaaatgctaccagatgattgacagacggttgaggaagaatttgaaatcattcatcattgttcatccatcttggttcatcagaacaatccttgctgtgacacgaccttttataagttcaaaattcagcagtaaaattaaatatgtcaatagcttatcagaactcagtgggctgatcccaatggattgcatccacattccagagagcatcatcaaactggatgaagaactgagggaagcatcagaggcagctaaaactagctgcctttacaatgatccagaaatgtcttctatggagaaggatattgacttgaagctgaaagaaaagccttagttggccatgctggaagaagaggatgcttttctggttcatggttctgttgaaacatatctacctgaaagagacagggctgatgttacctttttccactttgcactacctggtgccattctaaatttctaaggggaaaaatagaaagtttgtttactcttaagatattttatgaaattgtgtgtactttcctattttgccaattatgtgcctcaaagattttagttgagccttagcaagaaagtaggaccttccatttcaatacttcattaacacggtgtagtgatactttgtcccttagactggtgtttaccagtaagatacctttaatccactgttaagtatgagtggatttgtttccatagattagctggatttccttttggtgattgcattaggtttaaagtacacaggtctcaactctccccaggaaagtttcccctgtttgactccacctttaaaatcctaagcctgactaggacagccacaaaccacacaaggtgtaaaaccatcatcagctaagtgcccgttttgttcttgtttaccagaatctcctttaacttctcaaagggaagccgggctttctaatccacgtcaactttattttagttgtcaaattgggcattatattttatgtaaattggtcttttaacatcattttcctgatgaatgttggtgaccaccacattgtgaaatttaagaatccgtgttgcatgtttggtagctctctgagtttcaggccataaactcagctccagaggttaccttttaagtgccaagaactcaagtgcaaggtggcctactcaaaaatcatttggtagcattcagttattcatgaattcctctctcgcatgcattataaaaagtgatctgctttaaaacaccgtaatctgatcataggcttaaaattaaatatgagtattactttcatgtacaaaatatttcctttatagtcttcatatgccctttaaaatgccaacaagatttcaagtctgtaggcctctagtgaggtggggtggcaaaccacagctaagtctcgctcaccactgcaagctaagaatggtttttacattttgggttggaaaaattttttttgaatatttcatgacacatgaaaattattcaaatgttagtgccgataaataaagtggtactgaaacacagccacacaaacttgtttttgtactgtctacagctactttcacactacagccgcagagctgagcagttcagcagaccgtatgtcccacaatgcctaaaacattgactatgtttacagaaaaagtttgctgacccctgctctagcaaacgcatcctttcctactccaccccaatttgtatttagatagtttctctaacagaacggacaaatgaggctgcaaactaatttatttttgtcaaaaatcaatgttttgacatccacagacagtgaaataaaagaaatggcttgctgaaaaacatgaggagtcctagccacaaaatcactgcttaggttgcaattgccaaaatgaagccttcttagaagcacttctttagtatatacaggtgttggctgaagtccgtgcctcactctgggaaccattcttagtctccagtgtctcctattacaaagaagctggcagaaataaaaatgaaggggtgagagcggttccaccctagtctcatggtggaaaattcattggggagagctgtccaggatatttggagtcctgggtagaaggagcttgtaactactttaaagtcgacatctttgcacaggtgattgagtttctctgacctcattgcttcacctctgtctcctcccgtccttccgcacgtgcccacacacacgcagttcagccctctttcctccataagcctccatcgttttctcttttctcctcttgatcctttcaagcgagtatcttgttgaattgtatgttctgttggatctcctccttcataacatctggcttgttggacagaaaaaccctacagcccaccccctcccacagcccacctccacttttgaaagcccaaattacacctctcccagaacacagtgttgacgtaaatacagttacccaatattcctgtttgttcacctatttgctactttcactcagtagcatcccattttgtaaaatgaattccatggtcaccctgtcacaggaagtaatgaaaaatccagtgttcagtgtagtggtgcaaacctgagggcatagagctgttcatagagggctcttgttatagccaaacagacacagcaacaatctcaccatttatatatatatttttaacttgtccagctcatctatggaaaactactcaggtggtatgctgtttgaagcctcatcttcctacatgaaaattatgggcatttgtcccaatgattttgtttcagctgttctgtaggctgcataaccactctgatatttaggtatctgctattttattatcttaaaagacaaattaatttaattgcatgtgctagggaaaagctaccatgtacattcaccccaagtaaatagaatcctagatgaatcctagaaaaataatccctaagcagataggtagacagaggtaaacattcacatgatttagctctctagctcttgcactctgaacattcttgctttggttctgacttctgggaactgctttgcatttctcctatagatctgtagttaagggaaccaaggggtcattggggcaaaagcattgtttctcaaagctccttgattaagagaaagaacagaaatttgcacagaagatagtgtcaaggagtgagaaagtttgtttgagggcagtagctcagtgtggaagaaaatcctgaagtttctgttgaagccatacaatgttctatggggttactctctaagacattctctgaggtgtgtgaggaagtcactactcctagcctttgttaagatgtaattttaaatattcagttatggtactatgtttgcaactctcgtcttatcacaatgcctcagtagtttgttcccttagaaacatttagatgtgcacaaattaatcttttatatatctaaaggtttttctatcatgcattggattgctcagaataaagtgtctgttagacttcgttttggtaaataaattctccataatgtagattaataatataaaagtctttaatgacacaatatatctatatagcctcactgtataattcagaaataaaaattgattctgc

SEQ ID NO: 4073 - protein, 820 aa, Homo sapiens
ALFDGDPHLSTENPALVPDALLASDTCLDISEAAFDHSFSDASGLNTSTGTIDDMSKLTLSEGHPETPVDGDLGKQDICSSEASWGDFEYDVMGQNIDEDLLREPEHFLYGGDPPLEEDSLKQSLAPYTPPFDLSYLTEPAQSAETIEEAGSPEDESLGCRAAEIVLSALPDRRSEGNQAETKNRLPGSQLAVLHIREDPESVYLPVGAGSNILSPSNVDWEVETDNSDLPAGGDIGPPNGASKEIPELEEEKTIPTKEPEQIKSEYKEERCTEKNEDRHALHMDYILVNREENSHSKPETCEERESIAELELYVGSKETGLQGTQLASFPDTCQPASLNERKGLSAEKMSSKGDTRSSFESPAQDQSWMFLGHSEVGDPSLDARDSGPGWSGKTVEPFSELGLGEGPQLQILEEMKPLESLALEEASGPVSQSQKSKSRGRAGPDAVTHDSEWEMLSPQPVQKNMISDTEMEEETEFLELGTRISRPNGLLSEDVGMDIPFEEGVLSPSAADMRPEPPNSLDLNDTHPRRIKLTAPNINLSLDQSEGSILSDDNLDSPDEIDINVDELDTPDEADSFEYTGHEDPTANKDSGQESESIPEYTAEEEREDNRLWRTVVIGEQEQRIDMKVIEPYRRVISHGGYYGDGLNAIIVFAACFLPDSSRADYHYVMENLFLYVISTLELMVAEDYMIVYLNGATPRRRMPGLGWMKKCYQMIDRRLRKNLKSFIIVHPSWFIRTILAVTRPFISSKFSSKIKYVNSLSELSGLIPMDCIHIPESIIKLDEELREASEAAKTSCLYNDPEMSSMEKDIDLKLKEKP

SEQ ID NO: 4074 - DNA, 1094 bp, Homo sapiens
acagaaagttgacttaatatagatatctataaaaagcaactgcgtgggggtggttatatgtagaacagaactcaacaagtaaccaaaaatacaggatgactctgacatgttggcgaaatagcttatggctggacttgagtttggaagttctgtatgtttgagggcatccgatgtcagagtccaaccggatcctaaccccagctcttgtcactaatctgtaaacaataatttcaagtagtatttagcaacttttaaactattaagaaattgaagcatcgatcattgtcctgtgcagacccaaactttgaaagagtcttccttaggtctaagcagataaaggcacttcatagtatgtttctaacattaacaatttttgatttaacaaaaaaaaagttaatataaatagactggtgttagctattatttggttttgttacattttgaacatacgaacaagtcatcaattttaagactagatttgtgtgatttgttaagaagtagaattatggctgggcgcagattgctcatgcctgtaattcccagcacatttgggaggccaagacgggcggatcatgaggatcaggagattgaagaccactccatggaataacatggtgaaaccccgatctctactaaaaattacaaaaaaattatgccgggcgtgagatggatgtgcgcatgtagtcccagctagtcgggaggctgcaggcccggcagaaatgaccgtgaacccggggaaggactagtgccttgcctgtgagacagaagatcgacacctatatgcaagatccggggcttggagagacagcagcgaagactccgggtgatcaaaacaacaaaaagaggaacacagtagcacgctgacaatagagatcgcctttacctccatcgtacagcacaactaagccacccattttacgcagcgaaatggcaacgcaaaggggaccagacatggaaatgtaaccccggtagatagaggaacaagaagggcgaactaacacagcgcggggcaaactatcataagcaaccaggatgagcgaatagaaaaaaaatcaacgaaagtgcgacaaggaaaagacaagaaggaaggaaac

SEQ ID NO: 4075 - DNA, 475 bp, Homo sapiens
  misc_feature (170)..(172): n is a, c, g, or t
aaaagatctgggctgggttctggctcagccactaactcacagtgtcactacggatgggtcactttctgtgttggttctctgtgagtaccctgtgctttcccagccaccgggtctcagccacgccttccctcatccttgctccccatcttttaggacaatagccggacggnnnaagcagttgttaaaccagaggtttgagagcctgtgcgcagtgctggaggagcgcaagggtgagctgctgcaggcgctggcccgggagcaagaggagaagctgcagccgtccgcggcctcatccgtcagtatggcgaccacctggaggcctcctctaagctggtggagtctgccatccagtccatggaagagccacaaatggcgctgtatctccagcaggccaaggagctgatcaataaggtcggggccatgtcgaaggtggagctggcagggcggccggagccaggctatgagagcatggagc

SEQ ID NO: 4076 - DNA, 558 bp, Homo sapiens
ggctggggcggaggggcgtggcggggccgcgcccggaccgcatctccccccacgggggtcggtgcctggggatcctgtccgcatccactgcaacatcacggagtcataccctgctgtgccccccatctggtcggtggagtctgatgaccctaacttggctgctgtctttggagaggctggtggacataaagaaagggaatactctgctattgcagcatctgaagaggatcatctccgacctgtgtaaactctataacctccctcagcatccaggatgtgcgagatgctggatcaacccttgccagcagagccagtgcacacaggaagacgtgtcttcagaagatgaagatgaggagcatgcctgaggacacagcaacacttagcatcacctatgaccttgaaccgcaggcaagagcccagcctgagcggccaagaaatctgaacgatgactggcattggacaagaaaacttggccatcctagagaaacttaaaagaaccagaggccaagattacttaacctggtgccgctgtctgggctcggtgccacggcccacctg

SEQ ID NO: 4077 - DNA, 301 bp, Homo sapiens
acaagttcaactatctgcctatccatgtgaaacatataaaactttagaacggtggttctgaatgctgactgtgcactgtggagttctttaaaaacagatccccaggctccacaccagaggtgtctgacttgggtctggggtgagcttatgcttgaagctgtggctgatgttttttacgagccgtaggtgcatataaagcacagtctcatgaatcggctttggaatacggtttagaaaaaaaaaacactctattgttcaaagatatatctttttcagatatttatattacttctataacaaa

SEQ ID NO: 4078 - DNA, 551 bp, Homo sapiens
tctgttttaaattcctacctcaaatacgaaataatttatttagggttatgttacatacggagtgaaacaatacagaaaagcaaagggctaataatgacaggatttgaggagtgggtgggaggaaatagaatcacagcgggacacagggaggactcgaaagtattggttatgttctatttcctagtgtgtaattcttttattgttctttgtatcttacatatttattatagactgtatataagaaatgttttagttttaaaaaatcccacctctttggagcccaatgagagacacagcttctggcaggcactgatgaaatggaagtcacacctgccccccggaggcaaagcctttcactagttgggcctcctgcagatgttcctcagttctgtgctggtctccccagagctgcaggacagctggctgcacccagccctgggcatccttaggcttcctggctcctggcagattgctcctgtacggactgccacagagctctgatgttgccctgaccaaagccagtggccccctgcctctgaatcagctccagg

SEQ ID NO: 4079 - DNA, 410 bp, Homo sapiens
ttctcctttatgtgtttctttattcatttgtcatttcacttattcatttagtaagtactcatgaacaattctttgttttttcggagaaaacacagtatgatcagcccatcaacaacccagaatcgtaatacaattaaatgcaactatacacatgaacctgaccccgtgggggaagagcctagttttaggtcttttgttttgctttttctttatctgaacatcagtaagatactacaggataaataattcacacgtttttaacacatgctcctcttcagtccatgttgtacctcagtggttctcaactggggacaatgttgccccccacagatgaaatttgccaaagtctgaagaaatgtttgacgtcacactgggaggaggtcaacattggcatctactgagtagaagcc

SEQ ID NO: 4080 - DNA, 378 bp, Homo sapiens
gcgcgccgcttagggactcggatagctagcggccgggagaaatacagtggaaaatgcaaaacaacgaaattataaagcctgccaaatacttctcagaattggaaaagagcatcctgctggctttagtagaaaagtataaatatgtgctggaatgtaagaaaagtgatgcgcgaactattgcccttaagcagcgtacctggcaggcgctggcccacgaatacaactctcagcccagcgtgtccctgcgggatttcaaacagctgaagaagtgctgggagaacatcaaggctcggaccaaaaaaattatggcccatgaaaggagagagaaagtgaaacggagcgtcagccctctcctgagtacccacgtcctagggaagg

SEQ ID NO: 4081 - DNA, 417 bp, Homo sapiens
tttggttttttttttttttttttttttttcattaaaaaatagggctctttattataaattactgaaatgtttcttttctgaatataaatataaatatgtgcaaagtttgacttggattgggattttgttgagttcttcaagcatctcctaataccctcaagggcctgattaggggggaggaaaaaggactggaggtggaatcttttttaaagacaaagtgattgaggcagatggtaaccattattaaaaaacaagaaacaaccaaaaaattggagaaaaaaaccaccccaacccacaactgccctgtccagcccaattcctgacacaaaatactttgtgtttgtttagttgcccccccccacaaaaaccaaaacaaaaacaaaaacaaaaaactgttccaggtaattccatcgctgc

SEQ ID NO: 4082 - DNA, 320 bp, Homo sapiens
ttttttttttttttttttttttttttttttttttttttttttttttttaaaattaataaaaatattttattgaatttcaggaacttggtacttttttaaaacttcaaatctttgcacacaaatcaccactatactttctagaatagtggaagttaggacttcaagattgtcacttatctccttgtgtcacacagcacagaaaccccaagtcctcacactgcccccaccccccttctggccatgactaccaactactctgttattctagcggaggacaatgacggaagtgggtagacgactgaaggagatcagctgtccac

SEQ ID NO: 4083 - DNA, 350 bp, Homo sapiens
  misc_feature (269)..(269): n is a, c, g, or t
aaggtggagtttcactccagtctgtgtgacagagcaagactccatctcaaaaaataaataaatagaaagagagagagaggaaaaaaaaagaaaagaacacttctttatttgagggactttcccaacaccaggtgcttggggatttcttagagatcaccaaccgactccctcactgtgaaattaaaccaagtactggaaacgtaactaaacagcgaaccatgtagcttcacctgactcagtgctgggggcctctaccatctactgtgctntgtgtcatgatgctttttcttgaagtgggtgtggggaagtaccaggggactggcagaagcccaggccctctctacttttac

SEQ ID NO: 4084 - DNA, 661 bp, Homo sapiens
  misc_feature (328)..(328): n is a, c, g, or t
  misc_feature (544)..(544): n is a, c, g, or t
  misc_feature (574)..(574): n is a, c, g, or t
  misc_feature (615)..(615): n is a, c, g, or t
  misc_feature (643)..(643): n is a, c, g, or t
tcggtttgaaaaaatttccaaatgcatcaggaatcttacagtaccaactcatcatttttcataacacagatttatgtcttcaattggagctatttagaaattggcccatagccacctgtaccctaaattttctctgggctacttggaagtatttagagaaatcgtgagatggtagttgatgaaaacagagttcttcatcccaacagtaacagctagataactgactgcttggccaaacatttgactcaatccagggaatggaagatgccattcaaagccagattccagtttgtgttaaggattatatttctgtcatcacatttccttngacagtcccgccaactaaaaatcccccagcaaaagcccagtgattaaattctcctgggagcatatttttccagcttctggaaacaatctgctgcagtgtctcctgtaatatccaaaggatagttccatttctgagggctgatatatgggagtagattactcacaacccaatccatcctcccaccaacaatttgattttgaaatgactatgggaagnctggtggtataaatccccatccactggaangctggtccggtttaatatagcacgtcatagccggactttcnaaatgatgaatggtaccggaatgtgacncggatagcaaatgtcaca

SEQ ID NO: 4085 - DNA, 539 bp, Homo sapiens
caatcttgaaatatatccaggccgcggcagcctttccaaactcccgggcttcccacagaatgcgctcgaatgacactggaaagatttcaaaaatccaggcctccccctgttttaattcctttcttcccccaacagatgttgcaggcctggtgaggaagcccatcgtgtgtgactctcacgccactgacggggtttcgtggtgcggccaaattcctctatggccatccccagcatcagtccttccagattgaggaagccccttccaggaatgagctccatatttaaaggagtggaggagatgaacacctctccaccttggagccaagaggttaagctttcaggaggccccagggctgggcaggaaggattgaagctgtccctctgcccatccctcagagctgtttctctggactttaattgaaggtcgtgatcctcaaaccttcattttaatgactagttgcaacctcttctcttgttcagaccttgacccagcttctcaaccagccagagccactggtttggatttcatcttctatata

SEQ ID NO: 4086 - DNA, 236 bp, Homo sapiens
ttttttttttttttttaagagaattatttaattttattaaaaatctccaatttataaccaaaatatacaaccactacatttaaaatcagtttgtacactcacagttaaagtgctaagaaaaaacatttacaaaaactgacatcagtctactgtaaacaaaataaatctacaagagcagagtgcaaagcacatcagagaatgtgaaattcccagttcatgctctaaccaagtgcact

SEQ ID NO: 4087 - DNA, 397 bp, Homo sapiens
tttttgaggaatcttatttattttatttatttacccaaatttgaactagtctgttgggttgggggaaggaggtggctgctacccccaagccttcccagtgctgacaaccccgggggcaggcgagggcgctcagtccctcaccatcggctgcacatcgcgccctcgggccctgcatgtccctggtgctactgacctctcaaggcttcctccaatctggggtcgggggacctgggaggtgctttacagaccgctaataaaagacgatctgcgtgaacccaccaaggccctttgcaccaagttctttggggctgggaagggaggaggtggggggcttgggccatgggaaacagaggggacaggatcccagctgctcgctgtgcagtcagggaggaggaag

SEQ ID NO: 4088 - DNA, 279 bp, Homo sapiens
cgctctagaggatccgccatcttcgtcacatcaggaagtaagtcactagcaggagggcctaaatcgtctgagccctcctggctcttacgatgctcacttgttttcacaatgcagcaaaatgaaatgccttagaaaaagagtaacattccagaaaacggtgtaatttatgtttcttccttaattgccccatctgtggaggatttctttgctgaacaccacatcaaagggatcttctgcatttaaaatagaagaggcatcatgctgatgggagaagatgcg

SEQ ID NO: 4089 - DNA, 372 bp, Homo sapiens
tggtaggcaatcgttataacattataatacaggcatctctgaatgagaaaggctgggcatctaatataatttctgaaagccaggacagttacatgatccagtgaaatgacataagacaaggaataaatgtagctaaagaatcacaccagaaaccagtataccttcctatatcaactttccactattctctactcatcagatcctaacccaacacccagatttgaaccagtgctcaaaagactgatatgagctaatgtagacaatcagagcaaacacaatgattttcaaaggtaacaggaacttccttggcctagtgcacagagaacatttaatctaccagagaactctgcggagatatggaactaatgcaat

SEQ ID NO: 4090 - DNA, 512 bp, Homo sapiens
tttagcagtctaacccaacaaaggtttatttctcactcatgtcaccatccaaggcaggtcaggtaactcctgtgtggctttctccaagcagtaaagatgttcacatctggcaatttaggcatttcagagctcttcacttctggagccatagaaaggagtgaagaggagtggctgataatgcagcggggccagggggcgggggtgttatttccaggacagaaaacggcacaaagttttctgcttacttctgatgggctacacatcacataactccaaatcaactgcaacagaaatagggacttttccttgagccgcttgagtaacttccaacctcctaggcagatgatagcaaaggctggaggcatccagaagaaggctgattttccagaccttgtccaagctccacttgcagtgctctcggtatttgttatgcagaggtggccaactgagctgcagacttccctttcccccagggactccagaatgttcaagaagagcccatctacaggtct

SEQ ID NO: 4091 - DNA, 481 bp, Homo sapiens
ttttgtgcttttgacactttatccgtttttatttaaaaacatgctaaaaacatggtgttccataaagccaggaccaggatgaaggaacgcacagatacggcaatgcaagcagaaagtgcatctgaaaccaacaagcgtgctcaccctgctctccctcccgtgctgcccgggggcaggcaggtgggcaaggagggggcaggaagccccccaggcctcacctcctgagtccccaatcagggcagggaggccaggccccaccctggactattgactcactgcagtggggaggaggaaagtgtggggcacgggaacacaagggctggccggactctgagaagctgagggacaaagaatggaccccaagcaccttacgcccaagttccaatcctatgccacgtccctgctagttagcacctccaccagtgggtgggcaggggctggagaggaggggacagccacttccatccacccagactgctct

SEQ ID NO: 4092 - DNA, 524 bp, Homo sapiens
  misc_feature (202)..(202): n is a, c, g, or t
ttttttttttttttttaactcatttatgacgagttttaattggtttttccactctaatttgccttgttcaatccacatttcctcagatttttgcacatgaggaagtactggatatataggtatatcctctctatcacaatccttagccatttctggttcttgagacgttttctggggctgcttattttcgcatcctttaagnctttcttgctcttcctctgatgtcagctccaagtcttgttctgcttctttgctctctttgttttctggtagctgtgattggcacaggtcatggagagtatcattccctgagagaagtacaactccagtgtccattttttctcgttctgttaagttcatctgtcccagttctttggttgctgactgattttcaggcattgatggtgatacagatggacttttatcaccaactttcagattcttggatctctgacaagtctcatcactaaaggtcaaattagtaggatgccaatctggattgtattttgaggaagactttcagg

SEQ ID NO: 4093 - DNA, 546 bp, Homo sapiens
ggctcggtggaagccctgcatgaggttctacagctgcctgctgccctgcgcgcctgcccgcccctccgcaaggccttggcggtagatgctgccttccgagagggcaatgctgcccgcctgttccgtctgctccagaccctgccctacctgccaagttgcgctgtgcagagccatgtgggccatgcccgccgggaagccctggcccgcttcgctcgtgcctttagcacccccaagggccagaccttgcctctgggcttcatggacaacctcttggccctggatggactcagggaagcacgggacctgtgccaggcccacgggctgcccttggacggagaggagagagttgtgttcctgaggggtcgctacgtggaggaagggctaccgcctgccagtacgtgcaaggtgttagtggagagcaaacttcgaggacgtaccctggaagaggtggtcatggcagatgaggaagatgagggcacggacagacctgggtccccagcctgaggagggagcgtgagcctcccaaagccccaagactgggccaaa

SEQ ID NO: 4094 - DNA, 3655 bp, Homo sapiens
cttcagatagattatatctggagtgaaggatcctgccacctacgtatctggcatagtattctgtgtagtgggatgagcagagaacaaaaacaaaataatccagtgagaaaagcccgtaaataaaccttcagaccagagatctattctccagcttattttaagctcaacttaaaaagaagaactgttctctgattcttttcgccttcaatacacttaatgatttaactccaccctccttcaaaagaaacagcatttcctacttttatactgtctatatgattgatttgcacagctcatctggccagaagagctgagacatccgttcccctacaagaaactctccccgggtggaacaagatggattatcaagtgtcaagtccaatctatgacatcaattattatacatcggagccctgccaaaaaatcaatgtgaagcaaatcgcagcccgcctcctgcctccgctctactcactggtgttcatctttggttttgtgggcaacatgctggtcatcctcatcctgataaactgcaaaaggctgaagagcatgactgacatctacctgctcaacctggccatctctgacctgtttttccttcttactgtccccttctgggctcactatgctgccgcccagtgggactttggaaatacaatgtgtcaactcttgacagggctctattttataggcttcttctctggaatcttcttcatcatcctcctgacaatcgataggtacctggctgtcgtccatgctgtgtttgctttaaaagccaggacggtcacctttggggtggtgacaagtgtgatcacttgggtggtggctgtgtttgcgtctctcccaggaatcatctttaccagatctcaaaaagaaggtcttcattacacctgcagctctcattttccatacagtcagtatcaattctggaagaatttccagacattaaagatagtcatcttggggctggtcctgccgctgcttgtcatggtcatctgctactcgggaatcctaaaaactctgcttcggtgtcgaaatgagaagaagaggcacagggctgtgaggcttatcttcaccatcatgattgtttattttctcttctgggctccctacaacattgtccttctcctgaacaccttccaggaattctttggcctgaataattgcagtagctctaacaggttggaccaagctatgcaggtgacagagactcttgggatgacgcactgctgcatcaaccccatcatctatgcctttgtcggggagaagttcagaaactacctcttagtcttcttccaaaagcacattgccaaacgcttctgcaaatgctgttctattttccagcaagaggctcccgagcgagcaagctcagtttacacccgatccactggggagcaggaaatatctgtgggcttgtgacacggactcaagtgggctggtgacccagtcagagttgtgcacatggcttagttttcatacacagcctgggctgggggtggggtgggagaggtcttttttaaaaggaagttactgttatagagggtctaagattcatccatttatttggcatctgtttaaagtagattagatcttttaagcccatcaattatagaaagccaaatcaaaatatgttgatgaaaaatagcaacctttttatctccccttcacatgcatcaagttattgacaaactctcccttcactccgaaagttccttatgtatatttaaaagaaagcctcagagaattgctgattcttgagtttagtgatctgaacagaaataccaaaattatttcagaaatgtacaactttttacctagtacaaggcaacatataggttgtaaatgtgtttaaaacaggtctttgtcttgctatggggagaaaagacatgaatatgattagtaaagaaatgacacttttcatgtgtgatttcccctccaaggtatggttaataagtttcactgacttagaaccaggcgagagacttgtggcctgggagagctggggaagcttcttaaatgagaaggaatttgagttggatcatctattgctggcaaagacagaagcctcactgcaagcactgcatgggcaagcttggctgtagaaggagacagagctggttgggaagacatggggaggaaggacaaggctagatcatgaagaaccttgacggcattgctccgtctaagtcatgagctgagcagggagatcctggttggtgttgcagaaggtttactctgtggccaaaggagggtcaggaaggatgagcatttagggcaaggagaccaccaacagccctcaggtcagggtgaggatggcctctgctaagctcaaggcgtgaggatgggaaggagggaggtattcgtaaggatgggaaggagggaggtattcgtgcagcatatgaggatgcagagtcagcagaactggggtggatttggtttggaagtgagggtcagagaggagtcagagagaatccctagtcttcaagcagattggagaaacccttgaaaagacatcaagcacagaaggaggaggaggaggtttaggtcaagaagaagatggattggtgtaaaaggatgggtctggtttgcagagcttgaacacagtctcacccagactccaggctgtctttcactgaatgcttctgacttcatagatttccttcccatcccagctgaaatactgaggggtctccaggaggagactagatttatgaatacacgaggtatgaggtctaggaacatacttcagctcacacatgagatctaggtgaggattgattacctagtagtcatttcatgggttgttgggaggattctatgaggcaaccacaggcagcatttagcacatactacacattcaataagcatcaaactcttagttactcattcagggatagcactgagcaaagcattgagcaaaggggtcccatataggtgagggaagcctgaaaaactaagatgctgcctgcccagtgcacacaagtgtaggtatcattttctgcatttaaccgtcaataggcaaaggggggaagggacatattcatttggaaataagctgccttgagccttaaaacccacaaaagtacaatttaccagcctccgtatttcagactgaatgggggtggggggggcgccttaggtacttattccagatgccttctccagacaaaccagaagcaacagaaaaaatcgtctctccctccctttgaaatgaatataccccttagtgtttgggtatattcatttcaaagggagagagagaggtttttttctgttctttctcatatgattgtgcacatacttgagactgttttgaatttgggggatggctaaaaccatcatagtacaggtaaggtgagggaatagtaagtggtgagaactactcagggaatgaaggtgtcagaataataagaggtgctactgactttctcagcctctgaatatgaacggtgagcattgtggctgtcagcaggaagcaacgaagggaaatgtctttccttttgctcttaagttgtggagagtgcaacagtagcataggaccctaccctctgggccaagtcaaagacattctgacatcttagtatttgcatattcttatgtatgtgaaagttacaaattgcttgaaagaaaatatgcatctaataaaaaacaccttcta

SEQ ID NO: 4095 - protein, 352 aa, Homo sapiens [sequence omitted]

SEQ ID NO: 4096 - DNA, 2072 bp, Homo sapiens
cggaaacgatcccaccccagtggcagtggtgctaagaaagaaaaggcaactcaaccagaaacaactgaagaagtcacagatctaaagaggcaagcagttgaagagatgatggatagaattaaaaagggagttcatcttagacccgttaatcagacagccagaccgaagacaaagccagaatcttcgaaaggctgcgaaagtgcagtggatgaactaaaaggaatactggcctcccagtagcattggatgcaggaaaaaatacattgacggtgaaaaacaagccgaaccagttgtagttttagatcctgtttctacacatgaaccccaaaccaaagaccaggttgctgaaaaagatccaactcaacacaaggaggatgaaggcgaaattcaaccagaaaacaaagaagacagcattgaaaacgtgagagagacagacagctccaactgctgatccataaaccagaagcctgatatgtttggaagtccttttcaataagcacatgattagtgttgttatattggcaagggctgtagacattctgctctggtcactgtattcagaatacaggttcttttctggtgtcacttttgtaagtagcaactataaacataagtaagctgtttagcaaaacacacattcctagtaggttttggttttttgatctttataaagatgaggtttttttcctagttactgtattaagtatgacttcttttagaaggttacaaaaaaattcagatgttgatacctttttaggaaatgtgcataccactcatcaaatggaatgctgaaagtttgaggtgcttgtatataatcggataaacaaaactgatcaacccaatgtgattttaaaagcccccaaagaagcttctgttttgggtctgatcctcttgatggagaaactgcagcagcatggaaattgttgggtactgtggcatacaagttattttctacagtagactgagataaactgaaaactcaggagctggcatcaaactcgtagtcccatagtcagtgttaattacacacattgttaactattggatgaaaaatacatgctattgattgtgtccaaagcctcccgaggacctccgtggggatgctctggtagcctgaatacagaactgaggtgaaagtccaaaccttgaattttacagtagtaagttggtaaaccatgtgctctgtgctatgagttaattatgttttcccaaatactaatgtggcacaagtaccatattttatcagagttcttatgtacagtatggtgaagataagtgacaagcacacatttttcttgcttcactgctgttctatattacacaggtttgttgttgttttttttaaaaaagaaattaagcagtagttagtctctaaaaatacaatgtttcaggctaccacagtgaataaatagaaatgtaatcagggattaaaaaaaaaacttatgcagcttttcaaagttgattgtttcaaaattggtgtttatttaaaataagtggtaatgtacttgaatgcactttttatgacaatgattcagtaatggtaattttactattaaagaaagtgaaaggtttagttttgttagcatggctcagcatgtagctgtcaggtgtttttcacctaagggcaaaagaaaatgatagtaataattgcagtagttgtattgtattgtatttttgcacgtgtggtaagcataggcttgaagaggtgggtaggcaggtacatgtacttcctaaatttggagataattatctttctgtaagttcgttatgcttgactgtttccatgttctcccaataatgattttatagttacttatcactttactcatggagaattaaaacgtaatgtttttcaactgtatctttctttaactggataatactgctatatgatatgcttactacagactgcattaattcacgaaacgaattctgttatgctgtaatttgaactctcctcaccacaacttattaaaaaggcaccaatagtttcccaaaaaaaaaaaaaaaaaaaaaaaaaaaaaaaaaaaaaaaaaaaaaaaaaaaaaaaaagaaaaaaaaaaaaaaaaaaa

SEQ ID NO: 4097 - DNA, 434 bp, Homo sapiens
tttttttttttttttttcagtttagtcacatttattgaataaagttagcaaatggatatctcttgaaaatgagagctccaaggaattaaaaaatgtagagttcgcatttcctttctgtgttaacacagctaattatgatctttacttcacatgcaaaagtcaacagaacaactcagtatttcaccagattataaacaagaattacgctggagaaatgaaaccctaaagagaaacggtcatatgactaacctcagtcaagtagttctggcaattatttgaagtctgaggcttgaagtaggaattcttacgggcatttggggaatatattttcgttgagtcctatactagtaagattttcatcacaaggtgactctcgacctcgccttgcacgaagagtgctgagaaaatatttcacctgctctttctccataaag

SEQ ID NO: 4098 - DNA, 453 bp, Homo sapiens
tttttttttttttttttaaccttaatgagccaatgcagtaaattcttcaaatgttctcagatttacaacaggtgacctctacaaaagaaagaaaccactgtcttatttattggttcagaaggtaagcttactacttaaacgggtctttttctgaaacctttggtactgggaagaactctctctccttgacaaatcttactccaaaagtcagggttttcgtctagcgggttttcttaaagtggggcatacctgtgagagggaggctcttggaggatcactgtacatttatacttccttcagcaaccaaagtcttaggcccctaaagcaactcacagaaaggctgtgaactcttccaaccttgctggccccagaaaggctcctttccctcctaacactttgtgaaatgactcgctcgctcccaagagcatcgtggagccacatctccaggtgaga

SEQ ID NO: 4099 - DNA, 379 bp, Homo sapiens
gagtccctgggctgcagccgctgctacacatactcacaacgctgccgccgcgctccgtgggcaactcctactactgctgggctgggctgggctgggctgggctgcgccggagctcgcctgcacagatcagctccggagaggggaaaaccacgctcctcggaccaagcctcgggagctaagccagatctgccagtgagcctcaggctttaggaactgaagagtgtttctgaaagatctatccagcactccgatggccagcaacaacaccgccagcatagcacaagccaggaagctggtagagcagcttaagatggaagacaatatcgacaggataaaggtgtccaaggcagctgcagatttgatggcctactgtgaagca

SEQ ID NO: 4100 - DNA, 438 bp, Homo sapiens
tttttttttttcctttttttcttctaatgataaacgccccattcacattggcgggctgcagatcggtcttggcgctgtatactcccaggtccagggcactgggatggtgctgggtgctggcctgcagggcactgtccagatcaggatctgtctggatttttggccagaccttttggttaggtcataaggcgattcaatggtcctagcaagacttcctttcatctatatcatctcctgccacttgaacttcaaggtctatctgtagtaagttaccactgcccatgggtagctccaggctcaggcggttctgggtcagctgcaggatcactgctgcaaggagccagggctctggatttccttcaggactcctgcaggccgggtgggaacagaggcccactgaggcccttggggcggctagccacagcccttccaccccct

SEQ ID NO: 4101 - DNA, 8297 bp, Homo sapiens
gactgcttgcattaaaggacttcctcatcctttttttcatgaaactgagcttgcttaatcagagatggagcaaactgactgcaaaccctaccagcctctaccaaaagtcaagcatgaaatggatctagcttacaccagttcttctgatgagagtgaagatggaagaaaaccaagacagtcatacaactccagggagaccctgcacgagtataaccaggagctgaggatgaattacaatagccagagtagaaagaggaaagaagtagaaaaatctactcaagagatggaattctgtgaaacctctcacactctgtgctctggctaccaaacagacatgcacagcgtttctcggcatggctaccagctagagatgggatctgatgtggacacagagacagaaggtgctgcctcacctgaccatgcactaagaatgtggataaggggaatgaaatcagagcatagttcctgtttgtccagccgggccaactctgcattatccttgactgacactgaccatgaaaggaagtctgatggggaaaatggtttcaaattctctcctgtttgttgtgacatggaggctcaagctgggtctactcaagatgtgcagagcagcccacacaaccagttcaccttcagacccctcccaccgccacctccgcctcctcatgcctgcacctgtgccaggaagccaccccctgcagcggactctcttcagaggagatcaatgactacccgcagccagcccagcccagctgctccagctcccccaaccagcacgcaggattcagtccatctgcataacagctgggtcctgaacagcaacataccattggagaccaggcattccctgttcaaacatggatctggttcctctgcgatcttcagtgcagccagtcagaactaccctctgacatccaataccgtgtactcgccccctcccaggcctcttcctcgaagcaccttttcccgacctgcctttacctttaacaaaccttacaggtgctgcaactggaagtgcacagcattgagcgccactgcaatcacagtgactttggccttgttactagcctatgtgattgcagtgcatttgttcggcctgacttggcagttgcaaccagttgaaggagagctgtatgcaaatggagttagcaaagggaacagggggaccgagtccatggacactacttactctccaattggaggaaaagtttctgataaatcagagaaaaaagtgtttcagaagggacgggcgatagacactggagaagttgacattggtgcacaggtcatgcagaccattccacctggtttattctggcgtttccagattactatccaccatccaatatatctgaagttcaatatttctttagccaaggactctctgctgggaatttatggcagaagaaacattccacctacacatactcagtttgattttgtaaaactaatggatggcaaacagctggtcaagcaggactccaagggctctgatgatacacagcactcccctcggaacctgatcttaacttcgcttcaggagacaggtttcatagagtatatggatcaaggaccttggtatctggcgttttacaatgatggaaaaaagatggagcaagtattcgtgttaactacagcaattgaaataatggatgactgttcaaccaattgcaatggaaatggagagtgtatctctggccattgtcattgtttcccaggattccttggacctgactgtgctagagattcctgccctgtgctgtgtggtgggaatggagaatacgagaaaggacactgtgtctgccggcatggctggaaggggccagagtgtgacgttccggaagaacaatgcattgatccaacatgctttggccacggcacctgcatcatgggagtctgcatctgtgtgccaggatacaaaggagaaatatgcgaggaagaggactgcctagacccaatgtgttccaaccatggcatctgtgtaaaaggagaatgtcactgttctactggctggggaggagttaactgtgaaacaccacttcctgtatgtcaagagcagtgctcaggacacggaacttttcttctggacgctggagtatgcagctgtgatcccaagtggacaggatctgactgctcaacagagctgtgtaccatggagtgtggtagccatggagtctgctcaagaggaatttgccagtgtgaagaaggctgggtaggaccaacatgtgaggaacgctcctgtcattctcattgtactgagcatggccaatgcaaagatggaaaatgtgagtgtagccctggatgggagggcgaccactgcacaattgctcactacttagatgctgtccgagatggctgcccagggctctgctttggaaatggacgatgtaccctggatcaaaatggttggcactgtgtgtgtcaggtgggttggagtgggacaggctgcaatgttgtcatggaaatgctttgtggagataacttggacaatgatggagatggtttaaccgactgtgtggatcctgactgttgtcaacaaagcaactgttatataagtcctctctgccagggctcaccagatcctcttgacctcattcagcaaagccaaactctcttctctcagcacacttcaagacttttttatgatcgaatcaaattcctcattggcaaggacagtactcatgtcattcctcctgaggtgtcatttgacagcaggcgtgcctgtgtgattcgaggccaagtggtggccatagatggaactcctctagtgggagtgaatgtcagtttcttgcaccacagtgattatgggtttaccatcagccggcaagatggaagctttgacctcgtggccatcggtggcatctctgtcatcttaatcttcgaccgatcccctttcctgcctgagaagagaacactctggttgccttggaatcagtttattgtggtagagaaagtcaccatgcagagagttgtatcagacccgccatcctgcgatatctccaactttatcagcccaaaccctattgtgcttccttcaccgctcacatcatttggagggtcctgtccagagaggggaactattgttcctgagctgcaggttgtacaggaggaaattcccattccctccagctttgtgaggctgagttacctgagcagccgcacccctgggtataaaaccctgctacggatccttctgacacattcaacgattcccgtaggcatgataaaagtacacctcacagtagctgtggaagggcgactcacacagaagtggtttcccgccgcaattaatcttgtctacacatttgcttggaacaagaccgatatctatggacagaaggtttggggcctggcagaggctttggtatctgtgggatatgaatatgaaacgtgccctgactttattctctgggagcaaaggacagtcgttttacaaggttttgagatggatgcttctaacctaggagactggtctttgaataagcatcacattttgaatcctcaaagtggaatcatacataaagggaatggagaaaatatgttcatttcccagcagcccccagtcatatcaaccataatgggtaatggacaccaaaggagtgtagcctgcaccaactgcaatggcccagcccacaacaacaaactctttgctcctgtcgccttagcttctggccctgatggcagtgtgtatgttggcgacttcaattttgtaaggagaatatttccctcgggaaactccgttagtattttggaattaagcacaagtcctgctcacaaatactatctggctatggaccctgtgtctgaatcactctatctatcagacaccaatactcgcaaagtctacaagttgaaatctcttgtggagacgaaagatctgtccaagaattttgaagtggtggcaggaactggtgatcagtgccttccctttgaccagagtcattgtggagatggtgggagagcatcggaagcttcactgaatagccctcgaggcatcacagttgataggcatggatttatttactttgtggatgggactatgattcgcaaaattgatgagaatgctgtgatcacaactgtaatcggctcaaatggtctgacttccacacaaccactgagctgtgactcaggaatggacatcactcaggtgcgattagagtggccaacagaccttgcagtaaatcctatggacaattcattgtatgtcttggataacaacattgtgctgcaaatttctgagaacaggcgtgttcggatcatcgcaggacgccccattcactgccaggtgccaggcatcgatcatttcctggtcagcaaggtagcaattcactccactctagagtcagcgagggccatcagtgtctcccacagcgggctgctcttcatagctgaaacagacgagaggaaagtaaaccgcattcagcaagtaaccaccaatggggagatctacatcatcgctggtgcccccactgactgtgactgcaaaattgatccaaactgtgactgtttttcaggtgatggtggctatgccaaagatgcaaagatgaaagccccttcctccttagcagtgtcgcctgatggaaccctctatgtggcagacctcggaaatgttcgaattcgtaccatcagcaggaaccaagcccacctgaatgacatgaacatttatgagattgcttcacccgctgatcaggaactgtaccagttcactgtaaatggaacccacctacacaccctgaacttgataacaagggactatgtttataacttcacctacaattctgaaggtgacttgggcgcgattaccagcagcaatggcaattcagtgcacattcgccgtgatgcaggcggaatgccgctatggcttgtggtgcctggcggacaagtatactggctgactataagcagcaatggagtcctgaaaagagtgtcagcccaaggctataatccggccttaatgacctatccaggaaacacagggcttctggctaccaaaagtaacgaaaatggatggacaaccgtttatgagtatgaccccgagggacacctgaccaatgcaacgtttcccactggagaggtcagcagcttccacagtgacctggagaagctgacaaaagtggagctagatacttccaaccgtgaaaatgtcctcatgtcaaccaacttgacggcaactagtaccatatatattttaaaacaagaaaatactcaaagtacctatcgggtgaatccagatggttccctgcgtgtcacttttgccagcgggatggagatcggcctcagctcagagccccacatcctggcaggggcagtcaaccctaccctgggcaaatgcaacatctcattgcccggagagcacaatgcaaacctcatcgagtggcggcagaggaaggagcaaaacaaaggcaatgtttcggcttttgaaaggaggctgagggcccacaacagaaacctactctccatagattttgatcatataacccgcacaggaaagatctatgatgaccatcgaaaattcacccttcgaattctttatgaccagactgggcgacccattctgtggtctcctgtaagcagatataatgaagtgaacatcacatattcaccttcgggattggtgacgtttattcaaagaggaacgtggaatgaaaaaatggaatatgaccagagtgggaaaattatttcaagaacttgggctgatgggaaaatttggagctatacctacttagaaaaatctgtgatgcttctcctacacagccagcggcgttacatctttgagtatgaccaatcagattgcctgctgtcagttaccatgcctagcatggtgcgccacagcttacaaaccatgctttcagtgggctactaccgtaatatctacaccccaccggacagtagcacttcttttatccaagactatagtcgagatggccgattgctacagaccctgcatctggggacagggcgcagagtcttatacaagtacaccaagcaagcaaggctttctgaggttctctatgataccactcaggtcacattaacatatgaagagtcttctggagtgattaagacaatacacctgatgcatgacggattcatctgcacaatcagatacaggcaaacaggacctcttattggacgccagattttcagattcagtgaagaaggccttgtgaatgcacggttcgactacagctacaacaatttccgagtcacaagcatgcaagctgtaatcaatgaaacccctttgcctatagatctttaccgatatgttgatgtctctggcagaacagagcagtttggaaaattcagtgtaattaattacgatttaaatcaggtcataactactacagtgatgaaacacaccaaaatcttcagtgccaatggacaagtcattgaagtccaatatgaaatcctaaaggcaattgcctactggatgaccattcaatatgataatgtgggccgacatggtaatatgtgcataagggtaggagtagatgccaatataacaaggtacttctatgaatacgatgctgatgggcaacttcagactgtttctgtaaatgacaaaacccagtggcgttatagttacgatctgaatggagacatcaacctcttaagccatgggaagagtgctcgtcttactcctctccgatatgacctccgagaccgcatcaccagattaggagaaattcagtataaaatggatgaagatggctttctgaggcagaggggaaatgatatttttgaatataattctaatggcctgctgcagaaagcctacaataaggcttctggctggactgtgcagtattactatgatgggcttgggcgacgtgtcgcgagtaagtccagcctagggcagcaccttcagttctttgtcgacgcgaccgcgaaccccataagagttactcatttgtacaaccacacaagctcggagattacatctctgtattatgatctccaaggtcaccttattgccatggagttaagcagtggtgaagaatattatgtagcctgtgataatacaggtaccccactagctgtgttcagcagccgaggtcaggtcataaaggagatactatacacaccttatggcgatatctatcatgacacttaccctgactttcaggtcataattggttttcatggaggactctatgatttccttactaaattagtgcacctggggcaaagggattatgatgttgttgctggcagatggacaacggcctatcatcacatatggaaacagttgaacctccttcctaaaccattcaacctctactcctttgaaaataactacccagttggcaaaattcaagatgttgcaaagtataccacagacatcagaagttggttggagctatttggtttccaattacacaatgtactacctggatttcccaaacctgaattagaaaatttagaattaacttacgagcttctacggcttcagacaaaaactcaagagtgggatcctggaaagactatcctgggcattcagtgtgaactccagaaacagctcaggaatttcatttccttggaccaactacctatgactccccgatacaatgatggacggtgccttgaaggagggaagcaaccaaggtttgctgctgtcccttctgtttttgggaaaggtataaaatttgccatcaaggatggcatagtaacagctgatattataggagtagccaatgaagatagcaggcggcttgctgccattctcaataatgcccattacctggaaaacctacattttaccatagaggggagggacactcactacttcattaagcttgggtctctggaggaagacctggtgctcatcggtaacactggggggaggcggattctggagaatggtgtcaatgtcactgtgtcccagatgacttctctgttgaatgggaggactagacggtttgcagatattcagctccagcatggagccctgtgcttcaacatccggtatgggacaactgtcgaagaggaaaagaatcacgtgttggagattgccagacagcgcgcagtggcccaggcctggactaaggaacaaagaaggctgcaagagggggaagaggggattagggcatggacagaaggggaaaagcagcagcttttgagcactgggcgggtacaaggttacgatgggtattttgttttgtctgttgagcagtatttagaactttctgacagtgccaataatattcactttatgagacagagcgaaataggcaggaggtaacaaaaatatctctgcctttgcgtcaccaaagactgcctgtttttaaaacataaaa

SEQ ID NO: 4102 - protein, 2725 aa, Homo sapiens
MEQTDCKPYQPLPKVKHEMDLAYTSSSDESEDGRKPRQSYNSRETLHEYNQELRMNYNSQSRKRKEVEKSTQEMEFCETSHTLCSGYQTDMHSVSRHGYQLEMGSDVDTETEGAASPDHALRMWIRGMKSEHSSCLSSRANSALSLTDTDHERKSDGENGFKFSPVCCDMEAQAGSTQDVQSSPHNQFTFRPLPPPPPPPHACTCARKPPPAADSLQRRSMTTRSQPSPAAPAPPTSTQDSVHLHNSWVLNSNIPLETRHSLFKHGSGSSAIFSAASQNYPLTSNTVYSPPPRPLPRSTFSRPAFTFNKPYRCCNWKCTALSATAITVTLALLLAYVIAVHLFGLTWQLQPVEGELYANGVSKGNRGTESMDTTYSPIGGKVSDKSEKKVFQKGRAIDTGEVDIGAQVMQTIPPGLFWRFQITIHHPIYLKFNISLAKDSLLGIYGRRNIPPTHTQFDFVKLMDGKQLVKQDSKGSDDTQHSPRNLILTSLQETGFIEYMDQGPWYLAFYNDGKKMEQVFVLTTAIEIMDDCSTNCNGNGECISGHCHCFPGFLGPDCARDSCPVLCGGNGEYEKGHCVCRHGWKGPECDVPEEQCIDPTCFGHGTCIMGVCICVPGYKGEICEEEDCLDPMCSNHGICVKGECHCSTGWGGVNCETPLPVCQEQCSGHGTFLLDAGVCSCDPKWTGSDCSTELCTMECGSHGVCSRGICQCEEGWVGPTCEERSCHSHCTEHGQCKDGKCECSPGWEGDHCTIAHYLDAVRDGCPGLCFGNGRCTLDQNGWHCVCQVGWSGTGCNVVMEMLCGDNLDNDGDGLTDCVDPDCCQQSNCYISPLCQGSPDPLDLIQQSQTLFSQHTSRLFYDRIKFLIGKDSTHVIPPEVSFDSRRACVIRGQVVAIDGTPLVGVNVSFLHHSDYGFTISRQDGSFDLVAIGGISVILIFDRSPFLPEKRTLWLPWNQFIVVEKVTMQRVVSDPPSCDISNFISPNPIVLPSPLTSFGGSCPERGTIVPELQVVQEEIPIPSSFVRLSYLSSRTPGYKTLLRILLTHSTIPVGMIKVHLTVAVEGRLTQKWFPAAINLVYTFAWNKTDIYGQKVWGLAEALVSVGYEYETCPDFILWEQRTVVLQGFEMDASNLGDWSLNKHHILNPQSGIIHKGNGENMFISQQPPVISTIMGNGHQRSVACTNCNGPAHNNKLFAPVALASGPDGSVYVGDFNFVRRIFPSGNSVSILELSTSPAHKYYLAMDPVSESLYLSDTNTRKVYKLKSLVETKDLSKNFEVVAGTGDQCLPFDQSHCGDGGRASEASLNSPRGITVDRHGFIYFVDGTMIRKIDENAVITTVIGSNGLTSTQPLSCDSGMDITQVRLEWPTDLAVNPMDNSLYVLDNNIVLQISENRRVRIIAGRPIHCQVPGIDHFLVSKVAIHSTLESARAISVSHSGLLFIAETDERKVNRIQQVTTNGEIYIIAGAPTDCDCKIDPNCDCFSGDGGYAKDAKMKAPSSLAVSPDGTLYVADLGNVRIRTISRNQAHLNDMNIYEIASPADQELYQFTVNGTHLHTLNLITRDYVYNFTYNSEGDLGAITSSNGNSVHIRRDAGGMPLWLVVPGGQVYWLTISSNGVLKRVSAQGYNPALMTYPGNTGLLATKSNENGWTTVYEYDPEGHLTNATFPTGEVSSFHSDLEKLTKVELDTSNRENVLMSTNLTATSTIYILKQENTQSTYRVNPDGSLRVTFASGMEIGLSSEPHILAGAVNPTLGKCNISLPGEHNANLIEWRQRKEQNKGNVSAFERRLRAHNRNLLSIDFDHITRTGKIYDDHRKFTLRILYDQTGRPILWSPVSRYNEVNITYSPSGLVTFIQRGTWNEKMEYDQSGKIISRTWADGKIWSYTYLEKSVMLLLHSQRRYIFEYDQSDCLLSVTMPSMVRHSLQTMLSVGYYRNIYTPPDSSTSFIQDYSRDGRLLQTLHLGTGRRVLYKYTKQARLSEVLYDTTQVTLTYEESSGVIKTIHLMHDGFICTIRYRQTGPLIGRQIFRFSEEGLVNARFDYSYNNFRVTSMQAVINETPLPIDLYRYVDVSGRTEQFGKFSVINYDLNQVITTTVMKHTKIFSANGQVIEVQYEILKAIAYWMTIQYDNVGRHGNMCIRVGVDANITRYFYEYDADGQLQTVSVNDKTQWRYSYDLNGDINLLSHGKSARLTPLRYDLRDRITRLGEIQYKMDEDGFLRQRGNDIFEYNSNGLLQKAYNKASGWTVQYYYDGLGRRVASKSSLGQHLQFFVDATANPIRVTHLYNHTSSEITSLYYDLQGHLIAMELSSGEEYYVACDNTGTPLAVFSSRGQVIKEILYTPYGDIYHDTYPDFQVIIGFHGGLYDFLTKLVHLGQRDYDVVAGRWTTAYHHIWKQLNLLPKPFNLYSFENNYPVGKIQDVAKYTTDIRSWLELFGFQLHNVLPGFPKPELENLELTYELLRLQTKTQEWDPGKTILGIQCELQKQLRNFISLDQLPMTPRYNDGRCLEGGKQPRFAAVPSVFGKGIKFAIKDGIVTADIIGVANEDSRRLAAILNNAHYLENLHFTIEGRDTHYFIKLGSLEEDLVLIGNTGGRRILENGVNVTVSQMTSLLNGRTRRFADIQLQHGALCFNIRYGTTVEEEKNHVLEIARQRAVAQAWTKEQRRLQEGEEGIRAWTEGEKQQLLSTGRVQGYDGYFVLSVEQYLELSDSANNIHFMRQSEIGRR

SEQ ID NO: 4103 - protein, 449 aa, Homo sapiens
GAACTTATTAGAATTTTTTCTTCTTTTTAATTCCCATGTCTAACAAAAGACAAAACCAAGACAGGTTTAAGTGTGGTATCGACTAGACTCCAAACATATTAAATAAATCACATAGGCTGGGTTGGGTTTCACACGAGAACTACCTTGGAGATGGTTATTCACTGTTCTCCCAAGAATATAAAAATGTCCAGAGGAGACAGGGAGATCAGGAGATACATGGCTTCAGCTCTGTGGGAATTTCTAAGGCTTTAAAATTCACTCCACAATCCTGCAAAATTCCTTGATGTTGAGCTCGGCTGCTGATGCCTTCTTTTGTCTAGATCCTCTGAAGCCATGCACTGAGACTCCAGAAATTTACTCTAGTCTTTCTTTCTACTTGTGACCAAGAGGAAAGTTGGGCAAAGGGGTTGTATTGGTCAGATAGGCTAATTGTTATAAGAAATGACCTC

SEQ ID NO: 4104 - DNA, 657 bp, Homo sapiens
  misc_feature (288)..(288): n is a, c, g, or t
gaaaggcaggcaaaagccccagacaggccaaaaccttcatccttcatgcacccaacctgtaccaaacaccagcatggcctggctgtgagtgcacagcagatggaggtttgctgggcagagacactgggctggcctagacactgcctttggtgataccctaaaccaaaggggccagtcccacagtaagaaggagaccactactactcctgctgccctcctccccccaccttgcctagtttacaagacaggaggaaagagagaaagcaaaaaagttagaaaacaaaacanaacagaagtaagataaatagccagaagaccttggcgacaccacccggccctggtagttaaaaaaaagtaacaataataataatatcaacccctgacctaaactatttgtgttatctgtaaattccagacattgtatgaaaaagcattgcaaaactttctgctctgttagctgatgcgtgtagcccccagtcacgttccccgcttgcttgagatatcatgaccctttcacgtggaccccttagagttgtaagcctttaaaaaggccaagaaattcttttttcagggatctcagctattaaagatgcaagtctgccaatgcttctggccaaataaacctttccttctttaaaaaaaaaaaaaaaaaaaaat

SEQ ID NO: 4105 - DNA, 465 bp, Homo sapiens
  misc_feature (265)..(265): n is a, c, g, or t
  misc_feature (272)..(272): n is a, c, g, or t
  misc_feature (280)..(280): n is a, c, g, or t
  misc_feature (399)..(399): n is a, c, g, or t
tggtggagatggggtctcactgttgcccaagctggtcaggaactgctggtctcaagtgatcctcccaccttggcctcccaaagtgttgggattacaagcgtgaccactgggctctgcttattatctctattttagaggcaaggaaatagaagcttagatattagcttgagcaaggtcacaaaggagtgaatcgttcctaggatttcagtctaggtatgcttgaatcccaagtctgtattctaacactgccttatcctgtcttatnatttatnctttcgtncacttagcaatgactgtgcacctactatgtaccaggtactgtgttaggccctcctcatccaaggatgcacaagatcttctggcctagatggccccacggtacagatcaagtgggtgcanggactctcaggactaaccctgtgaccaataccctatgccctggagcacccaagataacctgacaaa

SEQ ID NO: 4106 - DNA, 488 bp, Homo sapiens
tttttttttttttttttttgacttttaaaaataatttaataaaatcaagtgagaacagtgttttttttttttttctatgtatagtcagttaggactttggcaaatataaagcacaaccaatatactgatgtaggggggaaaataatttaaaaaattaatttagtaaaatgcctggagcagtaagtaacaattattaacaatactacaatgaagctgtctgtactttcatttaacaacacacttaaggcaaatgttgaattaatataaaaataatatgtggtaaactgatacttgacatgatacaataaaaattaattttcacgttgaagacctagttatgacaacatctctacatgccttctaaatacctaatttctcagttgtgcagagcatagctcactatggcctaataagatgtcaatcagaatatccagaatatttcttaatatagagcaatacatttcccctaccacatcaggcaaaataat

SEQ ID NO: 4107 - DNA, 296 bp, Homo sapiens
gtttttttttttttttttctcacaaaatttcattttaatcatcttctttacaaagcacaatacttaagacttttctaaatacaactttataaaatgaagcaaaaaaataatctccatagatgcctggtcgagtccatgctgaatgcaaaataatttttttttttttcaaaagtgatacttccaagcttttcaacattctcgatgggtccattttgtaaagagtaaagatggtggcagtttgggtagcggctcgtccagttccttgatgcagaatcctcttgctgggtagcccgagg

SEQ ID NO: 4108 - DNA, 2750 bp, Homo sapiens
tatcgaattccgggtggagggacctggcaaagcgccaggccccgcgtgggctcccggcgagcggttgatggcgagggggcgcggcgcgggctctgtagcccgagttcccgacgctggaggcccggcccgcctcagccgcattgtcccgggccgcgcgcaccggccctgagctgcgccgccgcagcacccgcccgccgcccgcggggccatgcggagagccgccgggatggaggacttggctccgcggaggaagaggagtcctggtacgaccagcaggacctggagcaggacttgcacctagctgcggagctggggaagactctgctggagaggaacaaggagctggaggggtccctgcagcagatgtactccaccaatgaggaacaggtgcaggagatcgagtacctaaccaagcagctggacacgctgcggcacgtgaacgagcagcacgccaaagtctatgagcagctggacctgacagcccgggacctggagctgaccaaccacaggctggtgctggagagtaaggctgcccagcagaagatccatgggctgacggagaccattgagcgcctccaggctcaggtggaggagctgcaggcccaggtggagcaactgagaggcctggaacagctgcgagtgctccgggagaagcgggaacgcaggcgtaccatccacaccttcccctgcctcaaggagctgtgcaccagcccccggtgcaaggatgctttccgcctacacagttcctccctggagctgcccgcggcccctggagcaggagaacgagcggctgcagaccctggtgggggcgctgcgctcccaggtgagccaggagcggcagcgcaaggagcgggcggagcgcgagtacaccgcggtgctgcaggagtactcggagctggagcgccagctgtgcgagatggaggcctgtcgcctgcgtgtgcaggagctggaggccgagctgctggagctgcagcagatgaagcaggccaagacctacctactgggtccggtacgaccacctggccgaggccctgctcgcacccctcacgcaggcccctgaggccgacgatccccagcccggccgcggggacgacttgggcgcccaggacggggtctcctcaccggcagcctctccaggccacgtggtgcgcaagagctgcagcgacactgcgctcaacgccatcgtggccaaagacccagccagccggcacgcgggcaacctcacactgcacgccaacagcgctgcgcaagcggggcatgtccatcctgcgggaggtggacgagcagtaccacgcgctgctggagaagtacgaggagctgctgagcaagtgccggcagcacggggccggagtgcgcgacgccggcgtgcagacctcgcgccccatctcccgggacagctcgtggagggacctgcgcgggggtgaggagggccagggtgaggtcaaggcaggagagaagagcctgagccagcacgtggaggccgtggacaagcggctggaacagagccagcccgagtacaaggcgctcttcaaagagatcttctccaggatccagaagaccaaggctgacatcaacgccaccaaagtcaagacgcacagcagcaagtgacccttctccggcctgcagcctcccccagggtggaagccgtggggtccctcaggcctgggcggtgcagcttccagagagcgagcgccctttagcggcctgccaccacagcacgcggcctcctgatccggaagcacgcagcatgttccctgctgagcggaggcagcccacctgtcctgcctcccaggagcccttggccacctcgcgccagcccaaaggcgcagctctgagttcaaagccaaatgtccccactaccccagggatcccccagctcccccagcccctggcttcctgaccctgcgcctcaccctcagactcctgaccaggcttctgaaagccattctggatcagttgggctttttttttttttggttaatttgtttttctaaaagatttgcaatcaaggtctccttgaccccttgccacactggaacgcttaaaggggaccccagggccagcgttaggggtcctggaccacccactgcttctccccaaccctgatgcgctgacttcccttagcaccagctgtcccacctccagggtcctgaccaggtcagagatgtcccctgccatgcgagcaggaagcctcagctgggcctggagtgtccctgctccagccctgccagggacggtttctccctggatacacttggcccaccgcagatctgtagccagtcagaggaggaggagaaggagcccctcagcagagtggtgcagtttcgctcagagcttgtctccttggcttccttccccagaaatgacctgctgggccttagctttccaggggccggggcagtggggagcccccatcccttcacaccgccaccaactaaaccaaagcttggcctctgactcccgtctctgtgcttgcccccatctcagggaccatgatgtctcagtcactccacgctccccacaggccaaccctggcacaggtcatgtctgcagcccccagaatcttctggacatgcaccaccagccggtggtcccaatgtccacccctgcctccccttcactggggactggggttttcgccccatgctgcatcgtcgttgtattgggatggggctgaggaacatgctccctcccataaaatgcctgctcttcacctcccacctttgtggggggcttttgaggacccagct

SEQ ID NO: 4109 - protein, 535 aa, Homo sapiens
YRIPGGGTWQSARPRVGSRRAVDGEGARRGLCSPSSRRWRPGPPQPHCPGPRAPALSCAAAAPARRPRGHAESRRDGGLGSAEEEESWYDQQDLEQDLHLAAELGKTLLERNKELEGSLQQMYSTNEEQVQEIEYLTKQLDTLRHVNEQHAKVYEQLDLTARDLELTNHRLVLESKAAQQKIHGLTETIERLQAQVEELQAQVEQLRGLEQLRVLREKRERRRTIHTFPCLKELCTSPRCKDAFRLHSSSLELPAAPGAGERAAADPGGGAALPGEPGAAAQGAGGARVHRGAAGVLGAGAPAVRDGGLSPACAGAGGRAAGAAADEAGQDLPTGSGTTTWPRPCSHPSRRPLRPTIPSPAAGTTWAPRTGSPHRQPLQATWCARAAATLRSTPSWPKTQPAGTRATSHCTPTALRKRGMSILREVDEQYHALLEKYEELLSKCRQHGAGVRDAGVQTSRPISRDSSWRDLRGGEEGQGEVKAGEKSLSQHVEAVDKRLEQSQPEYKALFKEIFSRIQKTKADINATKVKTHSSK

SEQ ID NO: 4110 - DNA, 4594 bp, Homo sapiens
gggcagagatgcctccagctgggctttgagggtgtcagtcttccctcaaataggaaagatgaggggcaggggaggatattggggacaagcctctgctcagccctgggtcctcttggaaccgggcttggagccggaggtggggagggtgtccaagctgagctcctggattcccatctgccgaactgcacccagaaccaggagtggggtgcgggcccatcctctggccaggatcctgggctcccttggccacaaagcaggacaggggaccagagatcccccaactcaggagacgtgaagctggcagctgggccgctggcctagaaatggcctcaaatggaagctgccacccgatcctggtggaggctttgagctaggctagagatcaggactccagggttcagtgcgcacgtgctgcccctgcactagggccgaagcaatgcgggtgctggcgaccgacgcaaggaggtgacgcacaggggacttaaggagcggaccgccgcgggaggacgcgcccagctcagggggactccctctgcgccccccacgctgggtctccggcccacgcgtggcccggctggtctgcggagctagcgccagggccgccagagggcgcccggggcggaggatggggcgggagccggggaagcccgggaggtggtggccgagtgggcgccgcccctctgggtctgcggctcaggtcgaagagtcggctgcgtgggccggggaatccggattccgggggttcaacgcccaggggttccatgagcccctactgttctcggacgcccggccggccccgacgcactcgtcctagcacccctcccctgtccggtcctccggcccctccgccgtcgcccctccggggtccagccgggcggggctgctccagggtcgcggctggcgcgggtccccgggccctggccctccggtgccccgggccaaggagagaaaacttgagcatccacgcacaggggtggggagcaggatcccactctgagggtgcactgccccgccctctccgggtctgcctcggccccgcccgggccccaggccccgccccctcccctcggccggcccgagagctccgggggccgctgcagccgcccaagcgcccgccatgcgcgctgcccgcgccgcgccgctgctccagctgctgctcctgctggggccgtggctggaggctgcgggcgttgcggagtcgccgctgcccgccgtggtccttgccatcctggcccgcaatgccgaacactcgctgccccactacctgggcgctctggagcggctggactacccccgggccaggatggccctctggtgagagacccgggcattggcaccgagtgggcacctaacccccagcttcgcagatggcccccgcccccggcggccctgtctgctcgctccctgcccagacaccacctagacaggcccctcccctcacagacggccctgccagcccgagccgccagagaggaccccgagccccctgctgggagacgacagacctctgaggccacaggccgacgcgggacacccacccctccttctggtcccctactccttcctcttggggccttccctgggtgtaggttgggcccagccagcccttttcaccccagccttcagggcccagctcaaccccagtgggacctgtggttggctggatttgaagaggagcagacaggaacctctgaagtccactggggcccaacgtggcagggatcgaccacgctggaggcttccgggcacaggttgggggtgccatcagcactgggctccgggctgtgcaggggagtcagaccggcccccccaccgcccccgtgctggggccagctctcttggtagatcttggtagaggggcgggatcctgtcagccaagggcagtcccccttcctggagcctctcccctctggcatctctgtacccccagggcactgggatcgaaggccacaacccctggtctgtagacaccagaacagggaggagtccctggctgaggttgggggtaaactgagaaaaatgacaagccaccctctacaacacaccacagttgggctggggggggtggagccctggcctggggaggccgcccacaattaccacagtttgggagtttgttagttcccacccctgtaagacttgacacgtagtcttcatttctggggaattggcttaaaggggcagcatcacccaaaacctgggcacttggctaaacccccacctctgttatgggggccccttccccaggagaggggaggctgtgccccatgacagcagagcttggacccatctgcattcttagggacgcttagagcatggtttggtccttattacaacctgggggtggaggaaagcagcagctcttctgtctagtccccattcagagagggacaggggctggcctgtggtcacacagccacaggtcacataggtaggtatctgcccacctaacgaaggtaaccagggaatgcaccaggtgtgatccttaaagtcgaggtacttttcatctttcaaaatgcattcgttggccaggcgtggtggctcacgcctgtaatttcagcactttgggaggccgaagtgggcagatcacctgaggtgaggagttcaagaccagcctggctaacatggtgaaaccccatctctactaaacacacaaaaattagccgggcatggtggtgcacacctgtaatcccaggtactcgggaggctgaggcaggagaatcacttgaacccgggaggcggaggttgcagtgagtcgagatcataccactgcactacagcctgggcgacagagcaagattccatctcaaaaaaaatgcattcttcttctcttatcttcgtccatgacataagcaggacagcttaagttatagagggaggacgtgaagcccagagaaagatgggacttgcctgaggtcacacagcaggtcacagaactgtggtggggacctggctgtgctgcctccagcctctctgctgtagcacacctacccttcactgttccaaggagagctcgacctcaaaggtgttagtgctttggggtcaaggctgccttggggttcaatcctgtggctgtgccccctcagccttttttcttcccgtccccaggtgtgccacggaccacaatgtggacaacaccacagagatgctgcaggagtggctggcggctgtgggcgatgactatgctgctgtggtctggaggcctgagggcgagcccaggttctacccagatgaagagggtcccaagcactggaccaaagaaaggcaccagtttctgatggagctgaagcaggaagccctcacctttgccaggaactggggggccgactatatcctgtttgcagacacagacaacattctgaccaacaatcagactctgcggcttctcatggggcaggggcttccagtggtggccccaatgctggactcccagacctactactccaacttctggtgtgggatcaccccccagggctactaccgccgcacagccgagtacttccccaccaagaaccgccagcgccggggctgcttccgtgtccccatggtccactccaccttccttgcatccctgcgggctgaaggggcagaccagcttgctttctacccgccacatcccaactacacttggcctttcgacgacatcatcgtcttcgcctatgcctgccaggctgctggggtctccgtccacgtgtgcaatgagcaccgttatgggtacatgaatgtgccggtgaaatcccaccaggggctggaagacgagagggtcaacttcatccacctgatcttagaagcactagtggacggcccccgcatgcaggcctcagctcatgtgactcggccctctaagaggcccagcaagatagggtttgacgaggtctttgtcatcagcctggctcgcaggcctgaccgtcgggaacgcatgctcgcctcgctctgggagatggagatctctgggagggtggtggacgctgtggatggctggatgctcaacagcagtgccatcaggaacctcggcgtagacctgctcccgggctaccaggacccttactcgggccgcactctgaccaagggcgaggtgggctgcttcctcagccattactccatctgggaagaggtggttgccaggggcctggcccgggtcctggtgtttgaggatgacgtgcgctttgagagcaacttcagggggcggctggagcggctgatggaggatgtggaggcagagaaactgtcttgggacctgatctaccttggacggaaacaggtgaaccctgagaaggagacggccgtggaggggctgccgggcctggtggtggctgggtactcctactggacgctggcctatgccctgcgtctggcgggtgcccgcaagctgctggcctcacagcctctgcgccgcatgctgcccgtggacgagttcctgcccatcatgttcgaccagcaccccaacgagcagtacaaggcacacttctggccacgggacctggtggccttctccgcccagcccctgctcgctgcccctacccactatgccggggacgccgagtggctcagtgacacggagacatcctctccatgggatgatgacagcggccgc

SEQ ID NO: 4111 - protein, 560 aa, Homo sapiens
GHTAGHRTVVGTWLCCLQPLCCSTPTLHCSKESSTSKVLVLWGQGCLGVQSCGCAPSAFFLPVPRCATDHNVDNTTEMLQEWLAAVGDDYAAVVWRPEGEPRFYPDEEGPKHWTKERHQFLMELKQEALTFARNWGADYILFADTDNILTNNQTLRLLMGQGLPVVAPMLDSQTYYSNFWCGITPQGYYRRTAEYFPTKNRQRRGCFRVPMVHSTFLASLRAEGADQLAFYPPHPNYTWPFDDIIVFAYACQAAGVSVHVCNEHRYGYMNVPVKSHQGLEDERVNFIHLILEALVDGPRMQASAHVTRPSKRPSKIGFDEVFVISLARRPDRRERMLASLWEMEISGRVVDAVDGWMLNSSAIRNLGVDLLPGYQDPYSGRTLTKGEVGCFLSHYSIWEEVVARGLARVLVFEDDVRFESNFRGRLERLMEDVEAEKLSWDLIYLGRKQVNPEKETAVEGLPGLVVAGYSYWTLAYALRLAGARKLLASQPLRRMLPVDEFLPIMFDQHPNEQYKAHFWPRDLVAFSAQPLLAAPTHYAGDAEWLSDTETSSPWDDDSGR

SEQ ID NO: 4112 - DNA, 535 bp, Homo sapiens
cggcggaacggctgtggtttctgctggttgtaggtccttggctggtcgggcctccggtgttctgcttctccccgctgagctgctgcctggtgaagaggaagccatggcgctccgagtcaccaggaactcgaaaattaatgctgaaaataaggcgaagatcaacatggcaggcgcaaagcgcgttcctacggcccctgctgcaacctccaagcccggactgaggccaagaacagctcttggggacattggtaacaaagtcagtgaacaactgcaggccaaaatgcctatgaagaaggaagcaaaaccttcagctactggaaaagtcattgataaaaaactaccaaaacctcttgaaaaggtacctatgctggtgccagtgccagtgtctgagccagtgccagagccagaacctgagccagaacctgagcctgttaaagaagaaaaactttcgcctgagcctattttggttgatactgcctctccaagcccaatggaaacatctggatgtgcccctgcagaagaagacctgtgtcag

SEQ ID NO: 4113 - DNA, 291 bp, Homo sapiens
tgttccatgcactagagacactgctgtgaaaagaatatatagagtccttacccttatgggacttacattctactggtgaaagacaataagcacataacaacatacagtatgtcgacgtatacatttaatggtgtaatgatttatttttcccataacttatttaatcagtggtattttccctttcatatttctctgatagggtctctcatttcattttcttttagtcattgacttgctttcatgtgattttttagatttcagtgatttggggtttcaatttagagttgatac

SEQ ID NO: 4114 - DNA, 404 bp, Homo sapiens
gcttgtttgatatttcaaggaataaagccggagctcctgaattgtagtccaccttaaaagagagacctgtattggagaatattttatttttttggcaaatttgatcttaccctttaccagttctataatttggttaaaagctgattacgtcctacaatgtcaaagtcagctaactgtcgtctacttaagacttctggtcatttccaacttatagaggaagggagtctctaaaatctcttcttcagaaggcacctcacttctcagacttaaaattccacatcaagtgttccattaaaagaagataaggcattctgagtgcaaacaaatgggggcttcttaaactacacaccagcagtcagtgaggaaaactttgaacaattattgagttgctttcttgggtctct

SEQ ID NO: 4115 - DNA, 526 bp, Homo sapiens
  misc_feature (27)..(27): n is a, c, g, or t
  misc_feature (51)..(51): n is a, c, g, or t
  misc_feature (59)..(59): n is a, c, g, or t
  misc_feature (74)..(74): n is a, c, g, or t
  misc_feature (82)..(82): n is a, c, g, or t
tgtgacatgcgagactgtaagcacagntcagaacctctgcagcgtctcaancccaacangaggagacgtgtggncttcaacnatgcccaacctgagcagggtctgcctctgcattacgcttcctcccatttctcttcctgggtcctgatgaggtgagctggaggaaccaatagtcaggatgccctggaattgatgttgctctgttttgtgctcacaaaacagccatgtaacacatgagcacctgagttgaagccatccagtcgcaagtcagcagacagcagttgatggaattctcagtagaaattcagtaagggtgcccaaattttattttttttttcacctatactctaccaatatatggtatttaggaaaacttcttttatccaagcacaaagaaaagcacacacatttttataatcatctgcttcatcagggtaaataaataatttaacaaatgtgatcagcatctctagtttaccagtactttaatattagtgttcttacaaattaatgtattttgcaatat

SEQ ID NO: 4116 - DNA, 486 bp, Homo sapiens
tcattgctaaggaagaactccctctgctcttggaagattttctactctactgatcttattttattttattttatttttacctgatgattgtcttaggcaccctccttacataataaaccatcaagctaacttgaacagggaaactgagtcacactcaaacaatagctaaggtcaaaagtgtagtgaaagtagaaaaagtggggaagggataggtctaagtgagtgacagatgggctgattcagacagggcaataagcacagggagatatgaagacaactaccaaagcaagtggaagacaaggttttcaactttattgtattgaaaaatacttgtcacttggttcagatggcaaatctaaaatgagcccacaatgattatgtaataaatgcagaacgtaccacaacaaatcgagactaacacagaaacagaagatgtgactttgtgaatacaacgccgctcagcgcttcactgctgatgtaggagtc

SEQ ID NO: 4117 - DNA, 420 bp, Homo sapiens
  misc_feature (29)..(29): n is a, c, g, or t
  misc_feature (39)..(39): n is a, c, g, or t
  misc_feature (62)..(62): n is a, c, g, or t
  misc_feature (387)..(387): n is a, c, g, or t
ttcggcacaggagcgaggagacccgagangcagacgcgnccctggcgcccgccctgcgcagntcaccatggcgatgcatttcatcttctcagatacagcggtgcttctgtttgatttctggagtgtccacagtcctgctggcatggccctttcggtgttggtgctcctgcttctggctgtactgtatgaaggcatcaaggttggcaaagcaagctgctcaaccaggtactggtgaacctgccaacctccatcagccagcagaccatcgcagagacagacggggactctgcaggctcagattcattccctgttggcagaacccaccacaggtggtgatttgtgtcactttggccagtctctgaatccatgtgcatccaggtggtcatncggctaatttcattcatgctggcctgaatgtcc

SEQ ID NO: 4118 - DNA, 608 bp, Homo sapiens
ttttttttttttttttggttaaaaaaaaaacatatatatatgtgtatatatacatatgtatatatgtacacaaacatataatacttgggaacaataaaatgcataggggtgtgggccttttcacattttaggaagaaaaggtgatccagatggctatctagaaaggcaatgattgagaagggcacccaacaacagcaacaataaaaaaactaccctcaactcctttgcactggttctgtggcttccccaggacagacagagaaatagcctcctggtatgagacaggcccggtgggcacaggcagggctttgagcctcgtaggcatataaaggctaccggtgccaatagagggtctatattccaggcccaaatgccatcaaagcaaaaacaaaatggtgacatcaaaataaaaagagtgctttccacctccagggaacgtcaaagggagcttcaggctaagacaccaagtaccagcagagagggtgcttcaatgcttactgatataaccaaaggtgatgaaaaaaacacatcaaggcatcaaaagcaaggccaaaggagtttttaaaaaatcaaagctcatgaacaactgctaagggcttctaagaaag

SEQ ID NO: 4119 - DNA, 176 bp, Homo sapiens
  misc_feature (146)..(146): n is a, c, g, or t
tttttttttttagggtttttgggtttttggttggttatttgttttgtttttactgcaaatgccttgggttaacaaaggccaacagatttagaaagaatactagccttcttcttactcttgccctccattagagacgtgaacccaangtttctaaaaaccaagaacctcactggctt

SEQ ID NO: 4120 - DNA, 444 bp, Homo sapiens
actaagtccaaggcccagctctttaaaaggcaccacacagatgtagttggttacattgtcactctcagagttcaggggtttttcagcatatatagggtagctagccttgctgcttggaagttggctcttagagttcggtagacagctttccgaagaccgatgagatgctgacttggatgctgtccagctttattaaatgggcaagcagcactgaccctgtcaagcaaacttgaaaagtaaaatgtgatacaactgtacaggtgtcctaaagtttttgtttcctaaatccacaattctattaaatgtagaaaacaaattcctctttcatgatcttcactagaaaatgattatacatatgtcaactcaggtctcataaaatagtcatttctgtgactagatatatatatatatgtatatatagacaaccactaaaaaaaagacaat

SEQ ID NO: 4121 - DNA, 400 bp, Homo sapiens
tcctggcttaagtccagggcatagcacagcaaaatctaccctttggacgttcataaagaacatgcatagttctggcctcgtggcggtcgcagctctcccagggccctgctcttctctgagtgaccactgccctctggtctggtggacgcctgggcatctgtttctatgaaacaacctgtttgtttctgtgtttcaaatatttgtgtttattatggaagagacattattttttcatggaattctgaagactgtcatttttgaaggataagcaaggttttggacaatttgcaattcttacaactgtctgtaaatttacattactgttataaatgagaagacccttctgatattcagacaccttgttaaatactggctcgtcattgatgcgtgcagcccagtg

SEQ ID NO: 4122 - DNA, 479 bp, Homo sapiens
  misc_feature (442)..(442): n is a, c, g, or t
  misc_feature (454)..(454): n is a, c, g, or t
ttacttcgcggtgctacccgtactacattgtctcactagacatgaaggagcttgtagctttgggtgctcgagatcacagaacattttcctttaaaaggaaatgatgccaataacttactacgaaggcggccgaggaacgtgtgtattggctttgtagcaaatgtaatgccctggatcttcctacgagtcctctggtactatgaggtactaacctccactgtaattaatcttaccgccacaaattccatagtgatcctccttccctaaaactatatgtcctctgggattctctgggctaagttgaggattgctaccctgtgccttcaacccttgtgatggtggggatcccagacttcccctatctgttaactaaagggctgttttcaatccaaataattggttaacgagaagcaagactggcgcctgtaagcactgctggttnggagatccaaantagggagattgggggttgggaaagg

SEQ ID NO: 4123 - DNA, 514 bp, Homo sapiens
tttttttttttttttttccgagatacaattcctttattatcattatcatgccccctagcacatgaagctgggcttccacctagatcagctaaggacaggggtatgtttacaatgagaacaatttctctatgcgcattaggttaagacctcttctctgtttctagaatactgtgatgactcacatccatgggccagctgcttccaggaatccatctggcctcaacaacattgggctgcctggaataacggctggcacttgcacagggcagggtatggggagcaggcctcaggtttataagcaggactgggcactgctgaaataggggaagggggcagccaacatgtagcaggttctcccaaggcatgtagaagttggtgggaaaatggggctggggtgtgtaacttgtccccttccaggaaggggaccaggcacctggtctcctgggcaagatcacaggcgatccaagagtcctccagggaagaacaagaactgcacagacgcacagcagagagg

SEQ ID NO: 4124 - DNA, 9180 bp, Homo sapiens
  misc_feature (9113)..(9113): n is a, c, g, or t
ctggtcttgaactcctggcctcaagcaatcctcctgcttcagcttcccaaagtgttgtaattacaggcatgagcctggcatgaacttgacactattgagatatactggtcaggtattttgtggaatgtccctcaactctgttttgccagatgttttctcatgattagaggagagttataaattttgaggaaaatccagagaggtgaagaggtgaagtagggcagaaatttaatctgttttatttactgctatataccgagtgtctggaacttggcccatggtaagtaccaaaaatctgttttttttgaatgaataagcaaataaatgagtgaccgtggaaatttagtattatttcaaagtttcaaagcgttgttgatacaggccaggcacagtggctcacacctgtaatcccagcacttttggaggccgaggtaggaggatcacttgaggtcaggagttcgagaccagcctgaccaacatggtgacacccctgtctctactaagtaaaatacaaaaattagccaagtgtggtggcaggcacctgtaatcccggctacttgggaagctgaggcagaagaatcacttgaacctgggaggcagaggttgcagtgagccgagatcaccccactgcactccagcctgagtgacagagcgagactctgtctcaaaacaaataaacaaataactactctttggccgggtaaggtggttcacgcctgtaattttagcactttgggaggctgaggcgggcagatcacttgaggttaggggttcgagaccagtctggccaacatggtgaaaccccatctctacttaaaatacaaaaagttttctgggtgtggtggcggacgcctataatcccagctacttgggacttttttttaagacggaatctcactctgttgcccaggctggagtgcagtggcaagattctggctcactgaagcctccgcctcccaggttcaaggggattccccgcgcctcagcctcccaagtagctgggaatccctgtctctgcaaaaaaaaaaaaaaaaaaaaacaaaaaatatatatatatatatatatgtgtgtgtgtgtgtgtgtgtgtgtgttatatgtatatatatttatgtatatgcacatacacacaaaattaggcgggagtggtggcgcacgcctgtgatcacagctactcgggaggctgaggcacgagaatcgcttgagcccgtgaagtcgaggctgcagtgagcccagatcgagccactgcattccagcctgggcgaaagagaaagaccgtgtctcaaaacaaacaaacaaaagctactcttagcacgtgttagagtatctcgcgggcggaagtgggaaacgagtgctgcacacagagtaggcatctttatatgttaacagacactgatacccagctaaagcggctgaacacatttactctctggcagtgtttaaaagtatctgtttttctcatattgttttattttaattttttctggatcaagcaacctgatctttttcctcataacttgccgaccgacccgtgacagcaaaaccggcagaagctcggcgacctcccaccccgagtctgcaggtagtgcccccggactacattttccagaaggcactgcgggcacgcttcctgcctggtcggcctgaagggaagggccaatccctgagtatctcgggaaggaggtgtccggagccgcggacctagagatcccagaagccacagcgcagcggcccggcccgccactatttccaggctctgcggggcaggggtgggcccagactccacttcccggcgggtagtgcgaccctaggggcgggacttcatgtcccagcaggctccgggcggcgtgcgccgcggtgcctagtgtgggatgtaagcgcggaggtgggcgagggggaccgaggccaggactctccttggggtttgggggcttgacctgggtgcgctttctggacagactttacagcccccgggggcacagtcgtagagagggggcggggcggccattggggctcctcattggggtgcttggggcgcaccccatcgggtaccgggcgtcccggaattgtgggggacaaaaaggctctgcagtctcggctgaggggtctcaccgacaaaagaggggaagccggtgagcagaggctgaagagggtggggaagcaggggagctgtgcgtgtgtcggggcgggtggaaccttagcggaccctgggaggaggctccccggccgaacctgcccgaccctccctcccccggcttgccttgcaggccgccgcccaccgcccgccgccatggggctgaaggccgcccagaagacgctgttcccgctgcgctccatcgacgacgtggtgcgcctgtttgctgccgagctgggccgagaggagccggacctggtgctcctttccttggtgctgggcttcgtggagcattttctggctgtcaaccgcgtcatccctaccaacgttcccgagctcaccttccagcccagccccgcccccgacccgcctggcggcctcacctactttcccgtggccgacctgtctatcatcgccgccctctatgcccgcttcaccgcccagatccgaggcgccgtcgacctgtccctctatcctcgagaagggggtgtctccagccgtgagctggtgaagaaggtctccgatgtcatatggaacagcctcagccgctcctacttcaaggatcgggcccacatccagtccctcttcagcttcatcacaggttggagcccagtaggtgggaatcttatccatgacccacttcttcaaaaccctccatggtttacagaacccttttaagaactgtaagccttgtgaggttcggcaggtgttattttcctctttgcagttgggaaactgaagcccagagaggggaaatgatatgccaaagtcacacacggcatggcagggctggaagtgaagcctgatcacttggctccaaatcatcaacctcacctctgccccctcagcacccccacccttgccactgaacagctacaggagttctaagcatgagacacagagggcggcagcagatttagggggcaagaagatgaaattgggctgcatttgaggcagttaaacaaaataatggctatgaagatttttttttttttttttttttgagacagggtctcactctgtcccccaggctggagtgcagtggtgtgatcatggctcactgcagcctcagtctccctgggctcagagatcctccaacctcagcctcctgagtagctgagagtacaggcatgcaccgtggtgctggttaattttttgtattttttttgtagagatggtgtctcactatgtggcccagactggtcttgaactcttgggctcaagtgatctgcccgcctcagtctcccaaatgctgggattacaggtgtgagccaccgcaactggtggcctatgaaaattttttttttttttcagacggcgtctcactctgtcgcccaggctggagtgcagtggtgcaatctcggctcactgcaagctctgcctcctgctttcatgccattctcctgcctcctgcctcagcctcctgagtagctgggactacaggagcctgccaccatgcctggctaatttttttttggatttttagtagagacgaggtttcaccatgttagccaggatggtctcgatctcctgacctcgtgatccgcccgccttggcctcccaaagtgctgggattacaggcgtgagccaccgcacctggtcaaaaatgtttgagacagagaaggggcttgacctcaaaaggcttaagagtcagggcttgcaaagagctttgcaccaagcccggttgactggcaatcccatcctggtgtgccatattgagaaggaatcagaggctgcttctcagcttagcaggaaaagagtgcagagataaatgagggttatttgttggtgggtgtatagccagagagtgttggccagcgtcctgtttttgccattcctgttttaacctagtaagtgcagtaaaatggaatccctaaatccatagaatatataatagagttgcagagaaagacgaggtagggccaaaggctgggtcagctacaggatatccagaaaggtatcttgttggacatagagggtgtaaacagggagagagtctttgaacacgtgggagggaagggatggagggatagtgggcaggagaatctgaggttgggtcacaggcttggaaagggagtgggagggagtgtggcccatcactacctggcccctttccccatgttaaagcacagaggaccctctttcattacctcccccttccacaggcaccaaattggacagctccggtgtggcctttgctgtggttggggcctgccaggccctgggtctccgggatgtccacctcgccctgtctgaggatcatgcctgggtagtgtttgggcccaatggggagcagacagctgaggtcacctggcacggcaagggcaacgaggaccgcaggggccagacagtcaatgccggtgtggctgagcgggtattgttccctccccccagccttgtccccttcatactgtagtagcccaagccacccaagggactccattttcttgggccacacccctttcttcccatcaccacccacataggaagggaagacagaagagccccttttcctggctgtcattccctgaagcaggcacagggtgggccatcatgagacataatgatctcatccccccctaagagctggctgtacctgaaaggatcatacatgcgctgtgaccgcaagatggaggtggcgttcatggtgtgtgccatcaacccttccattgacctgcacaccgactcgctggagcttctgcagctgcagcaggtgagggctgagccaatggggcaggactgggctaggccagacttgacttgctgtgggaccctgggcaggggcactttcccttcctgagcttcagcttcccctcctggaaaaatgggttagtaattcctggcctggcctttcccagggctcttgggagagtagaattgagatgtgaaattgctttgactccattaaagggctggtcccagaattttggcccttccacatggtgggtggtccctgttggttctgacccccacctctgcccgataggctaaggacccgttctcctccctgttccgtggctcataactctctccttcggctcctagaagctgctctggctgctctatgacctgggacatctggaaaggtcagtagagggaagtggccaggctgcgcctggtgaggccggggggctgggtggcagcctgaattatgatcctttcctaggtaccccatggccttagggaacctggcagatctagaggagctggagcccacccctggccggccagacccactcaccctctaccacaaggtgggggcatctaaggagggtgcagaagggagaccctaacagtggctgaggcaggggccctcatctgggcagatgagaagagaactttgtgtgttggggggtatcgcccatccagtctcactttgtgtcaactgtgtgcagaatcagttcagtcagggctgtctgaggggtgtccagggttccccagcctgggagtggcaggggctgcatttgtcccctcagccctgccttttctgccactgcttactgtccttcctggagtataacagaggtcaaatgtggtaggagcactgaagagggggtgttcacttggtgggtgtaggtggggaggagggccattgggctgggcttgaaagtctttggtgatgtgtagaagagtgtctgagaaagagaagggccctgagctcggagggcaggccccacccctgcagtctgccccaggcctcagccagcagtcctgtagacccagggaggagaccaggtagaagggctggcagcgagtggaggtgggagtggagatggagaggactccctgggatcttcctgtggccccttctgggtgtgccctggtggggcatttgtgccagcagggcagctggggctgcctccctgaggatcctctgcctcacctccatccagggcattgcctcagccaagacctactatcgggatgaacacatctacccctacatgtacctggctggctaccactgtcgcaaccgcaatgtgcgggaagccctgcaggcctgggcggacacggccactgtcatccaggagtgaggatccccctactagggcctgcagcctgtcctttcttcccctccatcagtttccaaccaccctcgtccaggactgaggcctggctcccacgccccatcccctttccatccagtccctaggcagcaaggccaccattacccaggaggtagggaccctgattaaggtgtcacatctttccctccctcccctctcctcctaattttttttttctcagaacagtctcaaatctccaatgtttaaccaccatcatccagcagtgggacttccaccctcggccccatgcccccctcctcattcttgctttcttcctctgggctgacccagacagcatcattttgcagtgaggaccccacctactcccccagcccctgggggctccatcccccgccaggtccctggggctacccccgatggtgagaccccttcagaccctacagagaccccactgctctcacagctacaactactgccgggaagacgaggagatctacaaggagttctttgaagtagccaatgatgtcatccccaacctgctgaaggaggcagccagcttgctggaggcgggcgaggagcggccgggggagcaaagccaggtgaaaggctggagctccagcctgtgtccagcctcccacctggacagggctcccttccacagggccatgggggctgcatgtacgggattagggatggcaggaggaaggtggccctgagcagacagctatgttcccttttgctataactgaggtcctgggcccacgttggacgggactgaaggtattttagaggtttctaccctgtgccttcagtttcatggccagactccctccctcagctgaggggtggaggtagggatggtacgtcctggctatggattggctttataaaaggaaagaggttctaagaatgttcccaacctatgcttaccttttctggagccaggggtctttgcctaggtggggggcctggcctgtgccctctgctaaggggtgagtaagagactgatctgtgccctcccttccccctcgtccagggcacccagagccaaggttccgccctccaggaccctgagtgcttcgcccacctgctgcgattctacgacggcatctgcaaatgggaggagggcagtcccacgcctgtgctgcacgtgggctgggccacctttcttgtgcagtccctaggccgttttgagggacaggtgagggacagctgcacagaggtctgggcactacaggtggtgacagcagccacgggcttgtcagacttttctggcccaggggcagcatctgcccatccccttcggtgccgatgggactgagaccccctgggtgggatgggatggccagagcagggtcctggagttccagccactggccggcaaccttgctctcaccttgctctccccactggcccaggtgcggcagaaggtgcgcatagtgagccgagaggccgaggcggccgaggccgaggagccgtggggcgaggaagcccgggaaggccggcggcggggcccacggcgggagtccaagccagaggagcccccgccgcccaagaagccagcactggacaagggcctgggcaccggccagggtgcagtgtcaggacccccccggaagcctcctgggactgtcgctggcacagcccgaggccctgaaggtggcagcacggctcaggtgccagcacccgcagcatcaccaccgccggagggtccagtgctcactttccagagtgagaagatgaagggcatgaaggagctgctggtggccaccaagatcaactcgagcgccatcaagctgcaactcacggcacagtcgcaagtgcagatgaagaagcagaaagtgtccacccctagtgactacactctgtctttcctcaagcggcagcgcaaaggcctctgaactactggggacttcggaccgcttgtggggacccaggctccgccttagtcccccaactctgagcccatgttctgcccccagcccaaaggggacaggcctcacctctacccaaaccctaggttcccggtcccgagtacagtctgtatcaaacccacgattttctccagctcagaacccagggctctgccccagtcgttagaatataggtctcttctcccagaatcccagccggccaatggaaacctcacgctgggtcctaattaccagtctttaaaggcccagcccctagaaacccaagctcctcctcggaaccgctcacctagagccagaccaacgttactcagggctcctcccagcttgtaggagctgaggtttcacccttaacccaagggagcacaggtcccacctccagcccggggagcctaggaccactcagcccctaggagtatatttccgcacttcagaattccatatcttgcgaatccaagctccctgccccaaataacttcagtcctgcttccagaatttggaaatcctagtttcctctccttcgtatcccgagtctgggacacaaaactccgcccccagcctatgagcatcctgagccccgccctcttcctgacgaaactggccccggatcagagcaggacctcccttccgaccctctgggaacctcccagaggtccagcccatctcggagcatcccggaggaaatctgcagaggggttaggagtgggtgacaagagcctgatctcttcctgttttgtacatagatttatttttcagttccaagaaagatgaatacattttgttaaaaaaaatataaagcgcaagtccatgtttatctgggaaattggggatggggcggggagtggagcgccccttcttccctttgtcttctggctcccgggactttgcgctccctacctgtggagcgcgagcgacagtggcggcggaaggacgtaggctccgccccggccttggggcttcccccgcgccgccgagggcccgtcccgcgggcgcctcctcccggactggcggtggggcatcccngggcgcggccccgcccccgggcttcagccccgcccccgcggcttcagagccacgggcgcccgccccg

SEQ ID NO: 4125 - protein, 615 aa, Homo sapiens
MGLKAAQKTLFPLRSIDDVVRLFAAELGREEPDLVLLSLVLGFVEHFLAVNRVIPTNVPELTFQPSPAPDPPGGLTYFPVADLSIIAALYARFTAQIRGAVDLSLYPREGGVSSRELVKKVSDVIWNSLSRSYFKDRAHIQSLFSFITGWSPVGTKLDSSGVAFAVVGACQALGLRDVHLALSEDHAWVVFGPNGEQTAEVTWHGKGNEDRRGQTVNAGVAERSWLYLKGSYMRCDRKMEVAFMVCAINPSIDLHTDSLELLQLQQKLLWLLYDLGHLERYPMALGNLADLEELEPTPGRPDPLTLYHKGIASAKTYYRDEHIYPYMYLAGYHCRNRNVREALQAWADTATVIQDYNYCREDEEIYKEFFEVANDVIPNLLKEAASLLEAGEERPGEQSQGTQSQGSALQDPECFAHLLRFYDGICKWEEGSPTPVLHVGWATFLVQSLGRFEGQVRQKVRIVSREAEAAEAEEPWGEEAREGRRRGPRRESKPEEPPPPKKPALDKGLGTGQGAVSGPPRKPPGTVAGTARGPEGGSTAQVPAPAASPPPEGPVLTFQSEKMKGMKELLVATKINSSAIKLQLTAQSQVQMKKQKVSTPSDYTLSFLKRQRKGL

SEQ ID NO: 4126 - DNA, 429 bp, Homo sapiens
ttttttttttttttttttttttttttttttttttttttttttttttaaacggggaataccattgggtttattgatcaaacctggcttcgagggggacaaaaccatttttggttttccttggaagtaacaaaaacactgggtaacatgtgaagggcatggagactcacctgaatcccaccaaagtagtagctggacccaatagcctagcttattgttttgggagggccccctacccagaaccattaaacctgggtttggcccttacataggacaaactgggcttttccactcccgccagggtggccctacctccacctgtccttggaagctagtatgtaagtaagggaggagtcatcaagtttataaatgggtaggctgaggattgaggcaggaggggacttaatggctgagtccctggcttgttccaaa

SEQ ID NO: 4127 - DNA, 3946 bp, Homo sapiens
accgctccggagcgggaggggaggcttcgcggaacgctctcggcgccaggactcgcgtgcaaagcccaggcccgggcggccagaccaagagggaagaagcacagaattcctcaactcccagtgtgcccatgagtaagagcaaatgctccgtgggactcatgtcttccgtggtggccccggctaaggagcccaatgccgtgggcccgaaggaggtggagctcatccttgtcaaggagcagaacggagtgcagctcaccagctccaccctcaccaacccgcggcagagccccgtggaggcccaggatcgggagacctggggcaagaagatcgactttctcctgtccgtcattggctttgctgtggacctggccaacgtctggcggttcccctacctgtgctacaaaaatggtggcggtgccttcctggtcccctacctgctcttcatggtcattgctgggatgccacttttctacatggagctggccctcggccagttcaacagggaaggggccgctggtgtctggaagatctgccccatactgaaaggtgtgggcttcacggtcatcctcatctcactgtatgtcggcttcttctacaacgtcatcatcgcctgggcgctgcactatctcttctcctccttcaccacggagctcccctggatccactgcaacaactcctggaacagccccaactgctcggatgcccatcctggtgactccagtggagacagctcgggcctcaacgacacttttgggaccacacctgctgccgagtactttgaacgtggcgtgctgcacctccaccagagccatggcatcgacgacctggggcctccgcggtggcagctcacagcctgcctggtgctggtcatcgtgctgctctacttcagcctctggaagggcgtgaagacctcagggaaggtggtatggatcacagccaccatgccatacgtggtcctcactgccctgctcctgcgtggggtcaccctccctggagccatagacggcatcagagcatacctgagcgttgacttctaccggctctgcgaggcgtctgtttggattgacgcggccacccaggtgtgcttctccctgggcgtggggttcggggtgctgatcgccttctccagctacaacaagttcaccaacaactgctacagggacgcgattgtcaccacctccatcaactccctgacgagcttctcctccggcttcgtcgtcttctccttcctggggtacatggcacagaagcacagtgtgcccatcggggacgtggccaaggacgggccagggctgatcttcatcatctacccggaagccatcgccacgctccctctgtcctcagcctgggccgtggtcttcttcatcatgctgctcaccctgggtatcgacagcgccatgggtggtatggagtcagtgatcaccgggctcatcgatgagttccagctgctgcacagacaccgtgagctcttcacgctcttcatcgtcctggcgaccttcctcctgtccctgttctgcgtcaccaacggtggcatctacgtcttcacgctcctggaccattttgcagccggcacgtccatcctctttggagtgctcatcgaagccatcggagtggcctggttctatggtgttgggcagttcagcgacgacatccagcagatgaccgggcagcggcccagcctgtactggcggctgtgctggaagctggtcagcccctgctttctcctgttcgtggtcgtggtcagcattgtgaccttcagacccccccactacggagcctacatcttccccgactgggccaacgcgctgggctgggtcatcgccacatcctccatggccatggtgcccatctatgcggcctacaagttctgcagcctgcctgggtcctttcgagagaaactggcctacgccattgcacccgagaaggaccgtgagctggtggacagaggggaggtgcgccagttcacgctccgccactggctcaaggtgtagagggagcagagacgaagaccccaggaagtcatcctgcaatgggagagacacgaacaaaccaaggaaatctaagtttcgagagaaaggagggcaacttctactcttcaacctctactgaaaacacaaacaacaaagcagaagactcctctcttctgactgtttacacctttccgtgccgggagcgcacctcgccgtgtcttgtgttgctgtaataacgacgtagatctgtgcagcgaggtccaccccgttgttgtccctgcagggcagaaaaacgtctaacttcatgctgtctgtgtgaggctccctccctccctgctccctgctcccggctctgaggctgccccaggggcactgtgttctcaggcggggatcacgatccttgtagacgcacctgctgagaatccccgtgctcacagtagcttcctagaccatttactttgcccatattaaaaagccaagtgtcctgcttggtttagctgtgcagaaggtgaaatggaggaaaccacaaattcatgcaaagtcctttcccgatgcgtggctcccagcagaggccgtaaattgagcgttcagttgacacattgcacacacagtctgttcagaggcattggaggatgggggtcctggtatgtctcaccaggaaattctgtttatgttcttgcagcagagagaaataaaactccttgaaaccagctcaggctactgccactcaggcagcctgtgggtccttgtggtgtagggaacggcctgagaggagcgtgtcctatccccggacgcatgcagggcccccacaggagcgtgtcctatccccggacgcatgcagggcccccacaggagcatgtcctatccctggacgcatgcagggcccccacaggagcgtgtactaccccagaacgcatgcagggcccccacaggagcgtgtactaccccaggacgcatgcagggcccccactggagcgtgtactaccccaggacgcatgcagggcccccacaggagcgtgtcctatccccggaccggacgcatgcagggcccccacaggagcgtgtactaccccaggacgcatgcagggcccccacaggagcgtgtactaccccaggatgcatgcagggcccccacaggagcgtgtactaccccaggacgcatgcagggcccccatgcaggcagcctgcagaccaacactctgcctggccttgagccgtgacctccaggaagggaccccactggaattttatttctctcaggtgcgtgccacatcaataacaacagtttttatgtttgcgaatggctttttaaaatcatatttacctgtgaatcaaaacaaattcaagaatgcagtatccgcgagcctgcttgctgatattgcagtttttgtttacaagaataattagcaatactgagtgaaggatgttggccaaaagctgctttccatggcacactgccctctgccactgacaggaaagtggatgccatagtttgaattcatgcctcaagtcggtgggcctgcctacgtgctgcccgagggcaggggccgtgcagggccagtcatggctgtcccctgcaagtggacgtgggctccagggactggagtgtaatgctcggtgggagccgtcagcctgtgaactgccaggcagctgcagttagcacagaggatggcttccccattgccttctggggagggacacagaggacggcttccccatcgccttctggccgctgcagtcagcacagagagcggcttccccattgccttctggggagggacacagaggacagtttccccatcgccttctggttgttgaagacagcacagagagcggcttccccatcgccttctggggaggggctccgtgtagcaacccaggtgttgtccgtgtctgttgaccaatctctattcagcatcgtgtgggtccctaagcacaataaaagacatccacaatggaaaaaaaaaaaggaattc

SEQ ID NO: 4128 - protein, 620 aa, Homo sapiens
MSKSKCSVGLMSSVVAPAKEPNAVGPKEVELILVKEQNGVQLTSSTLTNPRQSPVEAQDRETWGKKIDFLLSVIGFAVDLANVWRFPYLCYKNGGGAFLVPYLLFMVIAGMPLFYMELALGQFNREGAAGVWKICPILKGVGFTVILISLYVGFFYNVIIAWALHYLFSSFTTELPWIHCNNSWNSPNCSDAHPGDSSGDSSGLNDTFGTTPAAEYFERGVLHLHQSHGIDDLGPPRWQLTACLVLVIVLLYFSLWKGVKTSGKVVWITATMPYVVLTALLLRGVTLPGAIDGIRAYLSVDFYRLCEASVWIDAATQVCFSLGVGFGVLIAFSSYNKFTNNCYRDAIVTTSINSLTSFSSGFVVFSFLGYMAQKHSVPIGDVAKDGPGLIFIIYPEAIATLPLSSAWAVVFFIMLLTLGIDSAMGGMESVITGLIDEFQLLHRHRELFTLFIVLATFLLSLFCVTNGGIYVFTLLDHFAAGTSILFGVLIEAIGVAWFYGVGQFSDDIQQMTGQRPSLYWRLCWKLVSPCFLLFVVVVSIVTFRPPHYGAYIFPDWANALGWVIATSSMAMVPIYAAYKFCSLPGSFREKLAYAIAPEKDRELVDRGEVRQFTLRHWLKV

SEQ ID NO: 4129 - DNA, 465 bp, Homo sapiens
ttttaagattgtatcatacttgtatttttgcacatgtgcattacaatgtctatacaagactaactagcaacagcaaaagacttccaataacctaactagccatcagtagaaggaaacaggataaatgaaatatggaacttccataaaatagaatactacatagccatatatttttaatttaaaaaataaagttcagaacagtgaacttagacagctgctgtttgcgaaaatactgagcaagaataaagatatacatatttgcttaatacacagtaaacttctctggaaagataaacacaaagctggaagaacggattgcctatgcaagaggaattagcaaaccttgagaaggattgagagtgaggctttcctctgtatacttctttgtgtcttttgaatttcaaaccacattcatatattgcttatttaaataaataaataatatattttaaaaagaggatagta

SEQ ID NO: 4130 - DNA, 3134 bp, Homo sapiens
gagaaaaaatcaccacatggcaagaccctaggaaggcgatgaatcagcctctgaatcatatgaacctccaccctgccgtcagttccacaccagtgcctcagaggtccatggcagtatcccagccaaatctcgtgatgaatcaccaacaccagcagcagatggcccccagtaccctgagccagcagaaccaccccactcagaacccacccgcagggctcatgagtatgcccaatgcgctgaccactcagcagcagcagcagcagaaactgcggcttcagagaatccagatggagagagaaaggattcgaatgcgccaagaggagctcatgaggcaggaagctgccctctgtcgacagctccccatggaagctgagactcttgccccagttcaggctgctgtcaacccacccacgatgaccccagacatgagatccatcactaataatagctcagatcctttcctcaatggagggccatatcattcgagggagcagagcactgacagtggcctggggttagggtgctacagtgtccccacaactccggaggacttcctcagcaatgtggatgagatggatacaggagaaaacgcaggacaaacacccatgaacatcaatccccaacagacccgtttccctgatttccttgactgtcttccaggaacaaacgttgacttaggaactttggaatctgaagacctgatccccctcttcaatgatgtagagtctgctctgaacaaaagtgagccctttctaacctggctgtaatcactaccattgtaacttggatgtagccatgaccttacatttcctgggcctcttggaaaaagtgatggagcagagcaagtctgcaggtgcaccacttcccgcctccatgactcgtgctccctcctttttatgttgccagtttaatcattgcctggttttgattgagagtaacttaagttaaacataaataaatattctattttcattttctgcaagcctgcgttcttgtgacagattatacagaattgtgtctgcaggattgattatgcagaatacttttctctttcttctctgctgccccatggctaagctttatgggtgttaattgaaatttatacaccaattgattttaaaccataaaaagctgaccacaggcagttacttctgagggcatcttggtccaggaaatgtgcacaaaattcgacctgatttacagtttcaaaaactgtattgatgacagtagtaccaaatgctttaaaaactatttaacttgagctttaaaaatcattgtatggatagtaaaattctactgtatggaatacaatgtaattttgaatccatgctggctctgatggctcttattagtctgtatttataaaggcacacagtcctattgtagcttatctttcgttattttactgcagagcatctagacaacttagtccctccagcgtgaaagtagcagcagcagcattagtcacagttcttacactacagatcttgtgaaagagaccagtttggtactaattatgagcattttattcaaacaaaagtttttgaaatattacaactggggatttaaaaaattgcagcttagaatctgatggttttttttttttcttgatgttgtttgtttgtttttgagatcgagttttgctcttgttgtccaggctggaatgcaatggcacaatctcggctcactgcaacctctgccttctgggttcaagcgattctcctgccttagcctcccgagtagctgggattacaggcgcctgccaccacgtccggctaattttttgtattttgagtagagacggggtttcaccataatggtcaggctgttctcaaactcctgatctcaggtgatccacccatctcggccttccaaagtgctgggattactggcgtgagccaccgcacccggccttgatgtttattttataaagcactgtaattttgtagctgatgacaaaaggcagccaaatgtttttgataaatcagtggcaactgtatttttgtcttttgaaataactctgaaaacatcaggacaacatagatttcaacctgatagcacaccacacacagtgagctgttgctttttaaattctgaagccttgtcaggtttgcttcctagatttcaagtgtttaaaataattctatctatgaaactgaaggatgaagcagatctctgactgacatgtaaaaaaaaatgccctttgagggtgtatggtggagataaatgtttctgaattcagtaaaattgattcctaagtatattatcctaatcctgtttgctacagttggtataaaaaggcatgaaatatgtattcaatacctcttatgtaaccaaaaccatttttaattagcttttaaggactgagagagcatcatgttcaactggcatgcagtctgcctgcattgccaatgaagtcctcaactgtttaatattttgaactaatattatttataatctatgaatttaatcttttttgaaagactttaataatttgagtctctgagaggatactttcaatttccatgggggacttatttgttggggatcttaaataagattccttttgatctaccggaatatacatgtacagagtacattggatcatgttggaaagaaggcaagtgaaaaggtcagagatgaagtagcgaagttatggaatatcgtggaaaggatactagttgtgaaatggaaagagacaagttatagtaccccaaaagcaaaacaagcaggagatgcaagagatgccccaaaaggacaaagcaacaattttctgttgccacctttataccggaagactctgttgtagaagaaaagaaggctttggtgcaccttatgtgggaggaggaggggcagggcatgctgatgctgagcgtacaggcagacaagagcgtagcctgctgttgcctccatcactatgaaatgacttattttacctgaaggacccatggtttatgttcctctaattcctttcactctccctaagccctctgagagagatgaagatagatgattttattgctactaaattgaagggagcactatttctttttgtcttttgttagcaaaaaattgcaaaaagaattgtacattcttgctaaaaataaataaataaataaaaaaaaaaaaaaaaa

SEQ ID NO: 4131 - protein, 254 aa, Homo sapiens
EKITTWQDPRKAMNQPLNHMNLHPAVSSTPVPQRSMAVSQPNLVMNHQHQQQMAPSTLSQQNHPTQNPPAGLMSMPNALTTQQQQQQKLRLQRIQMERERIRMRQEELMRQEAALCRQLPMEAETLAPVQAAVNPPTMTPDMRSITNNSSDPFLNGGPYHSREQSTDSGLGLGCYSVPTTPEDFLSNVDEMDTGENAGQTPMNINPQQTRFPDFLDCLPGTNVDLGTLESEDLIPLFNDVESALNKSEPFLTWL

SEQ ID NO: 4132 - DNA, 394 bp, Homo sapiens
  misc_feature (25)..(25): n is a, c, g, or t
  misc_feature (32)..(33): n is a, c, g, or t
  misc_feature (48)..(48): n is a, c, g, or t
  misc_feature (51)..(51): n is a, c, g, or t
  misc_feature (62)..(62): n is a, c, g, or t
  misc_feature (77)..(77): n is a, c, g, or t
  misc_feature (271)..(271): n is a, c, g, or t
  misc_feature (299)..(299): n is a, c, g, or t
  misc_feature (327)..(327): n is a, c, g, or t
  misc_feature (337)..(337): n is a, c, g, or t
  misc_feature (356)..(356): n is a, c, g, or t
  misc_feature (363)..(363): n is a, c, g, or t
  misc_feature (371)..(371): n is a, c, g, or t
  misc_feature (392)..(392): n is a, c, g, or t
ctccacaggtaggcgcagtcagctngagctgnnccggcggtccgcttncgntggagggcgtntcctgcggcgcgatngccgtagtgttgccggcggttgtggaggagctcctgagcgagatggcggcggcggtgcaggagagcgcgcgaagtacgggaccgagttcctgatgaatatctgttatcgctgaagtttctctttggctcatcagccacccaggcctttgacctagttgatcgacagtccatcaccttaatctcatcacccagtngaaaggcgtgtttaccaggtccttgganagttccagtaaaacatacacatgttttngcttgttgtnattactgttgcatgtcctngcatttngcattttncagtgtctaagggaagagttnac

SEQ ID NO: 4133 - DNA, 625 bp, Homo sapiens
tccgtctgtgggttaccacctggttggaaggctgtgggtcagggaacccgagcccaaggagtgggggcggccccggagcgaggctcacactccctgccctgcagatgactgtccacaacctgtacctgtttgaccggaatggagtgtgtctgcactacagcgaatggcaccgcaagaagcaagcagggattcccaaggaggaggagtataagctgatgtacgggatgctcttctctatccgctcgtttgtcagcaagatgtccccgctagacatgaaggatggcttcctggccttccaaactagccgttacaaactccattactacgagacgcccactgggatcaaagttgtcatgaatactgacttgggcgtgggacccatccgagatgtgctgcaccacatctacagtgcgctgtatgtggagctggtggtgaagaatcccctgtgcccgctgggccaaactgtgcaaagtgagctctttcgctcccgactggactcctatgttcgctctctgcccttcttctccgcccgggctggctgaagcaacctacctcaagtctcaggagaattcatgtctgcctggggccttccgaacctgtgccactaagggccccattgaagccc

SEQ ID NO: 4134 - DNA, 420 bp, Homo sapiens
  misc_feature (387)..(387): n is a, c, g, or t
  misc_feature (410)..(410): n is a, c, g, or t
  misc_feature (413)..(413): n is a, c, g, or t
  misc_feature (418)..(420): n is a, c, g, or t
gctcgcagtaagaggtggggcccattgaacacaatcgaacagttggggtcacagctgtgattgagcaaagagatactgggatataggccaacaccaacttcctgcatctccgcattacagatggtgaaagagttgcagatcacttttgcaaaggcttcaaaaaggtcaaaggcaggtggcagctgagaggcatcctgtatttcttctctcatgaaatgttgaaatgtcattacgagttgcctgaggccctctttcttatcttcagtcagtttgttaatatttgactccagatcataaaatgagtaaagcttctctgattctgaaggtgctccatccataagtttgaggaaactctgccaagaagtcgaacggagctgcgggaggggnattcagcttggcttacccagttnatnaaaannn

SEQ ID NO: 4135 - DNA, 319 bp, Homo sapiens
  misc_feature (173)..(173): n is a, c, g, or t
gtattctccaagctgtgatacacagtttttttttattgtcacagggaaataaatggtaccagaagtccctttcctgttctgtctcttcattgtaatggaagtttcagttgggcatgagcctggagagatgtgactgtctacagttctatttgtatatataaaaagaagactgnaagtctttttgacatggatattgtgaatggtatgagcttttaaaccatattattgatgatgaaaattatttcctgggaactcagtaggaataataccgtattaaggaataatactgtacataaaacatcatgaaaccctagatatg

SEQ ID NO: 4136 - DNA, 621 bp, Homo sapiens
ttgaatttaggtgacactatagaagagctatgacgtcgcatgcacgcgtacgtaagcttggatcctctagagcggccgcctactactactaaattcgcggccgcgtcgactttttttttttttttttttatgttcatgcagtttcaacacattttattatatttctgtatgcattactctcaaaacatcacaagaaatgatcaaaccacttaaaaccttcaaataaaaaatctgaaacagtttatgcccacaattgtacatatttatagttaagaaacattctttataaatattgtttcctctgtagcaagttaataccataatttaattacaaatggataaatatggtaacgggtatttacagaaggaagggtgttattacggaaaaagctaacggcacgacgtttatttttcccccacaatctttcatacaggaactaacaaattgaacttgcaaaagcactaaaacatcacatgtaaacccagctaacagaaaaatacattcacaagcgttgttggtggtggtgtgtatgtgtgtgctatgggtcaatgtgctgaagaaacaaaagggagactttggcacggctcatttttttcagtcttttagttacatgaaagtta

SEQ ID NO: 4137 - DNA, 407 bp, Homo sapiens
  misc_feature (252)..(252): n is a, c, g, or t
  misc_feature (379)..(379): n is a, c, g, or t
  misc_feature (398)..(398): n is a, c, g, or t
tcctcagagaggccttccctgaccaccatagttaaagttaccattcttaattccattcccttttattctctatcctgattattttcttcatggccccatcacagtttgtaataatgttattaatttgtttctttgcttagtgtctgcttcctccactaaacagaaagctcgatgagggcagggactgtgtctgttttgttccctgctgtatccccagcacctaaggcagtgctcctaggaagagtattcaanaaatatttatcctacgatggaatcaatgaatttaacaatgagtctttggtcacctagccaagggaatggatcgaaccctgccccttatggcaaagatttaatggttagttgggcaccttgggtaatntggaaaaggacttgttctngttttaagt

SEQ ID NO: 4138 - DNA, 378 bp, Homo sapiens
tttttttgagatttcagacagttttattaggagattgttgaaaaggaaaagaaaattaaatacaataacagtaaacgtggttctcacattgaaaccaggctcaaataactaggctaccatagaaaaatttccaattcttgcattatgatgtaaaaacagatttttgtacagattttgtacaacaaaattcgtaataaccttttatcatttttagaaaactttaaatatatagataaaaatagacaattttcataggtcctacatgaagatgagtatgttctgttccaagggcttgcatagagcgcaaatgtggttataatatagaacaactagacattaatatttttaggattacaaaagcatggaaaccataaaatg

SEQ ID NO: 4139 - DNA, 3132 bp, Homo sapiens
ctccaggcaacttggggcaagcgtctcagttctcgctctcccttcctcccagcggggtcgccgcagaccccagccctgggagcaccgctctgcagcgcggccggcgggtggagacggttggcccctaaactcgctcgtccagcccaaccgccccggcggcttctcccagccctcgaggctctcctgagcggcctggagaggcgtcgagcgcagcccagcgcccgcctgctcacccgccccggcccgggaagggaattttcggatcctgcgagcccggggcgcccccgcggcctagggcgggcagctcccggggcctggccgagccggtggcgcccgggaggccgcggggacagcacgcagcgcgcgcccttggatgccgtcccgcagcgacgccccggcccgccccgctcctcctcctgcctggctagcctgcctctcatttgggaagttttgtgggttttctttctcctcctccaaccttggcggaggccacgactcaggcgccacagctgggggctagaggccgcggaccatggtgcggggcagccaccgctgaagtcagcaaaaccgagcctggcctgaggcaggctgcgcgggaggccaaagccatggccattgccacgtcgacccagctggcccgggcactgtatgacaacaccgctgagtccccccaggagctgtccttccgccgaggggatgtcctacgggtcctgcagagagagggcgctggtggactggacggctggtgcctctgctccctacacggccagcagggcattgtgcccgccaacagggtgaagctcttgcctgctggcccagcacccaagcccagcctctctcctgcgtccccagcccagcctggctcaccatatccagccccagatcacagcaatgaggaccaggaggtgtatgtggtgccgcccccagctcggccctgtccaacctcaggacctccagctggaccttgcccaccctctcctgacctcatctacaaaatccccagagctagtgggacccagctggctgctcccagagatgccttggaggtctacgatgtgccccccaccgccctccgggtgccctccagtggcccctatgactgccctgcctccttttcccaccctctgacccgggttgccccgcagccccctggagaggatgatgctccctatgatgtgcctctgaccccaaagccacctgcagagctggaaccagatctggagtgggaaggaggccgggagccggggccccccatctatgctgccccctccaacctgaaacgagcgtcagccttactcaatttgtatgaagcacccgaggaactgctggcagacggggagggcgggggcactgatgaggggatctacgatgtgcctctgctggggccagaggctcccccttctccagagccccctggagccttggcctcccatgaccaggacaccctggcccagcttctggccagaagccccccacccccacacaggccccggctcccctcagctgagagcctgtcccgccgccctctgcctgccctgcctgtccctgaggcccccagcccctccccagtgccctctcctgccccaggccggaagggcagcatccaggaccggcctctgcccccacccccaccccgcctgcctggttatggaggccccaaggtcgagggggatccagagggcagggagatggaggatgacccagcaggacaccacaatgagtacgagggcattccgatggccgaggagtatgactatgtccacctgaagggcatggacaaagctcagggatctaggcccccggatcaggcctgcacaggggatcctgaactgcccgagagggggatgccggcgccgcaggaggccctgtccccaggggagccactggttgtgtccaccggagatctgcagctcctgtacttctatgctgggcaatgccagagccactactcagccctgcaggcagccgtggcagccctgatgtccagtacccaggctaatcagcccccgcgccttttcgtgccccacagcaagagggtggtggtggctgctcatcgcctggtgtttgttggggacaccctgggccggctggcagcctctgcccctctgagagcacaggtcagggctgcaggtacagcactgggccaggcattgcgggccactgtgctggctgtcaagggagctgccctgggctacccatccagccctgccatccaagagatggtgcagtgtgtaacagaactggcagggcaggccctgcaattcactaccctgctcactagcctggctccatgaaggtcctttggcacagctctgctcctcccctgcctgccaaagcccccctttaggccttgggtggctggaaggctttgttaagggactaggagaaatgggggtatctttcccctttcctgccctttctgctcatctcaacctctcacagaggtgtcttctccccctaacctacagctttttgtacaagccattttgtgtaaattatttatatttaatattattccctgctttgtcaggagcaggtactaggctctggggcagtgaggaactagatccttctctcctcagcctagggtggaggtcactgcactaccacccacctctggaagactggctgtgaaaagtcaggtggcagaaacctggggccacatagagcctctctcttttcctgtttcttggctctagaagatcagcactgcactgttagctgagagtgcgggcaagacataaactgtccagagtttgaaggttctcggaaagaccggagggcttctccccacagaaggcggagagagctggggctcagacatgggtgtgcaccttaataaaccctgctgtctgcctccctgactctgcttcttgggagcatggtgagcagccctggtgctcagcagccatacctatgggacacacactacgaaaaggatgcctttagggtttgggggagattttactcctttcttcaacaactattcactggacaagttctctgctcccatgacgcgccaggcacagttctgcaagtatattgtgaatgtattgttctagtgggatacacaaataagtcagttaaaatacataaataaaaacataaacctgccataaaaaaaaaaaaaaa

SEQ ID NO: 4140 - protein, 561 aa, Homo sapiens
MAIATSTQLARALYDNTAESPQELSFRRGDVLRVLQREGAGGLDGWCLCSLHGQQGIVPANRVKLLPAGPAPKPSLSPASPAQPGSPYPAPDHSNEDQEVYVVPPPARPCPTSGPPAGPCPPSPDLIYKIPRASGTQLAAPRDALEVYDVPPTALRVPSSGPYDCPASFSHPLTRVAPQPPGEDDAPYDVPLTPKPPAELEPDLEWEGGREPGPPIYAAPSNLKRASALLNLYEAPEELLADGEGGGTDEGIYDVPLLGPEAPPSPEPPGALASHDQDTLAQLLARSPPPPHRPRLPSAESLSRRPLPALPVPEAPSPSPVPSPAPGRKGSIQDRPLPPPPPRLPGYGGPKVEGDPEGREMEDDPAGHHNEYEGIPMAEEYDYVHLKGMDKAQGSRPPDQACTGDPELPERGMPAPQEALSPGEPLVVSTGDLQLLYFYAGQCQSHYSALQAAVAALMSSTQANQPPRLFVPHSKRVVVAAHRLVFVGDTLGRLAASAPLRAQVRAAGTALGQALRATVLAVKGAALGYPSSPAIQEMVQCVTELAGQALQFTTLLTSLAP

SEQ ID NO: 4141 - DNA, 2046 bp, Homo sapiens
ctttcaaatattttttattgaaatgacaataaaataaaaaaagaacagtgatcactttaaccaaacttactttacaaatataaaaaatataaccaaaacttgggaattccaggccacggcgcggggcgggagggggcgcggcgaggcccgccggcggggcaaaaccggcctgggccctggcggccgcaggagcgcgtgcggcgtggactttgccgggctcgccacacagccccagacccgtttaggaccgggagaccgaacgcagcgtccagccggggagtttcggcggcgttctccgggcaccgcgcgcgggaagccagacgcagcggggggacacatctcgcggtggcgttgccagagtgaggagttagcaggcaggacttgacgaggctctttggtttttctagtcctcaaccactgaagaagaagcttgatgcttggctgtcagaagacatgaattacgcacggttcatcacggcagcgagcgcagccagaaacccttctcccatccggaccatgactgacatattgagcagaggaccaaaatcgatgatctccttggctggtggcttaccaaatccaaacatgtttccttttaagactgccgtaatcactgtagaaaatggaaagaccatccaatttggagaagagatgatgaagagagcacttcagtattctccgagtgctggaattccagagcttttgtcctggctaaaacagttacaaataaaattgcataatcctcctaccatccattacccacccagtcaaggacaaatggatctatgtgtcacatctggcagccaacaaggtctttgtaaggtgtttgaaatgatcattaatcctggagataatgtcctcctagatgaacctgcttattcaggaactcttcaaagtctgcacccactgggctgcaacattattaatgttgccagtgatgaaagtgggattgttccagattccctaagagacatactttccagatggaaaccagaagatgcaaagaatccccagaaaaacacccccaaatttctttatactgttccaaatggcaacaaccctactggaaactcattaaccagtgaacgcaaaaaggaaatctatgagcttgcaagaaaatatgatttcctcataatagaagatgatccttactattttctccagtttaacaagttcagggtaccaacatttctttccatggatgttgatggacgtgtcatcagagctgactctttttcaaaaatcatttcctctgggttgagaataggatttttaactggtccaaaacccttaatagagagagttattttacacatacaagtttcaacattgcaccccagcacttttaaccagctcatgatatcacagcttctacacgaatggggagaagaaggtttcatggctcatgtagacagggttattgatttctatagtaaccagaaggatgcaatactggcagctgcagacaagtggttaactggtttggcagaatggcatgttcctgctgctggaatgtttttatggattaaagttaaaggcattaatgatgtaaaagaactgattgaagaaaaggccgttaagatgggggtattaatgctccctggaaatgctttctacgtcgatagctcagctcctagcccttacttgagagcatccttctcttcagcttctccagaacagatggatgtggccttccaggtattagcacaacttataaaagaatctttatgaagaaattaaactaggttgggcatggtgcgtcacacctataatcccagcactttgggaggcagaggagggaggatcacttgaacccaggaattcaggctgcagtaagctacgatcacaccactgcactctggcctgcatgcactctggcctgcatggcagaacaagaccctgtctctaaaaaaagagaaagaaatcaaactaatcatgctgctcatggatttttccaataaatttcttgttttggcaggaagaaatgaacactggtattagacttaaagattaaatttcctcaaacatgtcctatctgtagtagtt

SEQ ID NO: 4142 - protein, 425 aa, Homo sapiens
MNYARFITAASAARNPSPIRTMTDILSRGPKSMISLAGGLPNPNMFPFKTAVITVENGKTIQFGEEMMKRALQYSPSAGIPELLSWLKQLQIKLHNPPTIHYPPSQGQMDLCVTSGSQQGLCKVFEMIINPGDNVLLDEPAYSGTLQSLHPLGCNIINVASDESGIVPDSLRDILSRWKPEDAKNPQKNTPKFLYTVPNGNNPTGNSLTSERKKEIYELARKYDFLIIEDDPYYFLQFNKFRVPTFLSMDVDGRVIRADSFSKIISSGLRIGFLTGPKPLIERVILHIQVSTLHPSTFNQLMISQLLHEWGEEGFMAHVDRVIDFYSNQKDAILAAADKWLTGLAEWHVPAAGMFLWIKVKGINDVKELIEEKAVKMGVLMLPGNAFYVDSSAPSPYLRASFSSASPEQMDVAFQVLAQLIKESL

SEQ ID NO: 4143 - DNA, 4233 bp, Homo sapiens
ggacgaggtcttcttcaacagcgaggtggacgagaaagtgggcccgcgccgcccgccgcgaagctgaggccgccgcccgagggcagcgcgggggcctgcgccccggtgcccgccgccgccgccgtcgccgcggggcccgagcccgcccccgccggccccgccaagcccgccggccccgccgcgctggccgcccgcgccggccccggccccgggcccggccccggccccggccccggccctggcaagcccgccggccccggcgccgcgcaaactttgaatgggagcgccgcgctgctgaactcgcaccacgccgccgcacctgctgtcagcctggtcaacaacgggcccgccgcgctgctgccgctgcccaagcccgccgcccccgccgccgccccgcccccgccaccccccgcgcccgccactctggcccggccgcccggccaccccgccggacccccgaccgccgcgctcgccgtgccgccccccgccgccgcccagaacgggggcagcgccggggcagcccccgcccccgccccggccgccgggggccccgcgggggtcagcggccaacccgggcccggcgcggcggctgcggcgccggcgccgggggtcaaggccgagtcgcccaagagggtggtgcaggcggcgcccccggcggcgcagaccctggcggccagcggcccggccagcacggcggccagcatggtcatcgggccaactatgcaaggggcgctgcccagcccggccgccgtcccgccgcccgcccccgggacccccaccgggctgcccaaaggcgcggccggcgcagtgacccagagcctgtcccggacgcccacggccaccaccagcgggattcgggccaccctgacgcccaccgtgctggccccccgcttgccgcagccgcctcagaacccgaccaacatccagaacttccagctgcccccaggaatggtcctcgtccgaagtgagaatgggcagttgttaatgattcctcagcaggccttggcccagatgcaggcgcaggcccatgcccagcctcagaccaccatggcgcctcgccctgccacccccacaagtgcccctcccgtccagatctccaccgtacaggcacctggaacacctatcattgcacggcaggtgaccccaactaccataattaagcaagtgtctcaggcccagacaacggtgcagcccagtgcaaccctgcagcgctcgcccggcgtccagcctcagctcgttctgggtggcgctgcccagacggcttcacttgggacggcgacggctgttcagacggggactcctcagcgcacggtaccaggggcgaccaccacttcctcagctgccacggaaactatggaaaacgtgaagaaatgtaaaaatttcctatctacgttaataaaactggcttcatctggcaagcagtctacagagacagcagctaatgtgaaagagctcgtgcagaatttactggatggaaaaatagaagcagaagatttcacaagcaggttataccgagaacttaattcttcacctcaaccttaccttgtgcctttcctgaagaggagcttacccgccttgagacagctgacccccgactccgcggccttcatccagcagagccagcagcagccgccaccgcccacctcgcaggccaccactgcgctcacggccgtggtgctgagtagctcggtccagcgcacggccgggaagacggcggccaccgtgaccagtgccctccagccccctgtgctcagcctcacgcagcccacgcaggtcggcgtcggcaagcaggggcaacccacaccgctggtcatccagcagcctccgaagccaggagccctgatccggcccccgcaggtgacgttgacgcagacacccatggtcgccctgcggcagcctcacaaccggatcatgctcaccacgcctcagcagatccagctgaacccactgcagccagtccctgtggtgaaacccgccgtgttacctggaaccaaagccctttctgctgtctcggcacaagcagctgctgcacagaaaaataaactcaaggagcctgggggaggttcgtttcgggacgatgatgacattaatgatgttgcatcgatggctggagtaaacttgtcagaagaaagtgcaagaatattagccacgaactctgaattggtgggcacgctaacgcggtcctgtaaagatgaaaccttcctcctccaagcgcctttgcagagaagaatattagaaataggtaaaaaacatggtataacggaattacatccagatgtagtaagttatgtatcacatgccacgcaacaaaggctacagaatcttgtagagaaaatatcagaaacagctcagcagaagaacttttcttacaaggatgacgacagatatgagcaggcgagtgacgtccgggcacagctcaagttttttgaacagcttgatcaaatcgaaaagcagaggaaggatgagcaggagcgggagatcctgatgagggcagcaaagtctcggtcaagacaagaagatccagaacagttaaggctgaaacagaaggcaaaggagatgcagcaacaggaactggcacaaatgagacagcgggacgccaacctcacagcactagcagcgatcgggcccaggaaaaagaggaaagtggactgtccggggccgggctcaggagcagaggggtcgggccccggctcagtggtcccaggcagctcgggtgtcggaacccccagacagttcacgcgacaaagaatcacgcgggtcaacctcagggacctcatattttgtttagaaaatgaacgtgagacaagccattcactgctgctctacaaagcattccttaagtgacacaggaggacgcctggggactttttatatatttgcagattacgcctttttgtaacgagcaaatgggatattgtttaaaaaacagccacctctttacaatggaacagttttatattcctgtttctaaatcagctcttcagtgtgaaagaaaacacgtttctgtaacagagagaacacaaaggcctgtggatactcttaaaggacaattaaatcttaactcatcttgattgagtggccttcctgccaaacaagccatatataaagactgatggaatcgttagcaaataattagctgccctctgtcaactcatagcagtttctgcattatttgtgcattttggtttagttctacctaacttactatgtaggtgtatgtctacagccgatgacctcatttcgtttattttatttttgtaatagtcagttggcaaagcaaactgattttttagactatttatcttccttcccttcccctcccaccccgctctcctctctgccccctgccctcccctcccctcccttcccctccactccgctgagaatcctggaggaatacacaattcatcgttgcacccccacctcagagtgtaatcgcatttctgcttggtagaggccgagcccagcaaaggtggctccttctgaatgtgtggtcagcatctgtacaaatgcattttatttgctatagtttgtaaagctgtaaagttaaaagagatgaaaaccttttcagcataaatatattttacttgcactgtgttttttagctaaaagtgaaaacctagattaaataaaatcaaagttgagaagaatcatcaaaagactgtttctcggtgtgaatcaagtgttgaaaaatggttggtgtattttgtcagtaattgtacataacttttggcacatgacatagaaatggctatgtaaactataattattttgctaagagactgtatgcaagccttgggccgactttacagacgtccagagcaaagccccttctttgtacctatttttttattacaaatatactaattggttctttctattttcagaggttattgtatgaaattgtctattgatagtacttttatgactgtaaatactctggctttctccgtgtgaattctcacattagactttaattcgagcgcgtgtgaactgaacgctgatcagtattttttatcaacacctgagaactgttacaccttttattttgtcttttaggaaatccctgtctttccattttttcatgtaaattttgcacagttacttgttcatatgtaaatattttactttcagaaatgaagtttttaattgctattgttttatataggattgaaagaaaattaactcctttattaaaaacaaatttatctgtaaaaaaaaaaaaaaaaaaaa

SEQ ID NO: 4144 - protein, 947 aa, Homo sapiens
GRGLLQQRGGRESGPAPPAAKLRPPPEGSAGACAPVPAAAAVAAGPEPAPAGPAKPAGPAALAARAGPGPGPGPGPGPGPGKPAGPGAAQTLNGSAALLNSHHAAAPAVSLVNNGPAALLPLPKPAAPAAAPPPPPPAPATLARPPGHPAGPPTAALAVPPPAAAQNGGSAGAAPAPAPAAGGPAGVSGQPGPGAAAAAPAPGVKAESPKRVVQAAPPAAQTLAASGPASTAASMVIGPTMQGALPSPAAVPPPAPGTPTGLPKGAAGAVTQSLSRTPTATTSGIRATLTPTVLAPRLPQPPQNPTNIQNFQLPPGMVLVRSENGQLLMIPQQALAQMQAQAHAQPQTTMAPRPATPTSAPPVQISTVQAPGTPIIARQVTPTTIIKQVSQAQTTVQPSATLQRSPGVQPQLVLGGAAQTASLGTATAVQTGTPQRTVPGATTTSSAATETMENVKKCKNFLSTLIKLASSGKQSTETAANVKELVQNLLDGKIEAEDFTSRLYRELNSSPQPYLVPFLKRSLPALRQLTPDSAAFIQQSQQQPPPPTSQATTALTAVVLSSSVQRTAGKTAATVTSALQPPVLSLTQPTQVGVGKQGQPTPLVIQQPPKPGALIRPPQVTLTQTPMVALRQPHNRIMLTTPQQIQLNPLQPVPVVKPAVLPGTKALSAVSAQAAAAQKNKLKEPGGGSFRDDDDINDVASMAGVNLSEESARILATNSELVGTLTRSCKDETFLLQAPLQRRILEIGKKHGITELHPDVVSYVSHATQQRLQNLVEKISETAQQKNFSYKDDDRYEQASDVRAQLKFFEQLDQIEKQRKDEQEREILMRAAKSRSRQEDPEQLRLKQKAKEMQQQELAQMRQRDANLTALAAIGPRKKRKVDCPGPGSGAEGSGPGSVVPGSSGVGTPRQFTRQRITRVNLRDLIFCLENERETSHSLLLYKAFLK

SEQ ID NO: 4145 - DNA, 6378 bp, Homo sapiens
atggtactatctcctgagtgctgcaagttgtaacgggcaccgctgagcctgtttccctttggagcacttcttatctagaagcagtgtttagtttcttccaaactgggccacttcgtccacctactctgttctgagtaaggaaacagcctccaagcatcagcagagcccagatgagcacgggccgcggagccgcttagcagtctcccgggacccagctccggaggagccgcaagcatgcaccctgggttgtggctgctcctggttacgttgtgcctgaccgaggaactggcagcagcgggagagaagtcttatggaaagccatgtgggggccaggactgcagtgggagctgtcagtgttttcctgagaaaggagcgagaggacgacctggaccaattggaattcaaggcccaacaggtcctcaaggattcactggctctactggtttatcgggattgaaaggagaaaggggtttcccaggccttctgggaccttatggaccaaaaggagataagggtcccatgggagttcctggctttcttggcatcaatgggattccgggccaccctggacaaccaggccccagaggcccacctggtctggatggctgtaatggaactcaaggagctgttggatttccaggccctgatggctatcctgggcttctcggaccacccgggcttcctggtcagaaaggatcaaaaggtgaccctgtccttgctccaggtagtttcaaaggaatgaagggggatcctgggctgcctggactggatggaatcactggcccacaaggagcacccggatttcctggagctgtaggacctgcaggaccaccaggattacaaggtcctccagggcctcctggtcctcttggtcctgatgggaatatggggctaggttttcaaggagagaaaggagtcaagggggatgttggcctccctggcccagcaggacctccaccatctactggagagctggaattcatgggattccccaaagggaagaaaggatccaagggtgaaccagggcctaagggttttccaggcataagtggccctccaggcttcccgggccttggaactactggagaaaagggagaaaagggagaaaagggaatccctggtttgccaggacctaggggtcccatgggttcagaaggagtccaaggccctccagggcaacagggcaagaaagggaccctgggatttcctgggcttaatggattccaaggaattgagggtcaaaagggtgacattggcctgccaggcccagatgttttcatcgatatagatggtgctgtgatctcaggtaatcctggagatcctggtgtacctggcctcccaggccttaaaggagatgaaggcatccaaggcctacgtggcccttctggtgtccctggattgccagcattatcaggtgtcccaggagccctagggcctcagggatttccagggctgaagggggaccaaggaaacccaggccgtaccacaattggagcagctggcctccctggcagagatggtttgccaggcccaccaggtccaccaggcccacctagtccagaatttgagactgaaactctacacaacaaagagtcagggttccctggtctccgaggagaacaaggtccaaaaggaaacctaggcctcaaaggaataaaaggagactcaggtttctgtgcttgtgacggtggtgttcccaacactggaccacccggggaaccaggcccacctggtccatggggtctcataggccttccaggccttaaaggagccagaggagatcgaggctctgggggtgcacagggcccagcaggggctccaggcttagttgggcctctgggtccttcaggacccaaaggaaagaagggggaaccaattctcagtacaatccaaggaatgccaggagatcggggtgattctggctcccagggcttccgtggtgtaataggagaaccaggcaaggacggagtaccaggtttaccaggtctgccaggccttccgggtgatggtggacagggcttcccaggtgaaaaggggttacctggacttcctggtgaaaaaggccatcctggtccacctggcctcccaggaaatgggttaccaggacttcctggaccccgtgggcttcctggagataaaggcaaggatggattaccgggacaacaaggccttcccggatctaagggaatcaccctgccctgtattattcctgggtcatacggtccatcaggatttccaggcactcccggattcccaggccctaaagggtctcgaggcctccctgggaccccaggccagcctgggtcaagtggaagtaaaggagagccagggagtccaggattggttcatcttcctgaattaccaggatttcctggacctcgtggggagaagggcttgcctgggtttcctgggctccctggaaaagatggcttgcctgggatgattggcagtccaggcttacctggttccaagggagccactggtgacatctttggtgctgaaaatggtgctccgggggaacaaggcctacaaggattaacagggcacaaaggatttcttggagactctggccttccaggactcaagggtgtgcacgggaagcctggcttactaggccccaaaggtgagcggggcagccctgggacaccaggacaggtgggacagccaggcaccccaggatctagtggtccatatggcatcaagggcaaatctgggctcccaggagcaccaggcttcccaggcatctcaggacatcctggaaagaaaggaacaagaggcaagaaaggtcctcctggatcaattgtaaagaaagggctgccagggctaaaaggccttcctggaaatccaggcctagtaggactgaaaggaagcccaggctctccaggggtcgctgggttgccagccctctctggacccaagggagagaaggggtctgttggattcgtaggttttccaggaataccaggtctgcctggtatttctggaacaagaggattaaaaggaattccaggatcaactggaaaaatgggaccatctggacgcgctggtactcctggtgaaaagggagacagaggcaatccggggccagtcggaatacctagtccaagacgtccaatgtcaaacctttggctcaaaggagacaaaggctctcaaggctcagccggatccaatggatttcctgggccaagaggtgacaaaggagaggctggtcgacctggaccaccaggcctacctggagctcctggcctcccaggcattatcaaaggagttagtggaaagccagggccccctggcttcatgggaatccggggtttacctggcctgaaggggtcctctgggatcacaggtttcccaggaatgccaggagaaagtggttcacaaggtatcagagggtcgcctggactcccaggagcatctggtctcccaggcctgaaaggagacaacggccagacagttgaaatttccggtagcccaggacccaagggacagcctggcgaatctggttttaaaggcacaaaaggaagagatggactaataggcaatataggcttccctggaaacaaaggtgaagatggaaaagttggtgtttctggagatgttggccttcctggagctccaggatttccaggagttgccggcatgagaggagaaccaggacttccaggttcttctggtcaccaaggggcaattgggcctctaggatcccccggattaataggacccaaaggcttccctggatttcctggtttacatggactgaatgggcttccgggcaccaagggtacccatggcactccaggacctagtatcaccggtgtgcctgggcctgctggtctccctggacccaaaggagaaaaaggatatccaggaattggcatcggagctccagggaagccgggcctgagagggcaaaaaggtgatcgaggtttcccaggtctccagggccctgctggtctccccggtgccccaggcatctccttgccctcactcatagcaggacagcctggtgaccccgggcgaccaggcctagatggagaacgaggccgcccaggccccgctggacccccaggtccccctgggccatcctcgaatcaaggcgacaccggagaccctggcttccctggaattccaggtttttctggcctccctggagagctaggactgaaaggcatgagaggtgagcctggcttcatggggactccaggcaaggttgggccacctggagacccaggatttcccggaatgaaggggaaggcaggggcaagaggctcttctggcctccaaggtgatcctggacaaacaccaactgcagaagctgtccaggttcctcctggacccttgggtctaccagggatcgatggcatccctggcctcactggggaccctggggctcaaggccctgtaggcctacaaggctccaaaggtttacctggcatccccggtaaagatggccccagtgggctcccaggcccacctggggctcttggtgatcctggtctgcctggactgcaaggccctccaggatttgaaggagctccagggcagcaaggccccttcgggatgcctggaatgcctggccagagcatgagagtgggctacacgttggtaaagcacagccagtcggaacaggtgcccccgtgtcccatcgggatgagccagctgtgggtggggtacagcttactgtttgtggaggggcaagagaaagcccacaaccaggacctgggctttgctggctcctgtctgccccgcttcagcaccatgcccttcatctactgcaacatcaacgaggtgtgccactatgccaggcgcaatgataaatcttactggctctccactaccgcccctatccccatgatgcccgtcagccagacccagattccccagtacatcagccgctgctctgtgtgtgaggcaccctcgcaagccattgctgtgcacagccaggacatcaccatcccgcagtgccccctgggctggcgcagcctctggattgggtactctttcctcatgcacactgccgctggtgccgagggtggaggccagtccctggtctcacctggctcctgcctagaggactttcgggccactcctttcatcgaatgcagtggtgcccgaggcacctgccactactttgcaaacaagtacagtttctggttgaccacagtggaggagaggcagcagtttggggagttgcctgtgtctgaaacgctgaaagctgggcagctccacactcgagtcagtcgctgccaggtgtgtatgaaaagcctgtagggtggcacctgccactctgccccttgccctcccctgcccctcacaacagtcacctcacaaacctgaatggtctgaagaaggaaggcctgagcccctttgcctgtcaagttgtacattggagtctcatttgggctagactaccggacactcgtcaccccagccctcgggtccatagagatgagcccaccctgctgagatctgctgtcctgtttctgtcaagctggtgctactgtttgatttggatgattgtgtgactattcatggctacctcagaaagatttgatgggccacaactgtcttagactgctagctttctccttaccgtcttgatcggaaagctcttccgaatcgctaatcagtcatttcttcatgtacagaggtcagcacacattatttggcttaaaccagaacccagtgtttccacacttaaattctctaaccgaatattcatggatggctcaagtctgcacagagcaagtcctcactcttcaaggaggcccactgtgtctaggcaggcaagagaattgaaatgaggtgccacccagtagcccagagtgagctttagctctagaatgagcaagactgggccccacatggcttagagaggcttgaaggccagcagctgggttgggggtggtggtcattaatggcatatggtcctagacaaaccatctcctccttgccggctccccctccagccagagacagaggatgtggcctggttcaaagtaaagcagaggatgcaacaaatgtggccaagctatcaaaggaaatgagaatgacagccttttttcctgggccagaagtagagggggtgggtgcgtaggatgtgtgagttttgcttttgactccaggaacaaaaaggtaaatcccacatcccagtttctcagaagtccctgtttattccaattgccatcagatgtgtgcaatgtggcaaactgaagctgcacagtgttggtttccttgtattctgaggatgttaaagactttgttaaatggttatccaattgctctttcacaggtagcctattaaactattttaatatgtttttttaaacctcataaaaatctagcacactcttctcttgagcagttagcagaccaccg

SEQ ID NO: 4146 - protein, 1678 aa, Homo sapiens
MHPGLWLLLVTLCLTEELAAAGEKSYGKPCGGQDCSGSCQCFPEKGARGRPGPIGIQGPTGPQGFTGSTGLSGLKGERGFPGLLGPYGPKGDKGPMGVPGFLGINGIPGHPGQPGPRGPPGLDGCNGTQGAVGFPGPDGYPGLLGPPGLPGQKGSKGDPVLAPGSFKGMKGDPGLPGLDGITGPQGAPGFPGAVGPAGPPGLQGPPGPPGPLGPDGNMGLGFQGEKGVKGDVGLPGPAGPPPSTGELEFMGFPKGKKGSKGEPGPKGFPGISGPPGFPGLGTTGEKGEKGEKGIPGLPGPRGPMGSEGVQGPPGQQGKKGTLGFPGLNGFQGIEGQKGDIGLPGPDVFIDIDGAVISGNPGDPGVPGLPGLKGDEGIQGLRGPSGVPGLPALSGVPGALGPQGFPGLKGDQGNPGRTTIGAAGLPGRDGLPGPPGPPGPPSPEFETETLHNKESGFPGLRGEQGPKGNLGLKGIKGDSGFCACDGGVPNTGPPGEPGPPGPWGLIGLPGLKGARGDRGSGGAQGPAGAPGLVGPLGPSGPKGKKGEPILSTIQGMPGDRGDSGSQGFRGVIGEPGKDGVPGLPGLPGLPGDGGQGFPGEKGLPGLPGEKGHPGPPGLPGNGLPGLPGPRGLPGDKGKDGLPGQQGLPGSKGITLPCIIPGSYGPSGFPGTPGFPGPKGSRGLPGTPGQPGSSGSKGEPGSPGLVHLPELPGFPGPRGEKGLPGFPGLPGKDGLPGMIGSPGLPGSKGATGDIFGAENGAPGEQGLQGLTGHKGFLGDSGLPGLKGVHGKPGLLGPKGERGSPGTPGQVGQPGTPGSSGPYGIKGKSGLPGAPGFPGISGHPGKKGTRGKKGPPGSIVKKGLPGLKGLPGNPGLVGLKGSPGSPGVAGLPALSGPKGEKGSVGFVGFPGIPGLPGISGTRGLKGIPGSTGKMGPSGRAGTPGEKGDRGNPGPVGIPSPRRPMSNLWLKGDKGSQGSAGSNGFPGPRGDKGEAGRPGPPGLPGAPGLPGIIKGVSGKPGPPGFMGIRGLPGLKGSSGITGFPGMPGESGSQGIRGSPGLPGASGLPGLKGDNGQTVEISGSPGPKGQPGESGFKGTKGRDGLIGNIGFPGNKGEDGKVGVSGDVGLPGAPGFPGVAGMRGEPGLPGSSGHQGAIGPLGSPGLIGPKGFPGFPGLHGLNGLPGTKGTHGTPGPSITGVPGPAGLPGPKGEKGYPGIGIGAPGKPGLRGQKGDRGFPGLQGPAGLPGAPGISLPSLIAGQPGDPGRPGLDGERGRPGPAGPPGPPGPSSNQGDTGDPGFPGIPGFSGLPGELGLKGMRGEPGFMGTPGKVGPPGDPGFPGMKGKAGARGSSGLQGDPGQTPTAEAVQVPPGPLGLPGIDGIPGLTGDPGAQGPVGLQGSKGLPGIPGKDGPSGLPGPPGALGDPGLPGLQGPPGFEGAPGQQGPFGMPGMPGQSMRVGYTLVKHSQSEQVPPCPIGMSQLWVGYSLLFVEGQEKAHNQDLGFAGSCLPRFSTMPFIYCNINEVCHYARRNDKSYWLSTTAPIPMMPVSQTQIPQYISRCSVCEAPSQAIAVHSQDITIPQCPLGWRSLWIGYSFLMHTAAGAEGGGQSLVSPGSCLEDFRATPFIECSGARGTCHYFANKYSFWLTTVEERQQFGELPVSETLKAGQLHTRVSRCQVCMKSL

SEQ ID NO: 4147 - DNA, 1936 bp, Homo sapiens
tctggagccaagtaatggtgatactgatgcttccttttctttgccgcgctcggattctgagtttcacaagaatgtacctgggtgccccttagcgggatatgaatagcttcttcggaaccccagcggccagctggtgcctcctggaaagtgacgtctcatctgcaccggacaaggaggcggggagggagcgcagagcactcagcgtccagcagcgcggcgggccagcctggagcggaagcctggagtggagcaggcagtccgcgggggacagacgtcggctgggattgagccggcagactgcgaaaagtagctggagccggagcagggacagaacctgttgctgcagacgggcttggtggattctggttcctgccgccgacagggctcgccgggagaggttcatcatgaatgagaaatgggacacaaactcttcagaaaactggcatcccatctggaatgtcaatgacacaaagcatcatctgtactcagatattaatattacctatgtgaactactatcttcaccagcctcaagtggcagcaatcttcattatttcctactttctgatcttctttttgtgcatgatgggaaatactgtggtttgctttattgtaatgaggaacaaacatatgcacacagtcactaatctcttcatcttaaacctggccataagtgatttactagttggcatattctgcatgcctataacactgctggacaatattatagcaggatggccatttggaaacacgatgtgcaagatcagtggattggtccagggaatatctgtcgcagcttcagtctttacgttagttgcaattgctgtagataggttccagtgtgtggtctacccttttaaaccaaagctcactatcaagacagcgtttgtcattattatgatcatctgggtcctagccatcaccattatgtctccatctgcagtaatgttacatgtgcaagaagaaaaatattaccgagtgagactcaactcccagaataaaaccagtccagtctactggtgccgggaagactggccaaatcaggaaatgaggaagatctacaccactgtgctgtttgccaacatctacctggctcccctctccctcattgtcatcatgtatggaaggattggaatttcactcttcagggctgcagttcctcacacaggcaggaagaaccaggagcagtggcacgtggtgtccaggaaaaagcagaagatcattaagatgctcctgattgtggccctgctttttattctctcatggctgcccctgtggactctaatgatgctctcagactacgctgacctttctccaaatgaactgcagatcatcaacatctacatctacccttttgcacactggctggcattcggcaacagcagtgtcaatcccatcatttatggtttcttcaacgagaatttccgccgtggtttccaagaagctttccagctccagctctgccaaaaaagagcaaagcctatggaagcttataccctaaaagctaaaagccatgtgctcataaacacatctaatcagcttgtccaggaatctacatttcaaaaccctcatggggaaaccttgctttataggaaaagtgctgaaaaaccccaacaggaattagtgatggaagaattaaaagaaactactaacagcagtgagatttaaaaagagctagtgtgataatcctaactctactacgcattatatatttaaatccattgctttttgtggctttgcacttcaaatttttcaaagaatgttctaaataaaacatttactgaaagccctctctggcaaaaaaattaaaaataaacaaaaatggtcataagatcataaacaatcttatgttgtataaaaatacgtagagtgacttagacatgtttgcatgaataaatatatttctagagaacagttaaaaaaaaaaaaaaaaaaaa

SEQ ID NO: 4148 - protein, 522 aa, Homo sapiens
MNSFFGTPAASWCLLESDVSSAPDKEAGRERRALSVQQRGGPAWSGSLEWSRQSAGDRRRLGLSRQTAKSSWSRSRDRTCCCRRAWWILVPAADRARRERFIMNEKWDTNSSENWHPIWNVNDTKHHLYSDINITYVNYYLHQPQVAAIFIISYFLIFFLCMMGNTVVCFIVMRNKHMHTVTNLFILNLAISDLLVGIFCMPITLLDNIIAGWPFGNTMCKISGLVQGISVAASVFTLVAIAVDRFQCVVYPFKPKLTIKTAFVIIMIIWVLAITIMSPSAVMLHVQEEKYYRVRLNSQNKTSPVYWCREDWPNQEMRKIYTTVLFANIYLAPLSLIVIMYGRIGISLFRAAVPHTGRKNQEQWHVVSRKKQKIIKMLLIVALLFILSWLPLWTLMMLSDYADLSPNELQIINIYIYPFAHWLAFGNSSVNPIIYGFFNENFRRGFQEAFQLQLCQKRAKPMEAYTLKAKSHVLINTSNQLVQESTFQNPHGETLLYRKSAEKPQQELVMEELKETTNSSEI

SEQ ID NO: 4149 - DNA, 306 bp, Homo sapiens
caaacatattttttaaagtgagaataaggttggtttttaccaaatatttgttcctccttgacaaaagtagctctgtgtggataatatgattttattactacagttccagtcacttggttatatttatcttagcatgagcctttcacaccaagatttctatattttgtaacataggtgaaatatttaaaacatcaaaaactgtaaatctagatttttaaaaaatccaactgcaatgtcttttcctttgattgagatgatttgtgtaaactcaccagtcttggctttgggagtgaggcaggaaggagg

SEQ ID NO: 4150 - DNA, 361 bp, Homo sapiens
ctgttgatattttgagcaaaacaatcattgttttcatttaatatatttggccattttttcagacaaatagaattagcttatttcttcaacattccatcctttcccgatcaggaaatgaaactgatgattttataaggtatttttcacccctccatgaagtgaggtggaggcctttagcatttcagaagtgtgggccacatgtagttcatgccataaaaagtaggatttaattaaaagtcattgcagcccaataaaatggagcctggctgcacccagggatccttgccactgctcttcccttgctgtcagattaatccactgaagtccaactttggttcaagcagagtatttgcaaagagca

SEQ ID NO: 4151 - DNA, 483 bp, Homo sapiens
tttttttttttttttctgtaactttaagagcatgaactcatcctaatgaggtttgacagcagctttgtcacacattagatgtttcctcagctgtaaactgggtcagaagcttggagtcactgtccaagctcggctgttcactggctgtgtgttcttggcatgttattcaacctctctgtgctttagtttcctcagctgtaaaatgggggtaataatagcatccatcttacagggttatagtgaagattaaatgagttaagatctgaaaaatgcttagaatagtatggggcatggaggaggcatccaattattgtagctgttgttattattattattatttccacccctccaggctgcctccacaggacagtgttgtgtacttctaggtcgtggtttgtagcacagatctaaacttaagagtatgtgcttatattaatacccagcatattgacccccagcctgtctaaactcagtctcacagct

SEQ ID NO: 4152 - DNA, 549 bp, Homo sapiens
  misc_feature (22)..(22): n is a, c, g, or t
  misc_feature (43)..(43): n is a, c, g, or t
  misc_feature (129)..(129): n is a, c, g, or t
  misc_feature (364)..(364): n is a, c, g, or t
  misc_feature (391)..(391): n is a, c, g, or t
  misc_feature (400)..(400): n is a, c, g, or t
  misc_feature (415)..(415): n is a, c, g, or t
  misc_feature (437)..(437): n is a, c, g, or t
  misc_feature (504)..(504): n is a, c, g, or t
ggaaatctttgtactgtcttgnaagcctccacatccggctatngcctgcaagctgctttatccctgcgctagtctcccccgagggtttaggctggccagcacatcctgtcctcctgagctcgcgtgcancacccagagcgcaggggtcactgcacgctgcagggctcttgctgccatggtctcaagcctgaagaggtccgccacaagctggcccatgaagttagcaatgcctgtggttcagtcaattgtcttgagactgtgaagaggctgaaagacaccttcccgggtggaagaatgagttcactgaaaacttatcttaaactgacccttccctttgagtgagtcttcattcctctcccatgtnggaaccagctccgatgcccgggactangggaaacanttggaggtccgtgcngtccccagcctgccacgggtgncgaggacagcaagtcctgagtgactcaagatgcttcacttacatggaagaaacttctaaaactctancgagtggttttggtatatactaaagttctatttagagctttctgg

SEQ ID NO: 4153 - DNA, 393 bp, Homo sapiens
gcggaagcggaagtcggggggcgcgccagctcgtagcaggggagcgcccgcggcgtcgggtttgggctggaggtcgccatggggcgaggcagcggcaccttcgagcgtctcctagacaaggcgaccagccagctcctgttggagacagattgggagtccattttgcagatctgcgacctgatccgccaaggggacacacaagcaaaatatgctgtgaattccatcaagaagaaagtcaacgacaagaacccacacgtcgccttgtatgccctggagggcatggaatctgtggtaaagaactgtggccagacagttcatgatgaggtggccaacaagcagaccatggaggagcttaaggacctgctgaagagacaagtggaggtaaacgttccg

SEQ ID NO: 4154 - DNA, 556 bp, Homo sapiens
cgtgggcatcctctttattggtgcttccaaggtgctggtgcagagcccttggctgaagggcctggactgtgggggagggtggcagccccagagacagcaggggagaggaagcgttctggcataaaaaagagttcctgggtaaggctcctgtttccgagcattcgggcagcaaggggagtggcgcacacttctcagccgaagacactcttggtgggtccggctttgggcttctcaaagacagtctcggtacctgtgcgggtgcggctgaacaccgacggggcggccgagccagcttgctcacactctcgcatgacctggtaggtcttggacttgatttcctggttcttggtcaggtttcctcgggcccccttcaggtcctcctccttcacaggggggcgcttcttcttgataggggcttcctgagcaccagcctgggacatggtgggtatttgtgtaagcgctgggtctctgaaggcgcctctctggcaggcagcagctgctggaaaagatctgagtggagcccagccttctgaaacttatatagcctgcttgcttg

SEQ ID NO: 4155 - DNA, 564 bp, Homo sapiens
tttttttttttttttttttttttttttatgtgcaatcaccacggtttatgtaagtatatgaaaataaatccaagtattaaaaaacacaaccttaacatagcaaaaataaggccaccaggatcagaagacagtaaaatgagccacttatagggataggcaatcaaaagcagagtgtccagagggaaaagcaagctcagacgtggtttttacacattagtcttaacatctaatgcttcaagatagagagtaaagatttaaaaagtactaatattaactgaaaatgagctctgcattgtatttgtacttactgataaaaaatactcagctaggagaagtatgtttgcctaaagtcacacaatctgtgaggcactgagccaggattaaacccaaggccatctggctcagtgccaatgtttttcagctccaagttcccagttgggaagagtaaaagggagacctgctcaaaatgcatcaatctcaaggtccttccagagatgcaggtcaacttatatgcttgagatgggaaaatgcatacagatccactttactgaactgtcaacctat

SEQ ID NO: 4156 - DNA, 285 bp, Homo sapiens
cccaggagaagcaggctctgatggagcagcagagacgagagaaaagggcactgcaggagtggagagagcgagcgcagaggatgaggaagaggaaggaagagctcagcaaactcctgcctccgcgggggagcatggtggcatcaaagattccctctggcacagatctgatagataacaggaaagtaccactgaatccgcctggaaaaacgaaaccaagcaaagagaaatcgccacaagcaagtatagaaaaagctgtgcccctaagcaggtacatggggatcctct

SEQ ID NO: 4157 - DNA, 1602 bp, Homo sapiens
gcccccgctccgccgcggagtttctgcatgactgtcacaaagatgtcctggcgtccgcaataccgtagctccaagttccggaatgtctacgggaaggtggccaaccgggagcactgcttcgatgggatccccatcaccaagaatgtgcacgacaaccacttctgtgccgtcaacacccgcttcctggccatcgtcaccgagagcgcagggggcggctccttcctcgtcatccccctggagcagacaggcaggattgaacccaactaccccaaggtctgcggccaccagggcaatgtgctggatatcaaatggaaccccttcatcgacaacatcattgcctcgtgctcggaggacacgtcggtgcggatctgggagatccccgagggcgggctgaagcggaacatgacggcggcgctcctggagctgcacgggcacagccggcgtgtggggctggtcgagtggcaccccaccaccaacaacatcctgttcagcgctggctacgactacaaggtcctcatctggaacctggatgtgggtgagccggtgaagatgattgactgccacacggatgtgatcctctgcatgtccttcaacacggacggcagcctgctcaccaccacgtgcaaggacaagaagctgcgtgtgattgagccccgctctggccgtgttctgcaggaggccaactgcaaaaaccacagagtgaaccgggtggtgttcctggggaacatgaagcggctcctcacgacaggggtctccaggtggaacacaagacagattgccctctgggaccaggaggacctctccatgcccctgatcgaagaggaaattgatgggctctctggcctcctgttccccttctatgatgctgacacccacatgctctacctggctggaaagggtgatggaaacatccggtactacgagatcagcactgagaagccctacctgagttacctcatggagttccgctccccagccccgcagaaaggcctaggggtcatgcccaagcacgggctggatgtgtcagcctgcgaggtgttccgcttctacaagctggtgactctcaagggcctgatcgagcccatctccatgatcgtgccccggaggtcagattcctaccaggaagacatttacccaatgacaccaggcacggagccagcactgaccccggatgaatggctgggaggcatcaaccgagatcccgtgctgatgtctttgaaagaaggctataagaagtcctcaaaaatggtatttaaggctcccatcaaagaaaagaagagtgttgtggtcaacggaatagatttattagaaaatgtcccacccaggacagagaatgagctccttcgaatgttcttccggcagcaggatgagattcgacggttgaaagaggagctggcccagaaggacatccgcattcggcagctccagctggaactgaaaaacttgcgcaacagccccaagaactgttagctccccagctgggctgttttctaagccgatctctccgtcgtttctactcatcccttaacttctcccttaccagtgaccccagagacagagccaggacaggagtgggggccagcctgaggacccccgcctacc

SEQ ID NO: 4158 - protein, 475 aa, Homo sapiens [sequence omitted]

SEQ ID NO: 4159 - DNA, 491 bp, Homo sapiens
ttttgaggatataaaaaagaatactccaccccgtgcctcccccaaccacaaaacaccctggttattggttcctaagttatgttaaaatggaatttgctgctaaatatgcttcacttgataaatactgcatcttggaaggattaatactgtccatattgtaagggaatattagtttaaatatgttcttattcagaaataaaatgcatggctctataataacacattagtactgtagagataagaatgtgtcatcagccatggcccctaagtggccattgatgacatggcataagatcacagttttaacctcctttaatatcaaactctcctggctctctgaaatagaagcataggaattacagctaagaacaaacaacaaaagaaaaactcagttcaaatcctgactctgcttccagcttctggtacattaggcaagttgctaaacctctgggcttaggggataaagacactacctcacagggtggagtgag

SEQ ID NO: 4160 - DNA, 5231 bp, Homo sapiens
cacgatttggtgcagccggggtttggtaccgagcggagaggagatgcacacggcactcgagtgtgaggaaaaatagaaatgaaggtacatatgcacacaaaattttgcctcatttgtttgctgacatttatttttcatcattgcaaccattgccatgaagaacatgaccatggccctgaagcgcttcacagacagcatcgtggaatgacagaattggagccaagcaaattttcaaagcaagctgctgaaaatgaaaaaaaatactatattgaaaaactttttgagcgttatggtgaaaatggaagattatccttttttggtttggagaaacttttaacaaacttgggccttggagagagaaaagtagttgagattaatcatgaggatcttggccacgatcatgtttctcatttagatattttggcagttcaagagggaaagcattttcactcacataaccaccagcattcccataatcatttaaattcagaaaatcaaactgtgaccagtgtatccacaaaaagaaaccataaatgtgatccagagaaagagacagttgaagtgtctgtaaaatctgatgataaacatatgcatgaccataatcaccgcctacgtcatcaccatcgtttgcatcatcatcttgatcataacaacactcaccattttcataatgattccattactcccagtgagcgtggggagcctagcaatgaaccttcaacagagaccaataaaacccaggaacaatctgatgttaaactaccgaaaggaaagaggaagaaaaaagggaggaaaagtaatgaaaattctgaggttattacaccaggttttccccctaaccatgatcagggtgaacagtatgagcataatcgggtccacaaacctgatcgtgtacataacccaggtcattctcatgtacatcttccagaacgtaatggtcatgatcctggtcgtggacaccaagatcttgatcctgataatgaaggtgaacttcgacatactagaaagagagaagcaccacatgttaaaaataatgcaataatttctttgagaaaagatctaaatgaagatgaccatcatcatgaatgtttgaacgtcactcagttattaaaatactatggtcatggtgccaactctcccatctcaactgatttatttacatacctttgccctgcattgttatatcaaatcgacagcagactttgtattgagcattttgacaaacttttagttgaagatataaataaggataaaaacctggttcctgaagatgaggcaaatataggggcatcagcctggatttgtggtatcatttctatcactgtcattagcctgctttccttgctaggcgtgatcttggttcctatcattaaccaaggatgcttcaaattccttcttacattccttgttgcattagctgtaggaacaatgagtggagacgcccttcttcatctactgccccattctcagggtggacatgatcacagtcaccaacatgcacatgggcatggacattctcatggacatgaatctaacaagtttttggaagaatatgatgctgtattgaaaggacttgttgctctaggaggcatttacttgctatttatcattgaacactgcattagaatgtttaagcactacaaacaacaaagaggaaaacagaaatggtttatgaaacagaacacagaagaatcaactattggaagaaagctttcagatcacaagttaaacaatacaccagattctgactggcttcaactcaagcctcttgccggaactgatgactcggttgtttctgaagatcgacttaatgaaactgaactgacagatttagaaggccaacaagaatcccctcctaaaaattacctttgtatagaagaggagaaaatcatagaccattctcacagtgatggattacataccattcatgagcatgatctccatgctgctgcacataaccaccacggcgagaacaaaactgtgctgaggaagcataatcaccagtggcaccacaagcattctcatcattcccatggcccctgtcattctggatccgatctgaaagaaacaggaatagctaatatagcctggatggtgatcatgggggatggcatccacaacttcagtgatgggctcgcaattggtgcagctttcagtgctggattgacaggaggaatcagtacttctatagccgtcttctgtcatgaactgccacatgaattaggagattttgcagttcttcttaaagcaggcatgactgtaaagcaagcaattgtatacaacctcctctctgccatgatggcttacataggcatgctcataggcacagctgttggtcagtatgccaataacatcacactttggatctttgcagtcactgcaggcatgttcctctatgtagccttggtggatatgcttccagaaatgttgcatggtgatggtgacaatgaagaacatggcttttgtcctgtggggcaattcatccttcagaatttaggattgctctttggatttgccattatgctggtgattgccctctatgaagataaaattgtgtttgacatccagttttgacctttcccagtaatcactgttgattacgagaatgttaccatgcagctttgcatctgttccttgtactgtatgcacattgctcaaaggaaagtcagtggcttgcactacttacaagtttcatagatttgagcctaaccacaagaggctggtgcttagtactgttttccctgcacgtaggggtcttttaaaaatataaagcttgtgataaagagaggagaatatgggactccatgaaccagtgttgatatgtttgattaagacttttcacaaaataatcatataaaacactagtctctttattagtagaaacttctgtggctatgcagaaatagagatcgaaccaaaaaaaatcatttaaactttaaaaatattttaaatggactttggggagacattttttgtgtgttttaagaatgaattgtagtgctctttaattcagctacatatattcatgtggtgatagggatcaacttgacacaactttgaaactgcataaagtagacataggaactagaggaaagctcaggctgcattagagtatgaatttagcattgggaaaagcccttattcttgaatctagagttactatttttgtatatatttgcatagtgtttaaacctgcagcctaaactactgaaatttgtgattgtatgtttgtgtgagcttcagtttaatgaaagattcataatggttctttgtattattataatacttggtgttggggtgttctttctgttttgttttttactttaattttgttttgatttttttttttttttttttggcgggggtaggtgagggtttggagcatgtggtctttttaaaaaattgtaaccctctagaaaatatcaaagaaatgaaccagacgtggtttaaatagttgattttcctattttaacagtaccaactagttaattgggaaatgtaagttctgaatgttcacattgctttaccagtttggcactggaaccaagagcacatgtcgtggctggctacaaggttgtaaagcagaaaatcgaagtttaccatgtctgtaatgtgtacatgaagtgtcaatttagaacagttactaggataaactccattattgccatggctgtcatggtacccaagtgacttggaagatgcatttaaattactcagctgaaatcacttgatcatcttgtgccaagatatgctgttggtgcctgatagggattagtcttttaggtgccctgttctcctaccataattgtgaatgatttgtgagaagtgcaagccatgtttatcctgaatttttacttaataatttgtattactagtcatatgcatgtagctttctgtttacatcctatgccacatggtcttcatttatgccaggtaaactgtatttgaactatgtgcagctagctttgttttaatctgcttggcaaccagtgtagctgctgtaacaatctatcttattgttcaaatatataagagccaaactcttttccattccatctaaaatgttttcatttagtactcttctttcctcctactctatgaacttcaaaacaaaaacaaaactttgagagcagcacatgcatccaggtatttatagattattgccagtgtcttttctgtatgctataagcaagggagcttaggtgttatttctttaatttatgcttgaatctgaaaaattatttctgacttactccatggcctccttataataagtagaagttttatatataattaattttcagcattgggcactgaattaggacagtcctcatctcattgcttggcccttcaagcaacctagctaaaaggtgctgatattttatttagtactgccaacttcaagtgatttagatatctatctatctagatttctgaaccaagatatatttatagttcacttttgggtttttatacccacggtaggattctgcattccagcattaaatctgcttcattttagaacctttataaaagcaatagctggaatatactcccagttttaaaataaatgcctgattgatttaaagcaagtaggttatgctgaagtatataaagaagttttatattctctcaaaaatggtattatctttctttatttgctagattcttacaaatcttttaagagggctgtaacagttgctgctagtattagggttccacatcattctaatgtatagtttcaagtcttaatagacaatctgaattccactacatttcttttggctccaacattccttttagcttgaccagtctaatttaaaatgtgtttgttggaggtcattaacgttacttgtacaatgctgtcactgtgtgacatccatatgaattttggtatatatcaatcaatcaatcaatcacattgcattcaatcaatcagctgtgattgattgattatgcttagaaatactatagtaactagatgcagtgtgaattttttccattaacaaacaaacaaacaagtcagtggcttaaatgtgattatggtcctgcaaggtgattcttgctaaaatatctaaacttttgttttgttttaactgaatcattttttaacttaaaaagctggaaaatatcaaatgctgtttttttttttcattgtcaacagtggtgtgtcattttatgtatgttcctaatgcttatggaactcctccaaaataaagttactcaaagag

SEQ ID NO: 4161 - protein, 835 aa, Homo sapiens
GKIEMKVHMHTKFCLICLLTFIFHHCNHCHEEHDHGPEALHRQHRGMTELEPSKFSKQAAENEKKYYIEKLFERYGENGRLSFFGLEKLLTNLGLGERKVVEINHEDLGHDHVSHLDILAVQEGKHFHSHNHQHSHNHLNSENQTVTSVSTKRNHKCDPEKETVEVSVKSDDKHMHDHNHRLRHHHRLHHHLDHNNTHHFHNDSITPSERGEPSNEPSTETNKTQEQSDVKLPKGKRKKKGRKSNENSEVITPGFPPNHDQGEQYEHNRVHKPDRVHNPGHSHVHLPERNGHDPGRGHQDLDPDNEGELRHTRKREAPHVKNNAIISLRKDLNEDDHHHECLNVTQLLKYYGHGANSPISTDLFTYLCPALLYQIDSRLCIEHFDKLLVEDINKDKNLVPEDEANIGASAWICGIISITVISLLSLLGVILVPIINQGCFKFLLTFLVALAVGTMSGDALLHLLPHSQGGHDHSHQHAHGHGHSHGHESNKFLEEYDAVLKGLVALGGIYLLFIIEHCIRMFKHYKQQRGKQKWFMKQNTEESTIGRKLSDHKLNNTPDSDWLQLKPLAGTDDSVVSEDRLNETELTDLEGQQESPPKNYLCIEEEKIIDHSHSDGLHTIHEHDLHAAAHNHHGENKTVLRKHNHQWHHKHSHHSHGPCHSGSDLKETGIANIAWMVIMGDGIHNFSDGLAIGAAFSAGLTGGISTSIAVFCHELPHELGDFAVLLKAGMTVKQAIVYNLLSAMMAYIGMLIGTAVGQYANNITLWIFAVTAGMFLYVALVDMLPEMLHGDGDNEEHGFCPVGQFILQNLGLLFGFAIMLVIALYEDKIVFDIQF

SEQ ID NO: 4162 - DNA, 568 bp, Homo sapiens
  misc_feature (564)..(564): n is a, c, g, or t
gcggccgcccaggctgcccccgcccgcgcgcttccgttggggggcccggggagcggcgcccgcggccgggccgcattgtgacgtagcggggccgcggcagcgcctccaccgcccgcctacttcggctgaggctgttctgctcctgccgctgcggtccgtcggtcggtcagtcagtcccttcgcgctcctgagccgccggcgcgccgggcgccccgggaatttataagtatttgaccgtactcaaaatgtgcaaggaagaataatggaagcccctgaataccttgatttggatgaaattgactttagtgatgacatatcttattcagtcacatcactcaagacgatcccagaactgtgccgaagatgtgatacgcaaaacgaagacagatcagtttctagctctagctggaattgtggcatctcaactcttattacaaacacgcaaaagcccacaggaatcgctgatgtgtacagtaagttccgcccagtgaagcgggtttcgccactgaaacatcagccagagactctggagaacaatgaaagtgatgaccaaaagaaccaganagtg

SEQ ID NO: 4163 - DNA, 537 bp, Homo sapiens
  misc_feature (403)..(403): n is a, c, g, or t
  misc_feature (438)..(438): n is a, c, g, or t
  misc_feature (444)..(444): n is a, c, g, or t
  misc_feature (467)..(467): n is a, c, g, or t
  misc_feature (510)..(510): n is a, c, g, or t
  misc_feature (531)..(531): n is a, c, g, or t
gtagaatgtaaaaagtcattttagatgccacccattgactttgccacatagctgaactgtgtttactggaaaaattcagaggcctaaagtttaaaataaaatttacttctgatgttttaattaaaatgtttgccacattaacttttctgatgccttaaaagtgaacttctttaaagaacctttgtgctattttatcacaggcttacactacaattgttaataaatacttcatttggagatgtatggtgtaaaacacacaaacacacacaaaaaagcacaagcccgctgcatgacccgtctctcctttctgggactatttctgctgcgtcctgcaccctcctgggcccacctccgattcacagaggtttcagggggaccaaatcactgctggttttcaattttnttttaacaatacatttttgtggtcagttccaacancactgncgtcttttaaactggaatgaccncttcagatacgtgccctagtgcaaccacagtgagccaaagtgnagggtttttttctccccttgntaaggt

SEQ ID NO: 4164 - DNA, 467 bp, Homo sapiens
ttttttttttttgatctaacatccatttattgagaagtttccacttgctgtacacttagattgcagccttagattttatatttggatcaaagttccatcacattgcatcattttcagaatatttgaacttttatttcaatacaaactgaggtaaataaatatcccccccaaatagacgctgatgttccatatctaacaagtaaccaaattgtcatgataatctgggatcactatttagactccatttatgaaagaaaatcttttatagatttcacaatagcctgattttcattttgtaaatgtgtctcattgttgagagtgtctttattcactcccattcaatgatgaagtgactctactgtttgaggcccaatgccacaagttaacttcatagaaatgagtcacgtgcaatttggcccctagaagtgcttgccagcaatacagatgggcttattactagcacataa

SEQ ID NO: 4165 - DNA, 326 bp, Homo sapiens
cactttgcagccctcatctcatgttctttgtagcggaccgagtgggtttgctataggcctcgtctgactttgtcttgcgtcttttctctgtggactcttgaggacgcctgagccccagccctgcccctgaccagcctcccccttgggtccaggggtctttcggctcatattgcagggcctgccaatgccttcacgcaccccttccccaaaggtgcccggcagggaggcagggcctcccccactcagcgcaggtcaggctaaggccagtcggctggtcactatgcaatgctgccctggggaggctccctgagagcaccaccaataca

SEQ ID NO: 4166 - DNA, 200 bp, Homo sapiens
  misc_feature (2)..(2): n is a, c, g, or t
  misc_feature (8)..(8): n is a, c, g, or t
  misc_feature (110)..(110): n is a, c, g, or t
  misc_feature (115)..(115): n is a, c, g, or t
  misc_feature (139)..(139): n is a, c, g, or t
  misc_feature (146)..(146): n is a, c, g, or t
  misc_feature (154)..(154): n is a, c, g, or t
  misc_feature (157)..(157): n is a, c, g, or t
  misc_feature (186)..(186): n is a, c, g, or t
  misc_feature (197)..(197): n is a, c, g, or t
cncccacntgtcaacaacagcccatcctgaagacttgcttaccacaactgagagtggggagtcagtttgaggcctagcatcacttaaacttcctccaaaggcacaaaagncagangagaaaaatgaagacgggacattntgaaatngtcaccantcngctggcaaccatgattctagtggacaatnttccaggtgtngtc

SEQ ID NO: 4167 - DNA, 463 bp, Homo sapiens
tttttttttttttttttttttttttttttttttttcataggatggagttttattgggaggacattctggacgggctcccagcaagagtctggcaatggagaatgaaaatgaatgagcctggaatgagggagggtgcggcctcggctacacaaagttcacccggcccccaactgcctcccagcgtgttagctcctgtggcaactccccacttctctctctgtttttcaacccaaatcctagagcagagggctcttcgctcctcacaccatctccaccaggctgcagggggagtcactagcccactcaagagctctctcctgttggtccctgattcgcaggggcacgtcattccttcttggtaactcattctctttaacagcccgacacagggtctccaggaaaaggacaggagctcacacagtcatgaacagagatgcatctggagcaggaataaggatgctga

SEQ ID NO: 4168 - DNA, 881 bp, Homo sapiens
aaattttgtgcgtttggcgggtttcgctctcttcataagtattgatcattccgcagccctgcggaccggagcctggttagcagtcgctttctgatcccggaaaggaccctgagctgggaaatagcgagaggcggggatgttggggattttaaaacttatgtagatcaggcatgtagagctgctgaggagtttgtcaatatttactatgagacaatggataaaagaagacgggcactaaccaggctgtatctggacaaggccaccttaatatggaatggaaatgctgtttcagggctggatgccctaaataatttttttgacacattgccttctagtgagttccaggtcaatatgttagattgccaaccagttcatgagcaagcaactcagtcccaaactacagttcttgttgtgaccagtggaactgtgaagtttgatggaaacaaacaacatttcttcaaccagaacttcctgctgactgctcagtccactcccaacaatactgtgtggaagattgcaagtgattgcttccgttttcaagattggtctagtagttaaaggggcaaaagtccattctcatttggtccattagttccagcaattgaaatttatgtgaattattttgattgtagaagcactataatatgtgctgaaactaaatttctttaatattttctattcctgtcagcaccttttctagcagctgccagtttggagcattgccctctaagagctttaaaactatttttttacatgccttatatacattccactaatgacattcttataataatattaaacacatgatcttggtactaacatactcactgtgaacccagcctattgcaaaaataaaatctttttataatattaaaaaaaaa

SEQ ID NO: 4169 - protein, 114 aa, Homo sapiens
MDKRRRALTRLYLDKATLIWNGNAVSGLDALNNFFDTLPSSEFQVNMLDCQPVHEQATQSQTTVLVVTSGTVKFDGNKQHFFNQNFLLTAQSTPNNTVWKIASDCFRFQDWSSS

SEQ ID NO: 4170 - DNA, 2788 bp, Homo sapiens
aagaacgcccccaaaatctgtttctaattttacagaaatcttttgaaacttggcacggtattcaaaagtccgtggaaagaaaaaaaccttgtcctggcttcagcttccaactacaaagacagacttggtccttttcaacggttttcacagatccagtgacccacgctctgaagacagaattagctaactttcaaaaacatctggaaaaatgaagacttgggtaaaaatcgtatttggagttgccacctctgctgtgcttgccttattggtgatgtgcattgtcttacgcccttcaagagttcataactctgaagaaaatacaatgagagcactcacactgaaggatattttaaatggaacattttcttataaaacattttttccaaactggatttcaggacaagaatatcttcatcaatctgcagataacaatatagtactttataatattgaaacaggacaatcatataccattttgagtaatagaaccatgaaaagtgtgaatgcttcaaattacggcttatcacctgatcggcaatttgtatatctagaaagtgattattcaaagctttggagatactcttacacagcaacatattacatctatgaccttagcaatggagaatttgtaagaggaaatgagcttcctcgtccaattcagtatttatgctggtcgcctgttgggagtaaattagcatatgtctatcaaaacaatatctatttgaaacaaagaccaggagatccaccttttcaaataacatttaatggaagagaaaataaaatatttaatggaatcccagactgggtttatgaagaggaaatgcttgctacaaaatatgctctctggtggtctcctaatggaaaatttttggcatatgcggaatttaatgatacggatataccagttattgcctattcctattatggcgatgaacaatatcctagaacaataaatattccatacccaaaggctggagctaagaatcccgttgttcggatatttattatcgataccacttaccctgcgtatgtaggtccccaggaagtgcctgttccagcaatgatagcctcaagtgattattatttcagttggctcacgtgggttactgatgaacgagtatgtttgcagtggctaaaaagagtccagaatgtttcggtcctgtctatatgtgacttcagggaagactggcagacatgggattgtccaaagacccaggagcatatagaagaaagcagaactggatgggctggtggattctttgtttcaacaccagttttcagctatgatgccatttcgtactacaaaatatttagtgacaaggatggctacaaacatattcactatatcaaagacactgtggaaaatgctattcaaattacaagtggcaagtgggaggccataaatatattcagagtaacacaggattcactgttttattctagcaatgaatttgaagaataccctggaagaagaaacatctacagaattagcattggaagctatcctccaagcaagaagtgtgttacttgccatctaaggaaagaaaggtgccaatattacacagcaagtttcagcgactacgccaagtactatgcacttgtctgctacggcccaggcatccccatttccacccttcatgatggacgcactgatcaagaaattaaaatcctggaagaaaacaaggaattggaaaatgctttgaaaaatatccagctgcctaaagaggaaattaagaaacttgaagtagatgaaattactttatggtacaagatgattcttcctcctcaatttgacagatcaaagaagtatcccttgctaattcaagtgtatggtggtccctgcagtcagagtgtaaggtctgtatttgctgttaattggatatcttatcttgcaagtaaggaagggatggtcattgccttggtggatggtcgaggaacagctttccaaggtgacaaactcctctatgcagtgtatcgaaagctgggtgtttatgaagttgaagaccagattacagctgtcagaaaattcatagaaatgggtttcattgatgaaaaaagaatagccatatggggctggtcctatggaggatacgtttcatcactggcccttgcatctggaactggtcttttcaaatgtggtatagcagtggctccagtctccagctgggaatattacgcgtctgtctacacagagagattcatgggtctcccaacaaaggatgataatcttgagcactataagaattcaactgtgatggcaagagcagaatatttcagaaatgtagactatcttctcatccacggaacagcagatgataatgtgcactttcaaaactcagcacagattgctaaagctctggttaatgcacaagtggatttccaggcaatgtggtactctgaccagaaccacggcttatccggcctgtccacgaaccacttatacacccacatgacccacttcctaaagcagtgtttctctttgtcagactaaaaacgatgcagatgcaagcctgtatcagaatctgaaaaccttatataaacccctcagacagtttgcttattttattttttatgttgtaaaatgctagtataaacaaacaaattaatgttgttctaaaggctgttaaaaaaaagatgaggactcagaagttcaagctaaatattgtttacattttctggtactctgtgaaagaagagaaaagggagtcatgcattttgctttggacacagtgttttatcacctgttcatttgaagaaaaataataaagtcagaagttcaaaaaaaaaa

SEQ ID NO: 4171 - protein, 760 aa, Homo sapiens
MKTWVKIVFGVATSAVLALLVMCIVLRPSRVHNSEENTMRALTLKDILNGTFSYKTFFPNWISGQEYLHQSADNNIVLYNIETGQSYTILSNRTMKSVNASNYGLSPDRQFVYLESDYSKLWRYSYTATYYIYDLSNGEFVRGNELPRPIQYLCWSPVGSKLAYVYQNNIYLKQRPGDPPFQITFNGRENKIFNGIPDWVYEEEMLATKYALWWSPNGKFLAYAEFNDTDIPVIAYSYYGDEQYPRTINIPYPKAGAKNPVVRIFIIDTTYPAYVGPQEVPVPAMIASSDYYFSWLTWVTDERVCLQWLKRVQNVSVLSICDFREDWQTWDCPKTQEHIEESRTGWAGGFFVSTPVFSYDAISYYKIFSDKDGYKHIHYIKDTVENAIQITSGKWEAINIFRVTQDSLFYSSNEFEEYPGRRNIYRISIGSYPPSKKCVTCHLRKERCQYYTASFSDYAKYYALVCYGPGIPISTLHDGRTDQEIKILEENKELENALKNIQLPKEEIKKLEVDEITLWYKMILPPQFDRSKKYPLLIQVYGGPCSQSVRSVFAVNWISYLASKEGMVIALVDGRGTAFQGDKLLYAVYRKLGVYEVEDQITAVRKFIEMGFIDEKRIAIWGWSYGGYVSSLALASGTGLFKCGIAVAPVSSWEYYASVYTERFMGLPTKDDNLEHYKNSTVMARAEYFRNVDYLLIHGTADDNVHFQNSAQIAKALVNAQVDFQAMWYSDQNHGLSGLSTNHLYTHMTHFLKQCFSLSD

SEQ ID NO: 4172 - DNA, 492 bp, Homo sapiens
  misc_feature (24)..(24): n is a, c, g, or t
  misc_feature (26)..(26): n is a, c, g, or t
  misc_feature (29)..(29): n is a, c, g, or t
  misc_feature (214)..(214): n is a, c, g, or t
  misc_feature (430)..(430): n is a, c, g, or t
acaggatttctttggccactttgntnganattcaccacttccatccaattccagtgagagacatggactcacagatggagcatttcttgcaacaagagatactactttttcaaaaagtcacccaggaattgatagtgttgaatgactcgatactcgatcgtggatggtttccagttcaaggatactttctacagcagaataataatactagctnacagctagtacaaggacggttttgtgctcaactgaaatccagctgaatacagaattgtacaggaaacagttaatatggtgatagaatagaaacagtagcaaacgtgaactaaatcatactatgaatgcctaaactactgctgtaacttttggaaaaaatgataataccactttattgcttttcgaagtatgaatattttagtgtatatgctctagncctcaaactctataaaagagtctcaaagaagttggctggataaagcctgctgtggatgtctt

SEQ ID NO: 4173 - DNA, 2138 bp, Homo sapiens
atgagccccgggctgctgctgctcggcagcgccgtcctgctcgccttcggcctctgctgcaccttcgtgcaccgcgctcgcagccgctacgagcacatccccgggccgccgcggcccagtttccttctaggacacctcccctgcttttggaaaaaggatgaggttggtggccgtgtgctccaagatgtgtttttggattgggctaagaagtatggacctgttgtgcgggtcaacgtcttccacaaaacctcagtcatcgtcacgagtcctgagtcggttaagaagttcctgatgtcaaccaagtacaacaaggactccaagatgtaccgtgcgctccagactgtgtttggtgagagactcttcggccaaggcttggtgtccgaatgcaactatgagcgctggcacaagcagcggagagtcatagacctggccttcagccggagctccttggttagcttaatggaaacattcaacgagaaggctgagcagctggtggagattctagaagccaaggcagatgggcagaccccagtgtccatgcaggacatgctgacctacaccgccatggacatcctggccaaggcagcttttgggatggagaccagtatgctgctgggtgcccagaagcctctgtcccaggcagtgaaacttatgttggagggaatcactgcgtcccgcaacactctggcaaagttcctgccagggaagaggaagcagctccgggaggtccgggagagcattcgcttcctgcgccaggtgggcagggactgggtccagcgccgccgggaagccctgaagaggggcgaggaggttcctgccgacatcctcacacagattctgaaagctgaagagggagcccaggacgacgagggtctgctggacaacttcgtcaccttcttcattgctggtcacgagacctctgccaaccacttggcgttcacagtgatggagctgtctcgccagccagagatcgtggcaaggctgcaggccgaggtggatgaggtcattggttctaagaggtacctggatttcgaggacctggggagactgcagtacctgtcccaggtcctcaaagagtcgctgaggctgtacccaccagcatggggcacctttcgcctgctggaagaggagaccttgattgatggggtcagagtccccggcaacaccccgctcttgttcagcacctatgtcatggggcggatggacacatactttgaggacccgctgactttcaaccccgatcgcttcggccctggagcacccaagccacggttcacctacttccccttctccctgggccaccgctcctgcatcgggcagcagtttgctcagatggaggtgaaggtggtcatggcaaagctgctgcagaggctggagttccggctggtgcccgggcagcgcttcgggctgcaggagcaggccacactcaagccactggaccccgtgctgtgcaccctgcggccccgcggctggcagcccgcacccccaccacccccctgctgagggggcctccaggcaggacgagactcctcgggcaagggccgtgcccgcccacctctgctgcccacggccacccacccttctcccctgccccgtcccctgggccacccttcacgctggcttccagcgggccctctgccgaccgcctgcttcacacccctcagcgctccctgtcgcctgcggactccatggcccttcctggactggcccttgcccaactcccagccaccaccactgtccctaccactgagcccttgcacaggccacttgctcagacgagacaccctaactcttgctcactccctaaagccctcttcaggggtcacctcctccaagaagccctccttgccaccccccgccggcaggggcccctcctctgtgctccctcggtcacctgtgctacctctaacaccacactgaccacactgtatcgtgagtgtccgttgacgtgaccaattgccctgccaggctgtcagcgcctcaagggtagggtctgcgtgtgatttgtctctgagccccctgtgcccacccagggcccggcacagagtcgatgctcaataaatgtgtgttgactgcaaaaaaaaaaaaaaaaaaaaaaaaaaaaaaaaaaaaaaaaaaaaaaaaaaaaaaaaaaaaaa

SEQ ID NO: 4174 - protein, 500 aa, Homo sapiens
MSPGLLLLGSAVLLAFGLCCTFVHRARSRYEHIPGPPRPSFLLGHLPCFWKKDEVGGRVLQDVFLDWAKKYGPVVRVNVFHKTSVIVTSPESVKKFLMSTKYNKDSKMYRALQTVFGERLFGQGLVSECNYERWHKQRRVIDLAFSRSSLVSLMETFNEKAEQLVEILEAKADGQTPVSMQDMLTYTAMDILAKAAFGMETSMLLGAQKPLSQAVKLMLEGITASRNTLAKFLPGKRKQLREVRESIRFLRQVGRDWVQRRREALKRGEEVPADILTQILKAEEGAQDDEGLLDNFVTFFIAGHETSANHLAFTVMELSRQPEIVARLQAEVDEVIGSKRYLDFEDLGRLQYLSQVLKESLRLYPPAWGTFRLLEEETLIDGVRVPGNTPLLFSTYVMGRMDTYFEDPLTFNPDRFGPGAPKPRFTYFPFSLGHRSCIGQQFAQMEVKVVMAKLLQRLEFRLVPGQRFGLQEQATLKPLDPVLCTLRPRGWQPAPPPPPC

SEQ ID NO: 4175 - DNA, 478 bp, Homo sapiens
  misc_feature (428)..(428): n is a, c, g, or t
  misc_feature (456)..(456): n is a, c, g, or t
taaagttccagaaacactttatttaaaaatggagttgtaaatgcataacaaaataacataagtaataaatgtaacaaaaataaataaggaggataatgtattcatacaaaataaaaataacatagtaaaaggccaaatgtttataattgaaccaaactgtgtaaacacttaaacaagaatgtaagcagagtagattctagtattttcctaaactccttaccttctacttccatgtggatataatcagtacccaaatattaaataaaagagggagcaatgctgattattttgtccaactttttcttcaaatggattgaccctgttttaacatttcgtttattccttcaaagcatttgtatctttccatttatgttctttaaaaccttttttcagtcttcctttattagacagaatggggaatttagctntacaaggagaatagttcatttacctttntttttttgtatttaaagaaaaa

SEQ ID NO: 4176 - DNA, 580 bp, Homo sapiens
tacacatcctccctgtgcatatcacctcctaggacagggcagacgctctgtatcagaagcatgcaggtcatacgttactccagattccaatgggtggaaaagaacgaatggcaggattttctcctcttgttgctgaagacattatgttaaaagaaggactgggggcatctgaagcagtggccgacatcaagttttcctctgcaggttgggtttcagtaacacctaattttaaggacagactgcatctccgaggctatacacctgaaggaacagttttgaccgtccggccccctctcttgccatatattgttaacatcaaaggacagcgcatcaagaaaagtgtggcctataaaaccaagaagcctccttcccttatgtacaacgtgaggaagaagaaaggaaagataaatgtatgataccgaccttgttcactccagatattaactgtattgaacacaacaaaatacattgaatttgtattaaacatataacgcataaataaagcttccattcttacccattttttcttttttctttacctttatttatactgagactgagccctgctctgttgcccagg

SEQ ID NO: 4177 - DNA, 473 bp, Homo sapiens
ggacacagtcttgctgttgtcgcctaggctggagtgcagtggcgcaattttggcctactgtaacctgtttcctgggttcaaacttctgcctcagcctcccaagtagctgggattacaggtgccactgtcaccacgcctggctaattttttgtatttttagtagagacatggtttcaccatgttggccaggctggtctcgaactcctcacctcaggtgatctccccgcctcggcctcccaaagtgctgagattacaggtgtgagccacagcgtccagccccagagttttacttcttaaaaataatttattgtaccacaagtagctattggtagagatgaaagctaaagcagaatgatggaatacagttgatgaaactttaagaagcaatgtagcatgtaatcctcatagcttactgtcaggatgaagcctttatgtttacatccaagaactgagttcactgatgtcaacaccta

SEQ ID NO: 4178 - DNA, 382 bp, Homo sapiens
agctgctcccgaggtggccttgagaaggaagaagcaggatgacagagcctgagcagcggaaccagcctgcaccctcccttctggcccagcgacctgggctgtggctgagacaataatgaggccagaagtagccggagcctgtcaggaagggcaggggaggactgtggggtctgggctctgtcgctgtaaccatctgctcccaggctgtgtgcagaaaatggcatttacactattgtgcagctcattctcaatgaaaaacggccatggttgctaaataaagcttgtgtgctctgaatatagccaagcaaaaaaaaaaaaaattgataacactattgtgtaaaatgcgtgaaatattacccaaagtataaccacctcgaggggg

SEQ ID NO: 4179 - DNA, 462 bp, Homo sapiens
  misc_feature (7)..(7): n is a, c, g, or t
  misc_feature (324)..(324): n is a, c, g, or t
  misc_feature (384)..(384): n is a, c, g, or t
  misc_feature (396)..(396): n is a, c, g, or t
  misc_feature (404)..(404): n is a, c, g, or t
  misc_feature (429)..(429): n is a, c, g, or t
  misc_feature (436)..(436): n is a, c, g, or t
ggccganagcaggcgccgcttcgaggcccgcggaaaacggcgccgagacccgctcctgcagtattagttcttgcagctggtggtggcggctgaggcggcatggatctcagcgagctggagagagacaatacaggccgctgtcgcctgagttcgcctgtgcccgcggtgtgcccaaggaggccttgctcctgggcgtcgatgaggcgggcaggggcccgtgctgggccattggtctacgccatctgttattgtcccctgcctcgcctggcagatctggaggcgctgaaagtggcagactcaaagaccctattggagagcgagcgngaaaggctgttttgcgaaaatgggaggacacggatttttcggctgggcgttggatgttgntttttccaaacntcattttnaccagcatgttttgggcgggtcaantacaacntgaattcctgttcacatgatacagtt

SEQ ID NO: 4180 - DNA, 282 bp, Homo sapiens
tttttttttttttttttaagtaatagtacttttaataaaattaagttcttaatagcacatttaatacattaaccctcccccttcttggtttctctgcattttgtgcaacatcactttgacttgattattcttgggtctgttttatttcccgcttttattttgcttttgaaatctttttccttggtggatttgtacgtgtcttcactagatgcctcaaattaagtctgaccacaatcctactctactttctacagtggagagaccatcctccctgccccaggg

SEQ ID NO: 4181 - DNA, 2586 bp, Homo sapiens
gtacattaaaaataatttaatagccacaatatgatgttctttaagctgcaaattgagtacactgggaatcaacaaatttgatgaagcctgtctgtctcttcaccagtggagtgagtgcagcagttagaaagagaagcaatattgtgcaactggtgcagtggtgagttaatcatagtgtataaccttgtgttcatgaaacaggttgttcattgttctgcatctctcttcatttaaaaaggatacacaattctttcctcattgcatattacaccaaacgtttgagggaaaaatcctcattcgtaaaggattttggatttataatctaaaactcaacaataaagaaataatattccaagtctctggtttcctaatatacataataactgtttataaagaaggtctaagagctgatatttgccaaagtgatagaagagttgttttttcctctctactaccaagctttaagacattaaaagaagtctagtgtatttgaatattttagagaaagctttatcattttttaagatgccaagatgctgcctacgtttgcaaaagttgtctaagaattcaccatgagctatattttcttctggatctttgaccaaggtgatgtcagcttatttctggggaaggtgttgagctcttatacatgaaaatggatataggctattctctgggatgagtgtcatttcaatgctttataaatccatgaagctgcttgtctcataaagtagaactgatacaaattttggttggatatatagagaattttataaatgtattgccttagaatttctgggtggagacccaactacaatgacattgtcatgcaagaactataaagataattagagttaaaagttgtttaaattgtgcccttaaatacagcagaacctggagaaggtcatacttcaaaggtcgattttgagtccgaataaagaaagacctagtaacagatagtttttttttgttcattttcttctaccaagtagaggtttatgccctcagaactaaactagtaaaaatatctgaacaaaaaacctttcgttgttggcataaaaatgtgatacacttagagacattttgtttattgcatataaatctaatttttccataaattagatttatgatattttcataaagcacttgattagtttttcaaggcgtaccatcacaaagatgctttcctgcagagttctttgtatcaacagcctatggttgagatgttttctcatttcctgtagagagagaataccactaacaaacaagcaaaaactttagtgccaaaatagtggaactattttgtcatcttttgagaaaaaaatatacaaagaagtcatcttttcattaagtggattccctggttcctttccagctggttgtggaagtaatggctaacatccttcagctgactttgtctacaaggattattagcaaattctgtaggagcaagcatgtctgaccttaacttaatggatcccttattcaatcagtggcttctgtctttatgtctgttggcatatcaaaatggtttctgttcctagaaaagtaataacatatgcttatctttattctttttccaggtgattttgttttcaaatgctccttgtgaaaacacctagtgttgtagaaaggaaagtggccagaaagaacaacttgggaccatgagtaggtcattaaatagcttagtgatttatcctcatatagggcttataaaccctgtatgtgtttatatgtgcttcacagagttcgtgtcaggctgaaaggagatatgtataagaaagtggtttgtaaattatgttccatttcataaatagacactattcacaaactaaaatctaataaaaaaccacagttgtaatttaaactgcttgatataaaaagaggtatcatagcagggaaaacacactaattttcatacagtagaggtattgaaaactgaaaatgggaaggcaacttgaagtcattgtatttgattgaaaatgtttaatacatctcattattgacaaaatatgtcatcttgtatttatttcaaggaaaccaatgaattctaggtagtatattacaagttggtcaaaatattccatgtacaaatagggcttctgtgtccatagccttgtaagagatactgattgtatctgaaattattttttaaaaaaataaattatcctgctttagtgtgttaaaagtagacgatgttctaatataacactgaagtgcttcattgtatcccaacagtttaccttcaagtaatattatctttatttttaggctaagcacgtttgattattttgtctgtctcctatatagatctgttttgtctagtgctatgaatgtaacttaaaactataaacttgaagtttttattctatatgccccttaatagactgtggttcctgacgcacactgttaggtcattattttgttgtaccaaagttctagtggcttcagaaatcatagcatccaatgattttttggtgtctggctatgaatactatggttgagaattgtattcagtgattgtttctgcacacttttcaaataaaaaatgaatttttatcaattaaaaaaaaaaaaaaaaaaaaa

SEQ ID NO: 4182 - DNA, 485 bp, Homo sapiens
tttttttttttttttttgagagtttagcaaatatttatttctttttcatcgaagttgagccaaatagagattgtacataatggtacatagcgcgtagtggcagatccacgttgtagtcaaagagacacactgttaatggtccctgcagcttgccaccagatgctaataagtctcatggcttagaatcagtgaaaagaaagaatatggcacacactgttatgaacccagccaagcaaataaaaggataccatacagagaagaacactcccatatagtgctctagcttataagtaagccatttaaacacaagcagaacacaatttataatgaaagccaaaatataaatctatccttccaagaaaaaaaaaataaacataccagcttaaataacactgctacaatcagctgagtgtttgtggaaaatctattatttatatctgattcaaatgcaacagttgttggcctgaaaaatgagtcctttttta

SEQ ID NO: 4183 - DNA, 439 bp, Homo sapiens
  misc_feature (376)..(376): n is a, c, g, or t
  misc_feature (399)..(399): n is a, c, g, or t
ggctttgtaaccacaggaaaaaataaactcttccatcccttaaagaatagaatagtttgtccctctcatgggaattgggctgtatgtatattgttcttcctccttagaatttagagatacaagagttctacttagaacttttcatggacacaatttccacaacctttcagatgctgatgtagagctattgggaaagaacttccaaactcaggaagtttgcagagagcagacagctagagataactcgggacccagagttggtcgacagatgttagatgtatcctagcttttagctataaaccactcaaagattcagcccccagatcccacagtcagaactgaaatctgcgttgttgggaagccagcagtggccttngggaaggaaggccatggctgttnggttccagagagggtggggcttggcaagcactttcccggg

SEQ ID NO: 4184 - DNA, 413 bp, Homo sapiens
  misc_feature (386)..(386): n is a, c, g, or t
  misc_feature (408)..(408): n is a, c, g, or t
attcggcacaggcaatctgaagtgggagcggaggtggttgggtttctgagtttgagtctgtcgctcctggctctcccgacacaacagcggcgcccacctgcccgcaacggactcccaggagcctcgagctcttcatttccaaagctgaactgccccgtgtctgattccgatttctcttgagcgcgtttcggagccggcccagaacagagggaagccagacacaccatacccggcccaacagtggcagggcggctgtgggtgctggtcaagctgggtcacccggcactgagtgacgattcagcaaatacttcagtggacgaaatatttgcagtgcagtgaggtgaggggcattaaccgcggatatttttcgaagagatgagagagantggggatttaggccagggtttnaaggg

SEQ ID NO: 4185 - DNA, 1825 bp, Homo sapiens
aagagccctgacttcccttgttttccccccttgcgcccaacgtgcgtccgctcccccgccgagcgcggagtcgcctcagttgcccaggcctctatctgcatggagggccgggccgccgtgaccagatctgcgcacggggtacggacgtgcccgggcagatgggggcctacggggtgacaccgaggccgggacagcttcaggggccccagaaggacctgacccagaaattgaggtccccgctgccttctgaggagggggaggagttgctcctaggtctgaaccccgccagccttgccccgtaggaagctggagtgcgggcctcgtccacccacagaccccggggagcgcagggaaaagggtgcttcggtcgttccgatggcagtggagaccacggtccacactcacctctctgcgtctccaccgcagggctctccctacgaccacacacccggcatggcgggctccttggggtaccatccttacgcggcgcccctgggatcgtacccttacggggacccagcgtaccggaagaacgccacaagggacgccacggctaccctcaaggcctggctcaacgagcaccgcaagaacccctaccccaccaagggcgagaagatcatgctggccatcatcaccaagatgaccctcacccaggtgtccacctggttcgccaacgcgcgccggcgcctcaagaaagagaataaaatgacgtggacgccgcggaaccgcagcgaggacgaggaagaggaggagaacattgacctggagaagaacgacgaggacgagccccagaagcccgaggacaagggcgaccccgagggccccgaagcaggaggagctgagcagaaggcggcttcgggctgcgaacggcttcagggaccacccacccctgcaggcaaggagacggagggcagcctcagcgactcggattttaaggagccgccctcggagggccgcctcgacgcgctgcagggccccccccgcaccggcgggccctccccggctgggccagcggcggcgcggctggcggaggacccggcccctcactaccccgccggagcgccggcgcccggcccgcatccagccgcgggcgaggtgcctccgggtcccggcgggccctcggttatccattcgccgcctccgccgccgcctcctgcggtgctcgccaagcccaaactgtggtctttggcagagatcgccacattgtcggacaaggtcaaggacgggggcggcgggaacgagggctctccatgcccaccgtgtcccgggcccatagccgggcaagccctaggaggcagccgggcgtcgccggccccggcgccgtcacgctcgccctcggcgcagtgtccttttccaggcgggacggtgctgtcccggcctctctactacaccgcgcccttctatcccggctacacgaactatggctccttcggacaccttcatggccacccggggcccgggccaggccccacaaccggtccggggtctcatttcaatggattaaaccagaccgtgttgaaccgagcggacgctttggctaaagacccgaaaatgttgcggagccagtctcagctagacctgtgcaaagactctccctatgaattgaagaaaggtatgtccgacatttaacgcgggctgcgtcggtcccggacttttctaatttattaaaaacatggccttggcagttatttttccatcaccgagagagagagacagagagagaaaataaactacccctcctattcagaagtttatagtttatggagatggatgacataaaaatgtaaacatctccacacacacaaaaaaatgttttaaccaaccg

SEQ ID NO: 4186 - protein, 417 aa, Homo sapiens
MAVETTVHTHLSASPPQGSPYDHTPGMAGSLGYHPYAAPLGSYPYGDPAYRKNATRDATATLKAWLNEHRKNPYPTKGEKIMLAIITKMTLTQVSTWFANARRRLKKENKMTWTPRNRSEDEEEEENIDLEKNDEDEPQKPEDKGDPEGPEAGGAEQKAASGCERLQGPPTPAGKETEGSLSDSDFKEPPSEGRLDALQGPPRTGGPSPAGPAAARLAEDPAPHYPAGAPAPGPHPAAGEVPPGPGGPSVIHSPPPPPPPAVLAKPKLWSLAEIATLSDKVKDGGGGNEGSPCPPCPGPIAGQALGGSRASPAPAPSRSPSAQCPFPGGTVLSRPLYYTAPFYPGYTNYGSFGHLHGHPGPGPGPTTGPGSHFNGLNQTVLNRADALAKDPKMLRSQSQLDLCKDSPYELKKGMSDI

SEQ ID NO: 4187 - DNA, 530 bp, Homo sapiens
  misc_feature (321)..(321): n is a, c, g, or t
  misc_feature (337)..(337): n is a, c, g, or t
  misc_feature (402)..(402): n is a, c, g, or t
  misc_feature (419)..(419): n is a, c, g, or t
  misc_feature (465)..(465): n is a, c, g, or t
  misc_feature (487)..(487): n is a, c, g, or t
tacaggacttgtgattaataaccagctggttgatcagagtgagtcaaaaggccccgtgatacaagaatcagctgaaccaagccagttggaagttccagccacagaagaaataaaagagactgatggaagctctcagatcaagcaagaaccagaccccacgtggtagacctcttccctcctagggtaaatcagcttctgtgtcaggggatgctgtgtggcgtccatctgaaccccctgcatacgcgtagctaatgtgatctccccactttcacataagatggtgggcctgccttcaggggaatgtgggagccaggtgggagnctccccggatatttangctaggaagattctacagggaggattctccttgggatcaatattttgtctctcaaggcaaaaggntgttaaaagcacttttngggctttaaaaaagaatgttcttgtttcttaaataggagtcaacgnttgggcctccctccattggggnatttcaattttgaggtcaagaattcaattaggattgacttttt

SEQ ID NO: 4188 - DNA, 534 bp, Homo sapiens
  misc_feature (399)..(399): n is a, c, g, or t
  misc_feature (439)..(439): n is a, c, g, or t
ggtggaatggggtaagagcaaaccttttctccttttacctaattttgtttcatccataggattttcagtggaaagaagggactgaaagacataagaaattaatttctgcatttccatggacaatctgttgagctcaagccatcttctaaaacatggaaatgtcatctttgtggcatatattaagtggcagtttattttctttccctgccagtatacttcgttgggtcggggagaacaaagaatggttttgaaaccagagctttcagttcccttcatggtttccagaggtgagaagcctctgtgggtagtagatttgggatggaacacacacaacccttctaatgaccctaagttgttaactaactgcctttgaatggttgtcttgaaatacctggtgtntatactgcagaaaaggaatgcagctgttttccacagtgtntgtccccaacttctgtttgtactcagaatcgtcgaacatatgaagattttggtcccataatccttaaactatagcctgaggtgcacctgattaca

SEQ ID NO: 4189 - DNA, 482 bp, Homo sapiens
tttttttttttttcttattacaaaatatcctttattgataaaatagctcaaagtttaaaaaaaaaaaaaaacaccacctgcatgtcgcaataagaggtcacaggcaaaaacactgggggtcccatggggcgcacacaaaaccggccagcaaagggtcacagtcagtccctttcctggcccagctccccaccacatcccagggcgatactctggcctcaacaacccactgaggaccaagctgggaagcctcccacaccccaggaaggactctttttggtcccctccattctctctacacccagaaaactccctcggtgcccttccaaatctagcaggtccatctggcccattcccccgacacctgccaagctaagatgcctactggcccaatgttgaagccaggccctctccaagggaaggccgataaacctcctttccacacttccaactgttctgggtgccaggttttggggtgggactga

SEQ ID NO: 4190 - DNA, 482 bp, Homo sapiens
  misc_feature (416)..(416): n is a, c, g, or t
  misc_feature (465)..(465): n is a, c, g, or t
tgaaatagctgaagttcctttggggtcaggaagagccgacaattgtggggttttggttgcttttgctttgtttttgagtgggaagtgttgctggaatcccctgagaaccgaaagatgccaggggtcagcaaggctatagaaaaggccagtggtaacacctcgttttcatcctaacagaggagtaggtgcgaatggcacagcatggatcgttcctttcttgatcattactcatgcttgccactgtagcaacacaacaaagccatgattgtaattaatactaggctaaatgacctttgatcaaaatcgggagctcatttactgttctatgaggtatgtaagtaacttctcttcacattttccctcagagataaaccacacgtgggtagtcttgtttgcgttagtactaaggtcatgtntgatctgtcccagacgagtcgcatatgtcctgtagctggagtgtttgcncaccataaatggtcatt

SEQ ID NO: 4191 - DNA, 2162 bp, Homo sapiens
gggctgcgctgtccagctgtggctatggccccagccccgagatgaggagggagagaactaggggcccgcaggcctgggaatttccgtcccccaccaagtccggatgctcactccaaagtctcagcaggcccctgagggagggagctgtcagccagggaaaaccgagaacaccatcaccatgacaaccagtcaccagcctcaggacagatacaaagctgtctggcttatcttcttcatgctgggtctgggaacgctgctcccgtggaattttttcatgacggccactcagtatttcacaaaccgcctggacatgtcccagaatgtgtccttggtcactgctgaactgagcaaggacgcccaggcgtcagccgcccctgcagcacccttgcctgagcggaactctctcagtgccatcttcaacaatgtcatgaccctatgtgccatgctgcccctgctgttattcacctacctcaactccttcctgcatcagaggatcccccagtccgtacggatcctgggcagcctggtggccatcctgctggtgtttctgatcactgccatcctggtgaaggtgcagctggatgctctgcccttctttgtcatcaccatgatcaagatcgtgctcattaattcatttggtgccatcctgcagggcagcctgtttggtctggctggccttctgcctgccagctacacggcccccatcatgagtggccagggcctagcaggcttctttgcctccgtggccatgatctgcgctattgccagtggctcggaactatcagaaagtgccttcggctactttatcacagcctgtgctgttatcattttgaccatcatctgttacctgggcctgccccgcctggaattctaccgctactaccagcagctcaagcttgaaggacccggggagcaggagaccaagttggacctcattagcaaaggagaggagccaagagcaggcaaagaggaatctggagtttcagtctccaactctcagcccaccaatgaaagccactctatcaaagccatcctgaaaaatatctcagtcctggctttctctgtctgcttcatcttcactatcaccattgggatgtttccagccgtgactgttgaggtcaagtccagcatcgcaggcagcagcacctgggaacgttacttcattcctgtgtcctgtttcttgactttcaatatctttgactggttgggccggagcctcacagctgtattcatgtggcctgggaaggacagccgctggctgccaagcctggtgctggcccggctggtgtttgtgccactgctgctgctgtgcaacattaagccccgccgctacctgactgtggtcttcgagcacgatgcctggttcatcttcttcatggctgcctttgccttctccaacggctacctcgccagcctctgcatgtgcttcgggcccaagaaagtgaagccagctgaggcagagaccgcaggagccatcatggccttcttcctgtgtctgggtctggcactgggggctgttttctccttcctgttccgggcaattgtgtgacaaaggatggacagaaggactgcctgcctccctccctgtctgcctcctgccccttccttctgccaggggtgatcctgagtggtctggcggttttttcttctaactgacttctgctttccacggcgtgtgctgggcccggatctccaggccctggggagggagcctctggacggacagtggggacattgtgggtttggggctcagagtcgagggacggggtgtagcctcggcatttgcttgagtttctccactcttggctctgactgatccctgcttgtgcaggccagtggaggctcttgggcttggagaacacgtgtgtctctgtgtatgtgtctgtgtgtctgcgtccgtgtctgtcagactgtctgcctgtcctggggtggctaggagctgggtctgaccgttgtatggtttgacctgatatactccattctcccctgcgcctcctcctctgtgttttttccatgtccccctcccaactccccatgcccagtttttacccatcatgcaccctgtacagttgccacgttactgccttttttaaaaatatatttgacagaaaccaggtgccttcagaggctctctgatttaaataaacctttcttgttttttt

SEQ ID NO: 4192 - protein, 456 aa, Homo sapiens [sequence omitted]

SEQ ID NO: 4193 - DNA, 236 bp, Homo sapiens
  misc_feature (67)..(67): n is a, c, g, or t
gcacgaggtgctgctccttcgaatgccagcctgcaagaggacctccggggctccgggcgaccccggntttgagggagaacgaggcaagccggggctcccaggagagaagggagaagccggagatcctggaagacccggggacctcggacctgttgggtaccagggaatgaagggagaaaaagggagccgtggggagaagggctccaggggacccaagggctacaagggagagaagg

SEQ ID NO: 4194 - DNA, 1258 bp, Homo sapiens
ggctctggactggggacacagggatagctgagccccagctgggggtggaagctgagccagggacagtcacggaggaacaagatcaagatgcgctgtaactgagaagcccccaaggcggaggctgagaatcagagacatttcagcagacatctacaaatctgaaagacaaaacatggttcaagcatccgggcacaggcggtccacccgtggctccaaaatggtctcctggtccgtgatagcaaagatccaggaaatactgcagaggaagatggtgcgagagttcctggccgagttcatgagcacatatgtcatgatggtattcggccttggttccgtggcccatatggttctaaataaaaaatatgggagctaccttggtgtcaacttgggttttggcttcggagtcaccatgggagtgcacgtggcaggccgcatctctggagcccacatgaacgcagctgtgacctttgctaactgtgcgctgggccgcgtgccctggaggaagtttccggtctatgtgctggggcagttcctgggctccttcctggcggctgccaccatctacagtctcttctacacggccattctccacttttcgggtggacagctgatggtgaccggtcccgtcgctacagctggcatttttgccacctaccttcctgatcacatgacattgtggcggggcttcctgaatgaggcgtggctgaccgggatgctccagctgtgtctcttcgccatcacggaccaggagaacaacccagcactgccaggaacagaggcgctggtgataggcatcctcgtggtcatcatcggggtgtcccttggcatgaacacaggatatgccatcaacccgtcccgggacctgcccccccgcatcttcaccttcattgctggttggggcaaacaggtcttcagcaatggggagaactggtggtgggtgccagtggtggcaccacttctgggtgcctatctaggtggcatcatctacctggtcttcattggctccaccatcccacgggagcccctgaaattggaggattctgtggcgtatgaagaccacgggataaccgtattgcccaagatgggatctcatgaacccacgatctctcccctcacccccgtctctgtgagccctgccaacagatcttcagtccaccctgccccacccttacatgaatccatggccctagagcacttctaagcagagattatttgtgatcccatccattccccaataaagcaaggcttgtccgacaaa

SEQ ID NO: 4195 - protein, 342 aa, Homo sapiens
MVQASGHRRSTRGSKMVSWSVIAKIQEILQRKMVREFLAEFMSTYVMMVFGLGSVAHMVLNKKYGSYLGVNLGFGFGVTMGVHVAGRISGAHMNAAVTFANCALGRVPWRKFPVYVLGQFLGSFLAAATIYSLFYTAILHFSGGQLMVTGPVATAGIFATYLPDHMTLWRGFLNEAWLTGMLQLCLFAITDQENNPALPGTEALVIGILVVIIGVSLGMNTGYAINPSRDLPPRIFTFIAGWGKQVFSNGENWWWVPVVAPLLGAYLGGIIYLVFIGSTIPREPLKLEDSVAYEDHGITVLPKMGSHEPTISPLTPVSVSPANRSSVHPAPPLHESMALEHF

SEQ ID NO: 4196 - DNA, 5391 bp, Homo sapiens
cgcttccctcactgggtcctgcgtccttgggcaggcgatgcccctgcggggaggggctggtccatccccggccagccacggacccacgcatggacccagcgacccacggacctgcttacctgggcgcggcgcgggtggcatgcggccacacggaaggggcgcgctgggctgctgcggcctctgcagcttctacacctgccacggggcggccggagatgaaatcatgcaccaggacatcgtcccgctctgtgctgccgacatccaggaccagctaaagaagcgctttgcttacctgtccggtgggcgggggcaggacggaagcccggttatcaccttccctgactacccggccttcagcgagattccggacaaggagttccagaatgtcatgacctacctcaccagcatccccagcctgcaggacgctggcatcggattcatcctggtgatagaccggcgacgggacaaatggacctccgtgaaggcgtccgtcctgcgcatcgcagcatctttcccggcaaacctgcagctcgtcctcgtgcttcgcccgacgggttttttccaaaggactctctccgacatcgctttcaaattcaatagagatgactttaagatgaaggtgccggtcataatgctgagctccgtaccagacttacacggttacatcgataagtcgcagctgaccgaggacctgggtgggaccctggactactgccactcccggtggctgtgccagcgcacggccatcgaaagtttcgccctcatggtgaagcagacggctcagatgctgcagtccttcgggaccgagctggctgaaacagagctgcccaatgacgtccagtcgacaagctcagtgctgtgtgcgcacacagagaagaaggacaaggcgaaggaggatttgaggctggcactgaaagaggggcacagtgtcctggagagcctcagggagctgcaggctgagggctcagagcccagtgtgaaccaggaccagcttgacaaccaggccaccgtgcagaggctcctggcccagctgaacgaaaccgaggctgccttcgatgagttctgggcaaagcatcagcagaaactggagcagtgtctgcagctccggcactttgagcagggcttccgggaggtcaaagccatcttggacgcagcgtcccagaagatagcaaccttcacagacatcggcaacagcctggcgcatgtggagcacctgctgagggacctggccagcttcgaggagaaatcaggcgtggccgtggagagggcccgggccctgtctctggacggcgagcagctcattgggaacaagcactacgcggtagactccatccgcccaaagtgccaggagctccggcacctctgtgaccagttctctgcggagatcgcaaggaggagggggctgctcagcaagtccctggagctgcaccgccgcctggagacgtccatgaagtggtgtgatgaagggatttacctgctggcctcacaacctgtggacaagtgccagtcccaggacggcgcggaggctgccctccaggaaatcgagaagtttttggagaccggtgcggaaaataagatccaggagctcaacgcgatttacaaggaatacgaatccatcctcaaccaagatctcatggagcacgtgcgaaaggtcttccagaagcaggcaagcatggaggaggtgttccaccgcaggcaggccagcctgaagaagctggcggccaggcagacgcggcccgtgcagccggtggcccccagacccgaggcactggcaaagtcgccctgcccctccccaggcattcggcgaggctctgagaactccagctccgagggcggtgcgctccggagagggccctaccggagggccaagagtgagatgagtgagagccggcagggccgcggctcagcgggggaggaggaggaaagcctggccatcctgcgcaggcacgtgatgagcgagctcctggacacagaacgggcctacgtggaggagctgctgtgcgtcctggagggctacgccgcggagatggataacccactgatggctcacctcctgtcaacaggccttcacaacaagaaggatgttttgtttggaaacatggaggaaatctatcacttccacaacaggatattcctcagggagctggaaaactacactgactgcccagaactggttggaagatgctttctggagaggatggaagatttccagatctatgagaagtactgtcagaacaagccccgctctgagagcctgtggagacagtgctccgactgcccgtttttccaggaatgccagagaaagctggaccacaagctgagcctggactcctacctgctgaagccagtgcagaggatcaccaagtaccagctgctgctcaaggaaatgctgaaatacagcaggaactgcgagggggctgaggacctgcaggaggcgctgagctccatcctgggcatcctgaaggccgtgaacgactccatgcacctcatcgctatcaccggctatgacgggaatctcggcgacctgggcaagctgctgatgcagggctcattcagcgtctggaccgaccacaagaggggccacaccaaggtgaaggagctggccaggttcaagcccatgcagcggcacctgttcctgcacgagaaggcagtgctcttctgcaagaagagggaggagaatggggaggggtatgagaaagctccctcctacagctacaagcagtccttaaacatggctgccgttggcattacggagaacgtgaagggagatgctaagaagttcgagatctggtacaacgcgcgcgaggaggtctacatcgtccaggcgccaactcctgagattaaagccgcgtgggtgaatgaaattcggaaagtgctgaccagccagctgcaggcttgtagagaagccagccagcaccgggcgctggagcagtcacagagcctgcccctgccggccccgaccagcaccagtccctcaagaggaaactcaaggaacatcaagaagctggaagaaaggaaaacagaccccctaagcctggagggatacgtcagctcagcgccactgacaaagccccccgaaaagggcaaaggttggagcaaaacgtcccactcactggaggcacctgaggacgacgggggctggtcaagtgcagaggagcagattaactcgtccgacgcagaggaggacggcgggttgggccccaagaagctggttccaggtaaatacacggtcgtggcggaccacgagaagggaggccccgatgcgctgcgcgtgaggagcggggacgtggtggagctggtgcaggagggcgacgagggcctctggtaagaccccgcgctcagccccggactgccccgcacgtggctgccgctgaccctcgccccttgcaggtacgtcagggacccgaccactggcaaggagggctgggtgccggccagcagcctgtccgtccggctcggcccgtccggctcggcccagtgcctgagcagctcaggtaaggcccacgtgccccgagcccacccgtgacgctgccaagggcccgggcgaggaagctgccccgtgtgtgcccggcagagccgacgccgaagcccgtccccgcctgatctccccgcagagtcgagcccggggtcggccgtgctgagcaactcgtccagctgcagcgagggcggccaggcccccttctccgacctgcaggggtagcgcggcctcggcgccggagacccgcgcgctgtctggggctgcggtggcgtggggagggcgcggcccccggacgccccgaggaaggggcacctcaccgccccgacccagagcgcctggccgtgcgggctgcagaggacccctccggggcagaggcaggttccacggaagaccccggcccgctggggcttccccggagactccagagcccacagaggaggggccgcagggaacagccccgggcggcaggcgccgggcagcggcatctcgtcctggctccaccgtgctgcttctgcctccggacggtgctttcaggggacgcgcggaccgtggtggagctgcttccggagaagtggaggatcctctggccaacggcctgaggagagcggggcacggggtctctttagcttttacaagttttaggattttttcaagcagggatcaatcccgtggccattttttgtggtactttggcctcaattcttcaccaggaatcactgtgtttacatgaaatgacaatttgatactgtatttgatagaaaactatttttttgttaccggggtttacatagaagcacgttgtttataccactaagtgactttggcggggctctcccatggaaacggatggcactccctgaagctccctggtcacaggtggatgaaaacgtgtccgtgggtgacatcaggtggtgtctccaccaccaaaagcagttagaagccaaggagattcctttatctacctagggttcattttcaaaagaaaatttaaactataatttaaacaattaacgttcttttctacaaaaaaaaatgcagggacttgatttttttaaagagcttcactgaattaggatatttttattgcttttaaagaaaatacaaagttgcagtttctgcagggtgtggcgtggaccagtgctgccgaccatagctcagagagccctgcccctgcctcactgcactgcagcctcctcggaggccgcacctccactccactccccacgcgccccctgcctcccacccaggtccacctgccacctggtgaccaccttgagtacagaagtgaaagtggggagagtattttattcaagtcacagcagaactggaaaaaaactcttctgttttaccaacttcttgtgtttcagaaacatattctgttcaaaacttttgaagccctttcggtgtctagtctgcagatgtttttgtatgtgtgcacctctgaccatgtgtgtacatatgtgtcttgctggaaaggacatattcgctgtccccgtgctgctgggagggccgcctcacagcctcacggttcccagccccagcacagtggaggcaggcgtggctgcattcccctcacgctaccctcccagcggcttgtagccgtcactggccagacctccagggtgcggaatcaaataggaagcatgcagagactcggcagcttttcctctgatgtgtaagttatttggaacgcgtgctgtgtcccgcgatgtccctgatgtactgtgcaggcgcggtgcctccgtctcgtcgcacagctgcgcgcccttgtgtgaccctccccataaaggcactttacagcttcatgtttcatccactgtcacttttttttaactgctgatgtaaatggaattttaaaagcagagttctttattgtatggatgacgtttgaataaatatcagcaactcctgcc

SEQ ID NO: 4197 - protein, 1108 aa, Homo sapiens
ASLTGSCVLGQAMPLRGGAGPSPASHGPTHGPSDPRTCLPGRGAGGMRPHGRGALGCCGLCSFYTCHGAAGDEIMHQDIVPLCAADIQDQLKKRFAYLSGGRGQDGSPVITFPDYPAFSEIPDKEFQNVMTYLTSIPSLQDAGIGFILVIDRRRDKWTSVKASVLRIAASFPANLQLVLVLRPTGFFQRTLSDIAFKFNRDDFKMKVPVIMLSSVPDLHGYIDKSQLTEDLGGTLDYCHSRWLCQRTAIESFALMVKQTAQMLQSFGTELAETELPNDVQSTSSVLCAHTEKKDKAKEDLRLALKEGHSVLESLRELQAEGSEPSVNQDQLDNQATVQRLLAQLNETEAAFDEFWAKHQQKLEQCLQLRHFEQGFREVKAILDAASQKIATFTDIGNSLAHVEHLLRDLASFEEKSGVAVERARALSLDGEQLIGNKHYAVDSIRPKCQELRHLCDQFSAEIARRRGLLSKSLELHRRLETSMKWCDEGIYLLASQPVDKCQSQDGAEAALQEIEKFLETGAENKIQELNAIYKEYESILNQDLMEHVRKVFQKQASMEEVFHRRQASLKKLAARQTRPVQPVAPRPEALAKSPCPSPGIRRGSENSSSEGGALRRGPYRRAKSEMSESRQGRGSAGEEEESLAILRRHVMSELLDTERAYVEELLCVLEGYAAEMDNPLMAHLLSTGLHNKKDVLFGNMEEIYHFHNRIFLRELENYTDCPELVGRCFLERMEDFQIYEKYCQNKPRSESLWRQCSDCPFFQECQRKLDHKLSLDSYLLKPVQRITKYQLLLKEMLKYSRNCEGAEDLQEALSSILGILKAVNDSMHLIAITGYDGNLGDLGKLLMQGSFSVWTDHKRGHTKVKELARFKPMQRHLFLHEKAVLFCKKREENGEGYEKAPSYSYKQSLNMAAVGITENVKGDAKKFEIWYNAREEVYIVQAPTPEIKAAWVNEIRKVLTSQLQACREASQHRALEQSQSLPLPAPTSTSPSRGNSRNIKKLEERKTDPLSLEGYVSSAPLTKPPEKGKGWSKTSHSLEAPEDDGGWSSAEEQINSSDAEEDGGLGPKKLVPGKYTVVADHEKGGPDALRVRSGDVVELVQEGDEGLW

SEQ ID NO: 4198 - DNA, 240 bp, Homo sapiens
  misc_feature (7)..(7): n is a, c, g, or t
  misc_feature (23)..(23): n is a, c, g, or t
  misc_feature (36)..(36): n is a, c, g, or t
  misc_feature (53)..(53): n is a, c, g, or t
  misc_feature (55)..(55): n is a, c, g, or t
  misc_feature (62)..(62): n is a, c, g, or t
  misc_feature (65)..(65): n is a, c, g, or t
  misc_feature (97)..(97): n is a, c, g, or t
  misc_feature (107)..(107): n is a, c, g, or t
  misc_feature (133)..(133): n is a, c, g, or t
  misc_feature (146)..(146): n is a, c, g, or t
  misc_feature (162)..(162): n is a, c, g, or t
  misc_feature (168)..(168): n is a, c, g, or t
  misc_feature (181)..(181): n is a, c, g, or t
  misc_feature (203)..(203): n is a, c, g, or t
  misc_feature (230)..(230): n is a, c, g, or t
  misc_feature (235)..(235): n is a, c, g, or t
gcgagangacctgccctcctcantgggttccccttnctgcctcctcccagggntntgcaggngcnttgttcagtcccttccaccaaagtcatctgancttccgtttncccagggcctccagctgccctcaganactgatgtctgtncccagggtgctctctncccctnatgcccctttcancggcccagtgtcccgatttttncagggctttatcaaggtggctaagggnccggnttgga

SEQ ID NO: 4199 - DNA, 858 bp, Homo sapiens
tacgttagtaagccggtggttgatggacgaggggcgacgggcgcatcctccattgcagtgcggcggcctacctcggcctggcctgaccccggcggcctgcccgcccctccctccagcatcatggccagcccaagaaccaggaaggttcttaaagaagtcaggctgcaggatgagaacaacgttgttttgagtgtggcgcgttcaatcctcagtgggtcagtgtgacctacggcatctggatctgcctggagtgctcggggagacaccgcgggcttggggttcacctcagctttgtgcgctctgttactatggacaagtggaaggacattgagcttgagaagatgaaagctggtgggaatgctaagttccgagagttcctggagtctcaggaggattacgatccttgctggtccttgcaggagaagtacaacagcagagccgcggccctctttagggataaggttggtcgctctggcctgacggcagagagtggtctctggagtcatcacctgcccagaacttggaccccacctcagcccaggacgctgccgtccatggtgcaccgagtctctggccagccgcagagtgtgacctgcctcctcggacaaggcttttgaagactgtctgaaatgatgacctcggctcctatcaaggggcccaggggaatcgctacgtggggtttgggaacacgccaccgctctagaagacagaagatgacttcctcaaaatgccatgtcctcctgtactcggggctggagcagcttcaaccactggagccagcggtttgctcggcagcaatgaagggcgcaacaaagtttggatccaagcgaatccagaagcgtccgactgggcaaagca

SEQ ID NO: 4200 - DNA, 318 bp, Homo sapiens
  misc_feature (209)..(209): n is a, c, g, or t
  misc_feature (215)..(215): n is a, c, g, or t
  misc_feature (273)..(273): n is a, c, g, or t
  misc_feature (285)..(285): n is a, c, g, or t
  misc_feature (299)..(299): n is a, c, g, or t
  misc_feature (309)..(309): n is a, c, g, or t
ggcacgagaaaatttatttggcaggcagtgtggaggacagattaggagcatataaacccagaggtgtgccccaggagggcttttgcaaaggtcaaaatgagatagaatgagggcctgaaataattcagtaatttggagatggagaagaggaaagacttctcgtgctcttgcactgccatcagcctggtctcgggccatggtcatctctngacccnggaagactgaccccacctcttggctcaccctctgcctcccaacctcctcttcacaaangaacgccagagngagtacttttaacncacaacccangagtcacat

SEQ ID NO: 4201 - DNA, 3901 bp, Homo sapiens
cagtttgcaaaagccagaggtgcaagaagcagcgactgcagcagcagcagcagcagcggcggtggcagcagcagcagcagcggcggcagcagcagcagcagcggaggcaccggtggcagcagcagcatcaccagcaacaacaacaaaaaaaaatcctcatcaaatcctcacctaagctttcagtgtatccagatccacatcttcactcaagccaggagagggaaagaggaaaggggggcaggaaaaaaaaaaaacccaacaacttagcggaaacttctcagagaatgctccaaaactcagcagtgcttctggtgctggtgatcagtgcttctgcaacccatgaggcggagcagaatgactctgtgagccccaggaaatcccgagtggcggctcaaaactcagctgaagtggttcgttgcctcaacagtgctctacaggtcggctgcggggcttttgcatgcctggaaaactccacctgtgacacagatgggatgtatgacatctgtaaatccttcttgtacagcgctgctaaatttgacactcagggaaaagcattcgtcaaagagagcttaaaatgcatcgccaacggggtcacctccaaggtcttcctcgccattcggaggtgctccactttccaaaggatgattgctgaggtgcaggaagagtgctacagcaagctgaatgtgtgcagcatcgccaagcggaaccctgaagccatcactgaggtcgtccagctgcccaatcacttctccaacagatactataacagacttgtccgaagcctgctggaatgtgatgaagacacagtcagcacaatcagagacagcctgatggagaaaattgggcctaacatggccagcctcttccacatcctgcagacagaccactgtgcccaaacacacccacgagctgacttcaacaggagacgcaccaatgagccgcagaagctgaaagtcctcctcaggaacctccgaggtgaggaggactctccctcccacatcaaacgcacatcccatgagagtgcataaccagggagaggttattcacaacctcaccaaactagtatcattttaggggtgttgacacaccaattttgagtgtactgtgcctggtttgatttttttaaagtagttcctattttctatcccccttaaagaaaattgcatgaaactaggcttctgtaatcaatatcccaacattctgcaatggcagcattcccaccaacaaaatccatgtgatcattctgcctctcctcaggagaaagtaccctcttttaccaacttcctctgccatgtcttttcccctgctcccctgagaccacccccaaacacaaaacattcatgtaactctccagccattgtaatttgaagatgtggatccctttagaacggttgccccagtagagttagctgataaggaaactttatttaaatgcatgtcttaaatgctcataaagatgttaaatggaattcgtgttatgaatctgtgctggccatggacgaatatgaatgtcacatttgaattcttgatctctaatgagctagtgtcttatggtcttgatcctccaatgtctaattttctttccgacacatttaccaaattgcttgagcctggctgtccaaccagactttgagcctgcatcttcttgcatctaatgaaaaacaaaaagctaacatctttacgtactgtaactgctcagagctttaaaagtatctttaacaattgtcttaaaaccagagaatcttaaggtctaactgtggaatataaatagctgaaaactaatgtactgtacataaattccagaggactctgcttaaacaaagcagtatataataactttattgcatatagatttagttttgtaacttagctttatttttcttttcctgggaatggaataactatctcacttccagatatccacataaatgctccttgtggccttttttataactaagggggtagaagtagttttaattcaacatcaaaacttaagatgggcctgtatgagacaggaaaaaccaacaggtttatctgaaggaccccaggtaagatgttaatctcccagcccacctcaacccagaggctactcttgacttagacctatactgaaagatctctgtcacatccaactggaaattccaggaaccaaaaagagcatccctatgggcttggaccacttacagtgtgataaggcctactatacattaggaagtggtagttctttactcgtcccctttcatcggtgcctggtactctggcaaatgatgatggggtgggagactttccattaaatcaatcaggaatgagtcaatcagcctttaggtctttagtccgggggacttggggctgagagagtataaataaccctgggctgtccagccttaatagacttctcttacattttcgtcctgtagcacgctgcctgccaaagtagtcctggcagctggaccatctctgtaggatcgtaaaaaaatagaaaaaaagaaaaaaaaaagaaagaaagagggaaaaagagctggtggtttgatcatttctgccatgatgtttacaagatggcgaccaccaaagtcaaacgactaacctatctatgaacaacagtagtttctcagggtcactgtccttgaacccaacagtcccttatgagcgtcactgcccaccaaaggtcaatgtcaagagaggaagagagggaggaggggtaggactgcaggggccactccaaactcgcttaggtagaaactattggtgctcgactctcactaggctaaactcaagatttgaccaaatcgagtgatagggatcctggtgggaggagagagggcacatctccagaaaaatgaaaagcaatacaactttaccataaagcctttaaaaccagtaacgtgctgctcaaggaccaagagcaattgcagcagacccagcagcagcagcagcagcacaaacattgctgcctttgtccccacacagcctctaagcgtgctgacatcagattgttaagggcatttttatactcagaactgtcccatccccaggtccccaaacttatggacactgccttagcctcttggaaatcaggtagaccatattctaagttagactcttcccctccctcccacacttcccacccccaggcaaggctgacttctctgaatcagaaaagctattaaagtttgtgtgttgtgtccattttgcaaacccaactaagccaggaccccaatgcgacaagtagttcatgagtattcctagcaaatttctctctttcttcagttcagtagatttccttttttcttttcttttttttttttttttttttttggctgtgacctcttcaaaccgtggtacccccccttttctccccacgatgatatctatatatgtatctacaatacatatatctacacatacagaaagaagcagttctcacatgttgctagttttttgcttctctttcccccaccctactccctccaattccccccttaaacttccaaagcttcgtcttgtgtttgctgcagagtgattcgggggctgacctagaccagtttgcatgattcttctcttgtgatttggttgcactttagacatttttgtgccattatatttgcattatgtatttataatttaaatgatatttaggtttttggctgagtactggaataaacagtgagcatatctggtatatgtcattatttattgttaaattacattttttaagctccatgtgcatataaaggttatgaaacatatcatggtaatgacagatgcaagttattttatttgcttattttttataattaaagatgccatagcataatatgaagcctttggtgaattccttctaagataaaaataataataaagtgttacgttttattggtttcaaaaaaaaaaaaaaaaaaaa

SEQ ID NO: 4202 - protein, 247 aa, Homo sapiens
MLQNSAVLLVLVISASATHEAEQNDSVSPRKSRVAAQNSAEVVRCLNSALQVGCGAFACLENSTCDTDGMYDICKSFLYSAAKFDTQGKAFVKESLKCIANGVTSKVFLAIRRCSTFQRMIAEVQEECYSKLNVCSIAKRNPEAITEVVQLPNHFSNRYYNRLVRSLLECDEDTVSTIRDSLMEKIGPNMASLFHILQTDHCAQTHPRADFNRRRTNEPQKLKVLLRNLRGEEDSPSHIKRTSHESA

SEQ ID NO: 4203 - DNA, 485 bp, Homo sapiens
tttttaaataaagtgtattgtgtatattaagggacacaatatgacgttatgggatacatatagatagtaaaatagttactatgaaaaagcaaattaacatatccattatctcacataattacccattttgctgtttttgggacaagagcggctaaaatttactcattgagcaggaatcccaacatggtgcaattttattacctctagtcctcattttgtataagcctacatgtgcaggtgaagagagacagggatacagagcatccacagggctcactctgtgccaggcccatatcaacccttcaacaggctgaggatctacagcacctcacggggtaggcgtaagcagtgctattttgcagttgagaaagccacctttagagaaatgaagtaacctccaaaggatgctcggctaagaagtgaggagccaggagagtctaatgccaaggattgtcttcctcctacttcaccaccctgccctattc

SEQ ID NO: 4204 - DNA, 302 bp, Homo sapiens
  misc_feature (139)..(140): n is a, c, g, or t
gtcagcctcacgcggcgggaaggaaccggtccgaggccccgggctgccggcgcgggcgcccggcacgtccacaggctgggtcgcgaggtggcgatcgctgagaggcaggagggccgaggcgggcctgggaggcggcccnnggtggggcgccgctggggccggcccgcacggcttcatctgagggcgcacggcccgcgaccgagcgtgcggactggcctcccaagcgtggggcgacaagctgccggagctgcaatgggccgcggctggggattcttgtttggctcctgggcgccgtgtggctg

SEQ ID NO: 4205 - DNA, 743 bp, Homo sapiens
agaactatttacggaggcgatcaccggtttgtaatttcagtcacgagggacttgcgctattggttgtaccgttacctggtctctgggcgtacatcttgaatgccactgtgtacgtggggggcctggatgagaaggttagtgaaccgctgctgtgggaactgtttctccaggctggaccagtagtcaacacccacatgccaaaggatagagtcactggccagcaccaaggctatggctttgtggaattcttgagtgaggaagatgctgactatgccattaagatcatgaacatgatcaaactctatgggaagccaatacgggtgaacaaagcatcagctcacaacaaaaacctggatgtaggggccaacattttcattgggaacctggaccctgagattgatgagaagttgctttatgatactttcagcgcctttggggtcatcttacaaacccccaaaattatgcgggaccctgacacaggcaactccaaaggttatgcctttattaattttgcttcatttgatgcttcggatgcagcaattgaagccatgaatgggcagtacctctgtaaccgtcctatcaccgtatcttatgccttcaagaaggactccaagggtgagcgccatggctcagcagccgaacgacttctggcagctcagaacccgctctcccaggctgatcgccctcatcagctgtttgcagatgcacctcctcaacctctgttccaatctgtggtatcatct

SEQ ID NO: 4206 - DNA, 478 bp, Homo sapiens
  misc_feature (13)..(13): n is a, c, g, or t
  misc_feature (254)..(254): n is a, c, g, or t
  misc_feature (267)..(267): n is a, c, g, or t
  misc_feature (272)..(272): n is a, c, g, or t
  misc_feature (312)..(312): n is a, c, g, or t
  misc_feature (427)..(427): n is a, c, g, or t
  misc_feature (437)..(437): n is a, c, g, or t
  misc_feature (477)..(477): n is a, c, g, or t
gcacatttttgtnaaaactcaatctacagtatcagtctcgtcagatatattaattttacacttcagttttgattggtgagaaagtacccattctcttcaaataatcaaagataattattattttgttttgtttttggaatcaacagggaggcgcaaagtataaagttgctgctaacatatatacatatatatccatattttataagggtgtctatgtatatatagacagtgtgtccacacaaaaaatagatacncgttaacaagtcnagtcnaggtcctcccatgattaggttttttaaaacggtagaaaangctattgtaaacatctctttccatttattcttaattttttgacatattgggtatttccttaaagggaaatgaggaatgcacatcagtggattggattgtccaacctcaacccccnggatttcccnacccaaatctaccccccacctaacccaatccaatcacatnc

SEQ ID NO: 4207 - DNA, 522 bp, Homo sapiens
taccctatattagcaaatcatcagtgttctaactcggagacatgggcagctgtccaaaggaagaattaaacaaatcattccagtcgcaggaaaaattcaatttactgcatgcagactgtttcttgactgaaaagttaattcctttcattcagaatcagtatgcatattcactggctatatttcatctcacatctgcaaacttaatttttcctttcttggtcatcagaagattaggaaataaattttagtccaggcaatagatcctacttggcaagctcaaaataactcaattattaaaaagcagcacacaaagaccagtagtgacttccaaaggattgttaacaatacttaaaaaaaaaaaaaaaaaaaagaaaaaaaagggtccacctgtctaaaagaagactaaagatccttgaataagaaaatacaatgtttggcaattctgtccaaaatagtattgctgcatattaacccatcctttaagtttcagcaataatttcgaaaaaatagttcccaacaata

SEQ ID NO: 4208 - DNA, 468 bp, Homo sapiens
cccagacatcaaacttaccagacaaagactttgaaacaactctcttcattatactcaaatgtcaaaaggaaaacataaacaaagaaataaaggaatcagaaaaaatattaaaaagtaggaatatcagcaaagagataacaaattctggagtggaaaactacaatgataaaaatttaaaaatcaccagagggatttaagagtatatttgcacacacagaggaagccatgaacttgaagagaagaaaatggaaaatactgtctctgagaaacagaaagaataaaaaataaacaatgagcagagactaatgaatttgtgggacatcatcaaatagaccaacattcatattctagaaggataaattatgttgttaaaaagtttaccattctttcttttcacctttcttccttcttccttccccctcctcctttttacttttcttcctcttcctttctcttcttctttctcgc

SEQ ID NO: 4209 - DNA, 616 bp, Homo sapiens
gggctcagccgcggagtgagcgagggagacgggaggagccgaacccggcgccatccgccgccatcctcccccgccccaccgccatcccgtcacggggagcccctaggcccgggtcccggatccccgcgcacccggccaggctctggcacgttttgggggaggtgcctgcaggacccaacatactcaatgagcttccagcgcaatgtccgatcgctcggggccgactgccaagggaaaggatggaaagaagtattcctcgctcaacctgtttgatacgtataagggcaagtccttagagatccagaaacccgctgttgcccctcgccatggcctgcagagtctcgggaaagttgccattgcccggcgtatgccacctccagccaaccttccaagtctgaaagccgagaacaaaggcaatgaccccaatgtctcactagtgccaaaagacggaacaggatgggcaagcaaacaggagcagtccgaccccaagagttccgatgcctcaaccgctcagccgccggaatcgcagccactgccggcttcacagacgcctgccttcaatcagccgaaactacccgcagcgagcccccgagacactcctttggttccaagcggg

SEQ ID NO: 4210 - DNA, 2633 bp, Homo sapiens
cacgccccgcgctccacggcgccctcgccccgcgcgcctctcgtgcccgcctcctgccagtctccgggccgcggccgtctgcagagcgagcgctcagacggagcccccgggcaacttgagtggcgccgatcggcggcggagcctctggcagagccccccgacccggcagcgcggaggggactcgcgtccgtccgcgtcgcgtcaccccaaaccctaagcagcgccgccccatcggcgcggagctccggctggaggcaagagccgcgcgccgggagacacgcaccgtgagcggcagcgccgccggcctccctcctcgccgccccggaggcgaagccgcggctccccagccctttgctgcgccgcgacagcgccggaacacgccccgcctcgctgccgccttcgctgtgccgccggcggagggggccgcgagccccgcgccccggccggaggatgtgcgcccccgcgggccgcccagcctgagccatgcgccccaacggcggcggcgcgccggccggcatggagccccgcgcggccgcgctctgactcgctgtgcgccccgcggccggcgggcggcgggaggcggcggaccgagagccggagaccggcgccgcgggacggaagcgagcgggcgcgggcgccgcgcagatggcctgggcgagccaggtctgaggccccgctccccgaaacgtgaccatgtggattcaacagcttttaggactcagctccatgtccatccgctggccgggccgccccctcggaagccatgcctggatactgatagccatgtttcagctcgccgtggacctgcccgcctgtgaggccctgggcccggggccggagttctggctcctgccgcggtcgccgccccggccgccccggctgtggagttttaggagtggacagccagcgcgggtcccggccccggtgtggagcccccggccgccccgagtggagcggatccacgggcagatgcagatgcctcgagccagacgggcccacaggccccgggaccaggcggccgccctcgtgcccaaggcaggactggccaagcccccagctgctgccaaatccagcccttccctcgcctcttcgtcctcgtcctcgtcctccgcggtggccggtggggccccggagcagcaggccctcctgaggaggggcaagaggcacctgcagggggacggtctcagcagcttcgactccagaggcagccggcccaccacagagactgagttcatcgcctgggggcccacgggggacgaggaggccctggagtccaacacatttccgggcgtttacggccccaccacggtctccatcctacaaacacggaagacaactgtggccgccaccaccaccaccaccaccacggccacccccatgacgctgcagactaaggggttcaccgagtccttggatccccggagaaggatcccaggtggggttagcacaacggagccttccaccagtcccagcaacaacggggaagtcacccagcccccaaggattctgggggaggcctcaggtctggctgtccatcagatcatcaccatcaccgtctccctcatcatggtcatagctgctctcatcacaactcttgtcttaaaaaattgctgtgcccaaagcgggaacactcgtcggaacagccaccagcggaagaccaaccagcaggaggagagctgccagaacctcacggacttcccctcggcccgggtgcccagcagcctggacatattcacggcctataacgagaccctgcagtgttctcacgagtgcgtcagggcatctgtgcccgtgtacaccgatgagacgctgcactcgacgacgggggagtacaaatccacatttaatggaaaccgaccctcctcttctgatcggcatcttattcctgtggccttcgtgtctgagaaatggtttgaaatctcctgctgactggccgaagtcttttttacctcctgggggcagggcagacgccgtgtgtctgtttcacggattccgttggtgaacctgtaaaaacaaaacaaacaaaacaaaacaaaaaagacaaaacctaaaactgagctatctaagggggagggtccccgcacctaccacttctgtttgccggtgggaaactcacagagcaggacgctctaggccaaatctatttttgtaaaaatgctcatgcctatgggtgactgccttctcccagagttttctttggagaacagaaagaagaaaggaaagaaaggaaccagaggcagagagacgaggatacccagcgaaagggacgggaggaagcatccgaaacctaggattcgtcctacgattctgaacctgtgccaataataccattatgtgccatgtactgacccgaaaggctcggccgcagagccggggcccagcgaatcacgcagagaaatcttacagaaaacaggggtgggaatctcttccgatagagtcgctatttctggttaatatacatatataaatatataaatacaaacacacacacacactttttttgtactgtagcaatttttgaagatcttaaatgttcctttttaaaaaaaagaattgtgttataggttacaaaatctgatttatttaacatgcttagtatgagcagaataaaccagtgttttctactttggcaa

SEQ ID NO: 4211 - protein, 411 aa, Homo sapiens
MWIQQLLGLSSMSIRWPGRPLGSHAWILIAMFQLAVDLPACEALGPGPEFWLLPRSPPRPPRLWSFRSGQPARVPAPVWSPRPPRVERIHGQMQMPRARRAHRPRDQAAALVPKAGLAKPPAAAKSSPSLASSSSSSSSAVAGGAPEQQALLRRGKRHLQGDGLSSFDSRGSRPTTETEFIAWGPTGDEEALESNTFPGVYGPTTVSILQTRKTTVAATTTTTTTATPMTLQTKGFTESLDPRRRIPGGVSTTEPSTSPSNNGEVTQPPRILGEASGLAVHQIITITVSLIMVIAALITTLVLKNCCAQSGNTRRNSHQRKTNQQEESCQNLTDFPSARVPSSLDIFTAYNETLQCSHECVRASVPVYTDETLHSTTGEYKSTFNGNRPSSSDRHLIPVAFVSEKWFEISC

SEQ ID NO: 4212 - DNA, 473 bp, Homo sapiens
  misc_feature (21)..(21): n is a, c, g, or t
  misc_feature (422)..(422): n is a, c, g, or t
gtaagaacactctcgtgagtnctaacggtcttccggatgaaggctatttgaagtcgccataacctggtcagaagtgtgcctgtcggcggggagagaggcaatatcaaggttttaaatctcggagaaatggctttcgtttgcttggctatcggatgcttatatacctttctgataagcacaacatttggctgtacttcatcttcagacaccgagataaaagttaaccctcctcaggattttgagatagtggatcccggatacttaggttatctctatttgcaatggcaacccccactgtctctggatcattttaaggaatgcacagtggaatatgaactaaaataccgaaacattggtagtgaaacatgggaaggaccatcattactaagaatctacatttacaaaggatggggtttggatcnttaacaaggggcattgaaggcgaaggttacacacggtttttaccctggggc

SEQ ID NO: 4213 - DNA, 293 bp, Homo sapiens
tttttttttttttttttttttttaaaccgagacaacctttaatcaggaaacctcaaagagacgcatgacacctggcggtacagtcccagtgagtggaatcccagccggacgcaacttttcctccaggagaacttggcagtcccaacccttctcaaaagatgagccagccacgcggtccagggaggatgctgacaggggaaacgattcctccatttttacgcacattccaaacactttttgggaacaaggttacatccagccttgggggtcttccatcctcaccagggcccctg

SEQ ID NO: 4214 - DNA, 669 bp, Homo sapiens
atttttttttttttggcttttcaaacgtttattctcatttaactatactaatgggtctaaatactggttttacatcctacgtgatataagtatatatacaaagaaaaaaacaacattggaatattacacagcttgaaggtttgcaaaggttatttgtgtcttagttatttctgcacttaatgacacatcagacgcattgagtatatttcataagttgttgactagcaaagatacaatcattagtaacccaagtcttcaaaattcacaccaaactttatgaagtcattcagaaagagaaagtcaatcctaaaattaaaattggcaactatgataaataccttcaaaaggatgtagatataatggagatgtttaaaagtttagtttcattaattgtaaaattagcatgttatatttactcaatatagtgaagactaggtgattcttacatgtattctacttatggtactgtactggttttagtgtgaatttacatagaataaatttacttcactttcatgtcatcgacatgaatgacacaaaagctacttcataatactactttacaatagttttcaacatttccatatggtgcgacccctttgctctcatcaattttgggtgtcatgagaaccataggtatcccgttggacatgatgtattgcgaagagc

SEQ ID NO: 4215 - DNA, 241 bp, Homo sapiens
  misc_feature (122)..(122): n is a, c, g, or t
  misc_feature (229)..(229): n is a, c, g, or t
ggtgaccagaatgtcagtgcagttggcagctgagggtgtttgtgtgacctgaggtcaccccttgtaagaggctccctggggcctgcatggtacatcctcccctctcctgggggaacccagcntggcccaggatttgtggattgcttagaaagatccttttgggcagcctgaagactggggagggttttcctccctcctccacctccacccacattccacttaccctttncctcctcatccc

SEQ ID NO: 4216 - DNA, 456 bp, Homo sapiens
  misc_feature (270)..(270): n is a, c, g, or t
  misc_feature (292)..(292): n is a, c, g, or t
  misc_feature (362)..(362): n is a, c, g, or t
  misc_feature (448)..(448): n is a, c, g, or t
tcctgcacacaccatttgcccatggatcgcagtacacagtgagttccacagtctagattgcattggaaggtcacaggccaccaacacagcttcaagggctggctaggaaaagaaggtgaccaattgataccgtgcgtgcaataatatgctcacaaagccagaggtcagaactatgacccctctttagatagattgcccagattcggtaaaaagtaacaaccagaaggaaaacaaaagccatatattttcctgctctatccaatctgaaantgacacttttatcctgtttaanttactcagcttatcttcaaattcagctctaaaacgctgtgggttaggagggtacttgaaaaatgccaaantactctttcagtttgttattttctcgggtattttgctattttctcgggtggttttgccattcattttagggtggggaggaggttcngctttact

SEQ ID NO: 4217 - DNA, 328 bp, Homo sapiens
gcacgagctaaactccacgcagccaatcgctttcctggaggagcgccaacctcgaagacaactcagcactgggcgggttcccctctgctgcttgtgcgcatgcgtgcggccgcccagcaagctgtgccttttgcgcctcttgcgcgtgcgccggggcacagggagggacagcgggaggtgtcgcggggagcctggtgcccttctagatgggcgacggaggcaaggacaagacgagtccgagctcaataaatgcgctgtgcaccctcaaaaaaaaaaaaaaaaaaaaaaaaaaaaaaaaaaaaaaaaaaaacctcgagggggggcccgg

SEQ ID NO: 4218 - DNA, 2330 bp, Homo sapiens
aaaggaccgaggcgtgcagcggacagcagatggatcccgcggccagcagctgcatgaggagcctccagcccccagcccctgtctggggctgccttcgaaacccccactcggaaggcaatggggcctcagggctaccccactacccgcccaccccgttctccttccaccagaaaccagacttcctggcgacagcgacggcagcgtaccctgacttctcagcctcctgcctggcagccaccccacacagcctgccccaggaggagcacatcttcactgagcagcaccccgctttcccacagtcccccaactggcacttccctgtctcagacgcccggcgcaggcccaactcaggcccggcagggggttccaaggaaatggggaccagcagcctgggcctggtggacaccacaggaggcccaggcgatgactacggggtgcttgggagcactgccaatgagacagagaagaaatcatccaggcggagaaaggagagttcagacaaccaggagaacagagggaagccggagggcagcagcaaagcccgcaaggagaggacggccttcaccaaggagcagctgcgagagctggaggcagagtttgcccatcataactacctgactcggctccgcagatatgagattgcggtaaacctggacctctctgagcgccaggtcaaagtgtggttccagaaccgaaggatgaagtggaagcgtgtgaagggaggtcagcccatctcccccaatgggcaggaccctgaggatggggactccacagcctctccaagttcagagtgagattctgcatggaggaaaaatgactaaggactgagccccctacccaactacccccaccccaatcccaccttcaccctcttccttccccagccagggcagcctctccacatctttccctgactcttggatatgaaactgcccagcattcctgggagtcttaggattttctaggaagttctgtccagcctcttagcagcctcttccctagggcctttgctcccacactctcatggaatcagacagagatcctaccgggccggatgaatctggaaacagcttcagagatactgcttctcagcgtctcttggctgccacccatgcctcctcctaccgctgttctcctaggtcagccaggcctcctcctggtctggacaccacctggcctggtgggagaggagctttggaaccagctggcgactcggaaagtaaatgcttcaaaaggaaggaaatgacagagacacacgcccttgcccaccttcctctgtaggctgcacatctgaggctttggggccccttagttgtcccgaaaccccaagaaaaatcagaatgaggagagtcaaggacagcaactcagctgctgcaagccagaaacacatccctgtctccaaatttgttggctaagtggagacacttctgagaactgactagagaagacaagaaaatagcccgatgtaggtttcggtgtccccatataggccccgtccacacaggcttgactgggtggacaagaatgaacccatgacagcacctgctgcttcaaaatcaaaatcaatttagggatacagcaggggctgttgggctgtgctccagagaaaaggagcagctactccttttaaatccacgatttctggattgaaaacctgtccagatgctgagttgttgggctgaacaactaggagctgaaaacaacgtagaggctggaaagtgtcccctgcattctggaggggaggggagataataaggagggctgctgggtgagggcctggagatgtggaaccctggagtggaaggtttctccagtgacagtgtcctgtgacwgcaaaagggrasaagaaaatccctcttcctccatgggatggatttaagctcttgctgtgtgttctacaaatgctgttattgtgggaggaaatgctaggtttttgtgtgtggactgcccagacctcagccaggtcttctggagatgacatttgaggactgatggccaaagagcatgggggactgaagccctggctgcctcagcgctctgtctcccaacaccagctggtgttgcagagggaggtcaacgtgagtttggatctcttgtacgcagatgtaatcattcacatgtaaaaataaccccacctccccaccccaaaaagggcaagagctgtggaaaatgattgccaaatgagatggctggttagagcatgattttttctaaagcatacttcatatattttcttaagattacatcaagctaattgtgcgagctcaattcactttgtaagaaaactctcggagaaataaaatcaataaaaagccaaaaaaaaaaataag

SEQ ID NO: 4219 - protein, 254 aa, Homo sapiens
MDPAASSCMRSLQPPAPVWGCLRNPHSEGNGASGLPHYPPTPFSFHQKPDFLATATAAYPDFSASCLAATPHSLPQEEHIFTEQHPAFPQSPNWHFPVSDARRRPNSGPAGGSKEMGTSSLGLVDTTGGPGDDYGVLGSTANETEKKSSRRRKESSDNQENRGKPEGSSKARKERTAFTKEQLRELEAEFAHHNYLTRLRRYEIAVNLDLSERQVKVWFQNRRMKWKRVKGGQPISPNGQDPEDGDSTASPSSE

SEQ ID NO: 4220 - DNA, 452 bp, Homo sapiens
  misc_feature (11)..(11): n is a, c, g, or t
  misc_feature (24)..(24): n is a, c, g, or t
  misc_feature (35)..(35): n is a, c, g, or t
  misc_feature (38)..(38): n is a, c, g, or t
  misc_feature (40)..(40): n is a, c, g, or t
  misc_feature (347)..(347): n is a, c, g, or t
  misc_feature (399)..(399): n is a, c, g, or t
  misc_feature (411)..(411): n is a, c, g, or t
  misc_feature (437)..(437): n is a, c, g, or t
ttcggcacagnagagcgagcgcgnctgcagcccgncantnggctagcacggcttcggagatcatcgccttcatggtctccatctcaggctgggtactggtgtcctccacgctgcccaccgactactggaaggtgtctaccatcgacggcacggtcatcacaaccgccacctattgggccaacctgtggaaggcgtgcgttaccgactccacgggcgtctccaactgcaaggacttcccctccatgctggcgctggacggttatatacaggcatgtagaggacttatgatcgctgctgtcagcctggggcttctttggttccatatttgcgctctttggaatgaagtntaccaaagtcgggaggctccgattaaagccaaagttaaaattgctttgtttnggctggggattntaattcataattgtcaagggttgtgntcaatgattggatgt

SEQ ID NO: 4221 - DNA, 6524 bp, Homo sapiens
gaagccgcccatcccgccccaagtggaggaagagtattacaccatcgccgaattccagacaaccatcccagacggcatcagcttccaggcaggcctgaaggtcgaggtgatcgagaaaaacttgagtggctggtggtacattcagattgaagataaggaagggtgggccccggccaccttcattgacaagtacaagaagacgagcaacgcgtcgagacccaactttctggctcccctgccccacgaggtgacccagctccggctgggggaagcagcagcgctggagaacaacacgggcagcgaagccacgggcccctcccggcccctgcctgacgcaccgcatggtgtcatggactcggggttgccatggtctaaagactggaagggcagtaaggatgtcctgaggaaggcatcttcagacatgtctgcgtcagcaggctacgaggagatctcagaccccgacatggaggagaagcccagcctccctccgcggaaagaatccatcatcaagtcggagggggagctgctggagcgggagcgggagcggcagaggacggagcagctccggggccccactcccaagcctccgggcgtgattttgccgatgatgccagccaaacacatccctccagcccgggacagcaggaggccagagcccaaacctgacaaaagcagactgttccagctgaaaaatgacatggggctggagtgtggccacaaggtcttggccaaggaagtgaagaagcccaacctccggcccatctccaaatccaaaactgacctgccagaggagaagccagatgccactccccagaatcccttcttgaagtccagacctcaggttaggccaaaaccagctccttcccccaaaacggagccacctcagggcgaagaccaagtcgacatctgcaacctcaggagtaagctcaggcctgccaagtcccaagacaagtccttgttggatggggagggcccccaggcagtagggggccaagacgtggccttcagccgaagcttcctcccaggagaggggcctggccgcgcccaggacaggacgggcaaacaggatggtctcagcccaaaagagatttcctgcagagcccctccgaggccagccaagaccacagatcctgtgtctaagagcgtgcctgttcctctccaagaggctccccagcagagacctgtggtcccaccccgcagaccacctcccccaaagaaaacctcttcgtcatccaggccgctcccagaggtcagaggtccacagtgtgaaggccacgaaagcagggcagctcccaccccaggccgtgctctcctcgtccctccaaaagccaaaccttttctctccaactctttggggggccaggatgacacgcgaggcaaaggcagcctggggccatgggggaccggcaagattggagaaaacagggagaaagcagctgcagcctctgtccccaatgccgacggcctgaaggactctttgtatgtggccgtggccgactttgaaggagacaaagacaccagcagcttccaggaagggacagtgtttgaagtccgggagaagaacagcagtggctggtggttctgccaggtcctgagcggagccccttcctgggaagggtggattccttccaactatctcagaaagaagccgtagccgactccctttctgcctagagggcccgctggtccttgctggctttacccacgtatttaatacgcctcttaatttatcattctccacgcagcttccaaggcagacagactctggggtactgtgacttcttgcctcccatgggtggagagtgagtttcggacacctcgggcgcccctgggcctgatccctcctatcacagcatcactggaggctcagaacccacagcctttgctttctgtccatgtcagcatccctgccttaagagaactcctcctggccaatggcattgccacccagcagtgggaccaagactctccaagacctccaggactggatcccattgcctggagaaactccagcaagggtctctcatggcttggacatggcacagtaaggggcagccaacccagtccatgatgacttttgctccaacttcttcatgtttctaaaagcccagtggctttattcactcctcctaaattgcctgctaccagaaggaacttcatcctgaagaaatgcattccattaccagttccagggaaagtgtccccttccccaaagcctcaggcccgtgggcctctgaggttccactggatgcggctcccccaggagtgggcctggagatccgctcagccgccctgcctcccaccttctatcttgggaccgtggtcagccctgaagggtggttccagccccgcgtatgctgcactttgctgctgcaggctccggtccctccagggcttttcaatgagagttcccaccccaacttggagcatttcatttttgcctacctaaagcaagaatctcaaagtttgtttgaataagaggcccattcacaagtcgtgcccttgtgagcacccctttgctgagtgcctcgtgggtgccaaacactgtacttggcgctttgcattcatgctttgaccctcacaacctccctttatagatgaggaaattcacgctccatgtgcccaaggacacaccagccaggaggaagagggaagaggatttgagtccaggcctgcctgacttcagtgcctgtgccctcccctctgtaaaagacaaaccaggcagggaagagatagaagctggctaagtggtggccaagtggcttcattgtgaggggggtgagggggcattcgtggctgctcccacacccaccatccctccagcccacagcagcctataccaaaggctgccccggactcaacagctgcgtctccatgacaggagaatgccagggtcctggtggttggcacagagccctgttccctgcttctaagctgttgccccctggggaatagagcttatggagcaacgggagctgaggtggcctcgagggccagcctggagggctctgagcatagcatgcagcggtcccatagggaggcaggtaaccaagggccaggcagagctgcttcctgtgcctctccggcatttgtaatgtttttttcttttttcacgcactgccaaatctgttttctcccttgaagaaacccagggcagatgtggtcgtctgtcaaactgaggtctggagaggcatgactaaatcactgcagaagcaaaatcaggacccagcatttctagctcccagcccagagtaagagagcagagcagaaccccttcccattctacccgaccgaggcagccctgccctgccctgccccgcccctccccaccctgccctgccccagagatctccagttcacagtgttcatcaggcgagatacttttggacccacaaagccagttttttggggggatgctcagtgtctacctgcagtgccaaagttttgcttgaacagccctcttctgccgcgcctcccagctccaccccctatcaacgtgggtgctggctgcttctgcgtgaggagcttcctctgatcacctgtagcatctttagtgccttcgtccagtcggcctgcaaatcccatttcccagagaggcttgggcagggcccacttgccacttggccctgtgcccagagcgttgggggcagatggcagccaggggaagaagggaggtggggaagggccgccaccgcttgagggtcccctcccttgagaggaggccccatggcagttttcctgagttcttgatccactttggtttaaacaacttttgtgaagctatgtgagatttgactgcatttcaaaagacaaaacacatgtttttttctgatttgctctttgcctttcagcgacgctttcagatactttgtgagtgtctactctgtgctaggtgctgagtagactgggatgtgtgtggctccatccctggctggaagagctttgagtcctgtctgctgacttcactgaaggagtttctctcttgcttcattccttcctcccgggggtcagctgggtaggagcagacttgccctgccttcctctaggcagaaagttttcctgcaaatgaaagaatctgccattctcttttgctatgatgatgatgattattctgacatgacccgcgggtactgaagccacagtcctctctgttcactgttctctccttgagtcatatctatggcctgaggacgtctgtatccagctccttttcctacaatggtagacacttccccaggcagtgggtgggtcggggtggccagtcactctcctagctgtccttgcctggggacttagatttaccccatccaggactgtggtcgctattctgtgagcgattgatggcgcatatgcagaactcccctggagtcatggctctagaaagtgtccaggcccatcgtgacaatggtgccaagcaccgggctggtgaccagtgcctaaacacacacgctcccttaatccttacggcaagcctgtgaggcggataggaccagccctgatctatagtgagaaaattaaggttcagagggagaaggtccaaatagtggccaagctgggactgagatctcgagtttgggtttgtttgggttttgttgttgttgttctttccctcgtgtccatgacttttctctgccattagcagggaagtgtgcggagggcttccagggaatcaagtgaccctccctctgaatttcggtgcctcttccccccgccccttgctcacacatttcagtaggtcacaggccaaatggcagcccaaaaggtgggcagagatttttttttcttcccctcacccctgcttattaacacaattgtgacaactactttaccttacatcccagggcaaacggacagcttgcggtacctccaaaaatttggaaaaccctgagtctaagaccacctcttgataaaagaggcctttgctcacattttctgctcggaatctttctttgccattggtgggtgtatgtcgtcccagctgagactgcgggagagctgagctccagcttaaaccgcttttaatggcccttccctactgggggatcgctggagcccatgccaggttacggtagtcattttaaacctctgccacaaggccacgccatagaatcaatttccaagtcaatgttcttggccctaaaatgtttgcgcccactgaggatttcattaccaggtggaagatgggggaacatatgccacgttaaagagcaagtgctgagtgtgccaggacttgagaaggaccttaggctgaggagtggacagtctggtatttatttcgcctctcccaagtacccagcacagagtgggaaaaagaagaaactgctcctgccttccagtagctggcaacttgacatcaagaacaaaaacattcgtagctggacccccgtcctttcatcgtgcccaagtcttacatgttggcttaagctgcccccttggaggccgtacctttctctttggactgtgacagtggacacctaacagcctgagccatgtgtggctgtcttatcccccaagggttgtccaggcccgttctgcagggctgttgtgtagactgcagacatccatacctcaccacagaccaaagatgacctcgtgtcagactgtgggctgatgagaggtagagcagcatgcatcgaggcctgagggtgcagggcgccctctcttggcctggaggaattgctcctaactagagtaagtttccacgagggtcccaggcagagctgcagagctggaaccggaggctccacagtccttgcctgctcatggacctccttcagagcacctttctacagactggactgcccagctccgtggggtggcatctggtttctggtgctattctgccaagttatcgagctcctcctcatgtttcaacattccatcttcccgtttctatcctcgactccaaagtaagccttcttagctccaatcagggatgaggggctcaacctcttctgtcctcaaagaggccaaacgcagtgccacagtcggtagccttcacttttagatgtcctattcatgtaaaaaagaaggtgcccccaccaggcttacatcagcaataagcaattctaatgcaacgatggtgtccacattttaccccagtgtgtgcccatgtatgcctttgtgcccgtgtaattattgttagcgcccctttcacttagaggggtgatgataaactgtggccaccttgattacaacccacatttcctgctttggggagcttccaagtaacaggccatttcttacctccctccaggaacagtgggcactgcccaccacctcgtgtctgctcataggatgacgctggagatccccacacttactctaccctcttggcaaattggcattccggtggtggtttttgtttcctttaacacattaaataaatgagtatataggatgtgaggggaggggtgagaacaactagctgtagcatgtgtaggctatatactttaccattcgacttctttcctttttttttttaaaataaaaaaagtgcttgactggtttcaagcttcatcatg

SEQ ID NO: 4222 - protein, 550 aa, Homo sapiens
KPPIPPQVEEEYYTIAEFQTTIPDGISFQAGLKVEVIEKNLSGWWYIQIEDKEGWAPATFIDKYKKTSNASRPNFLAPLPHEVTQLRLGEAAALENNTGSEATGPSRPLPDAPHGVMDSGLPWSKDWKGSKDVLRKASSDMSASAGYEEISDPDMEEKPSLPPRKESIIKSEGELLERERERQRTEQLRGPTPKPPGVILPMMPAKHIPPARDSRRPEPKPDKSRLFQLKNDMGLECGHKVLAKEVKKPNLRPISKSKTDLPEEKPDATPQNPFLKSRPQVRPKPAPSPKTEPPQGEDQVDICNLRSKLRPAKSQDKSLLDGEGPQAVGGQDVAFSRSFLPGEGPGRAQDRTGKQDGLSPKEISCRAPPRPAKTTDPVSKSVPVPLQEAPQQRPVVPPRRPPPPKKTSSSSRPLPEVRGPQCEGHESRAAPTPGRALLVPPKAKPFLSNSLGGQDDTRGKGSLGPWGTGKIGENREKAAAASVPNADGLKDSLYVAVADFEGDKDTSSFQEGTVFEVREKNSSGWWFCQVLSGAPSWEGWIPSNYLRKKP

SEQ ID NO: 4223 - DNA, 169 bp, Homo sapiens
  misc_feature (70)..(70): n is a, c, g, or t
  misc_feature (157)..(157): n is a, c, g, or t
tgtcacctcttggcttcatggctatgctgcattaagagatggctaccattgaccctctgcattgccttgncttctggtgcctccctctcctgcaagtggccctttttagtcagatccttaaagctatttcaacatttctccacccgtatccccccancacccttccacc

SEQ ID NO: 4224 - DNA, 5387 bp, Homo sapiens
gggacccgtgaccgtcacggagagatagagaacccctagcggacctgaggaacctgggctctgcttcctccgcctgctgcctggactgctcagtgaggtggggggatccccggccaccggtgctgtggctgtagctgacctctttggaccgggatgtgggtatcctgggctcctggcctgtggctgctcggtctttgggctaccttcggccatggggcaaatacaggtgcacaatgcccaccttcacagcaggaaggactcaaattggaacacagtagtagcctgccagccaacgtgactggcttcaacctcatccaccgactcagcctcatgaagaagtctgccatcaagaagatccgcaaccccaaggggcctctcatcctgcgcctgggggcggcccccgtgacccagcccacgcgacgagtattccctcggggtctcccggaggagtttgccctggtgctgacactactgctgaagaaacacacccaccagaagacgtggtatctgtttcaagtgaccgatgcaaatgggtatccacagatatccctggaagtcaacagccaagagcggagcctggagctcagggcccagggccaggatggcgactttgtgtcctgcatcttcccagtgccccagctcttcgacttgcgttggcacaagctgatgctgagtgtggctggacgtgtggcctctgtgcacgtggactgcagctcagcctcctcccagcctctggggccccgacgacccatgaggcctgtgggccatgtatttctaggcttggatgctgagcagggcaagcctgtctcgtttgaccttcagcaggtgcacatctactgtgacccggagctcgtgctggaggagggctgctgtgagattttaccagcagggtgccccccagagacctccaaggcccgccgggacacccagagcaatgagctcattgagatcaatccacagtctgaaggcaaggtctacacccgctgcttctgcctggaggagcctcaaaacagcgaggtggatgcccagctgacgggaagaatcagccagaaggcagaaaggggagcaaaggtccatcaggagacagcagccgatgagtgtccgccctgtgtccatggtgcccgggacagcaatgtcacacttgctccctctggccccaagggagggaaaggtgagcggggcctgcctggtccaccaggctccaagggagagaagggagcacggggcaatgactgtgttcgaatctccccggatgccccgcttcagtgtgcagaaggcccgaagggagagaagggggagtcaggagctctgggaccctcaggactcccaggctcaacaggcgagaagggccagaaaggcgagaagggcgacggaggcatcaagggcgtgccgggaaagccaggccgggacgcgccaggagagatctgtgtcattgggcccaaagggcagaagggagaccctggctttgttgggcctgaggggctggcaggagagcctgggccccccggcctccctggaccccctgggataggactgcctgggaccccgggggatccaggtggcccaccaggccccaagggagacaagggcagctcggggatcccaggaaaggaaggccctggtgggaaacctgggaagccaggtgtgaagggagagaagggtgacccctgtgaagtgtgcccaacactgcctgaagggttccagaactttgttggacttcctggaaagccagggcccaaaggggagcctggtgatcctgtacgagccaggggagaccctggcatccaaggcatcaaaggagagaagggggagccctgcttgtcctgcagctcggttgtaggggcccagcatcttgtgtcctccacaggggccagtggagatgtgggttcccctggctttggtctgcctggccttccgggtagagctggggttccagggctgaaaggagagaagggtaacttcggggaggcagggccagctggcagtccagggccaccaggaccagtggggccagcaggcatcaaaggggcgaagggggagccctgtgagccgtgcccagccctgtccaaccttcaggatggggatgtccgtgtggtggccttgcctggcccatccggagagaagggggaacctgggcctccaggctttggcttgccaggaaaacagggcaaggctggagagcgtggactgaaggggcagaagggtgatgctgggaatcctggagaccctggaacgccgggcaccacagggcggccaggactgtcaggagagcctggagttcagggccccgcggggccaaaaggagaaaagggtgatggctgcactgcctgccccagcctgcaggggacagtgacagacatggcaggacggcctgggcagcccgggcccaaaggagagcagggccccgaaggcgtgggccgacctggtaaacccggccaacccggtctaccaggagttcaagggcccccaggactgaagggcgtgcagggagagccagggcctccaggaaggggagtccagggaccccagggggagcctggagccccgggtttgcctggcattcagggacttccgggacctcggggaccacctggccccactggagagaagggtgcccagggatctccaggggtgaaaggagccaccggacccgtgggacctcctggggccagtgtctctgggcctccgggccgtgatgggcagcaaggacagacgggactcagaggaacaccaggtgaaaaaggaccacgaggagagaagggtgagccaggggagtgctcctgcccctctcaaggagacctcatcttctctggcatgccgggtgctccgggactttggatgggcagctcctggcagccgggcccgcagggtccaccaggtattcccggaccaccaggcccccctggagtacctgggctgcagggagtgcctggaaacaacggtttgccaggacagcctgggctcactgcagaactgggatccttaccaattgaacagcacctccttaagagtatctgcggggactgtgtccaggggcagagggcccacccagggtacctcgtggagaagggagagaagggagaccagggcatccctggtgtgccaggcctcgacaactgcgcccagtgctttttgtcactggagcgcccaagagccgaggaggcccggggtgacaacagtgagggagatcctggctgtgttgggagcccaggcctacctggtcctccgggattgccaggccagagaggagaagagggtccgcctggcatgaggggctccccgggtcctccaggccctatcggccccccaggttttcctggtgctgttggctcccccggattgcctggccttcaaggagagcgaggtctcacgggcctgactggagacaagggggagccgggtcctccagggcaaccaggttacccaggtgccacgggccccccaggactgcctggcatcaagggggagcgtggctacaccgggtcagcgggagagaaaggagagccgggccccccaggatctgaaggcctcccaggccccccaggcccagcgggtcccagaggagagcgaggaccccaaggtaactccggtgagaagggcgaccagggatttcaaggccagccaggctttaccgggcccaccgggtcccctggattcccaggcaaagttggatcacctggcccacctggccctcaagcagagaagggcagcgaagggattcgaggcccatcaggcctgcctggctcccctgggccaccgggacctcctgggattcagggccccgccggtctggatggtttggatgggaaggacggcaagcctggcttgaggggggaccctggtcctgctggcccccctggactcatgggaccaccgggctttaaggggaaaacaggacatcctggcctcccaggacctaagggtgactgtggcaaaccaggtccccctggcagcactggccggcctggcgcagagggtgaacctggtgccatgggaccccagggaagacccggtcccccgggacacgttgggccaccagggcctccaggccagccaggaccagctgggatctctgcagtgggtctgaaaggagaccgaggagccaccggagaaaggggccttgcaggcctcccaggccagcccggcccccctggacaccctggccccccaggcgaacctggtacggatggtgcagctggcaaagagggaccccctggaaagcagggattctatggacctcctggtcccaagggtgatccaggagctgcaggacagaagggccaggcaggagagaaggggagagccggcatgcctggtggacctggcaagagtggttccatggggcctgttgggccaccgggccctgcaggagagagaggccaccctggagctccggggccttcggggagccctggcttgcctggtgtgcctggctccatgggagacatggtgaattatgatgaaatcaagaggttcatcagacaagagatcattaaaatgtttgatgagagaatggcttactacacctccaggatgcagttccccatggagatggcggcagctccgggacgaccagggcctccagggaaggatggtgctccgggcaggccaggtgctccagggtcacctgggctccctggtcagattggcagagaaggacggcagggcttgccaggagtaagaggattgcctggtaccaaaggtgaaaaaggggacattggtattggcattgcaggagaaaatggtcttcccggccccccaggtcctcaaggtcctccaggctatggcaagatgggtgcaacaggaccaatgggccagcaaggcatccctggcatccctgggcccccgggtcccatgggccagccaggcaaggctggccactgtaatccctctgactgctttggggccatgccgatggagcagcagtacccacccatgaaaaccatgaaggggccttttggctgaaattccccacctgcctttggatgaaagactccgttgggaataaatggccaaagcttataggactctgtgacaggttgtgaatgttttttttttttgttgttgttgtttttaattgctgttaatattttttaaataataaagaaacaaaactatctgccctttcccttccagtgggttcctctggtgctgcagccagagctccctgttgccctccttttcccgtttagtcccaggaacaaaaagggcatttgggtacaggggcatatacctgtaatcctagctattcaaggggctgaggtgggaggatcgcctgagcccaggagtttgagaccagtctaagcaacataatgagactcagtctccgaaaaataaaaattaaaaaataaagggtatttccctccttaaaaaaaaaaaaaaaaaaa

SEQ ID NO: 4225 - protein, 1603 aa, Homo sapiens
MWVSWAPGLWLLGLWATFGHGANTGAQCPPSQQEGLKLEHSSSLPANVTGFNLIHRLSLMKKSAIKKIRNPKGPLILRLGAAPVTQPTRRVFPRGLPEEFALVLTLLLKKHTHQKTWYLFQVTDANGYPQISLEVNSQERSLELRAQGQDGDFVSCIFPVPQLFDLRWHKLMLSVAGRVASVHVDCSSASSQPLGPRRPMRPVGHVFLGLDAEQGKPVSFDLQQVHIYCDPELVLEEGCCEILPAGCPPETSKARRDTQSNELIEINPQSEGKVYTRCFCLEEPQNSEVDAQLTGRISQKAERGAKVHQETAADECPPCVHGARDSNVTLAPSGPKGGKGERGLPGPPGSKGEKGARGNDCVRISPDAPLQCAEGPKGEKGESGALGPSGLPGSTGEKGQKGEKGDGGIKGVPGKPGRDAPGEICVIGPKGQKGDPGFVGPEGLAGEPGPPGLPGPPGIGLPGTPGDPGGPPGPKGDKGSSGIPGKEGPGGKPGKPGVKGEKGDPCEVCPTLPEGFQNFVGLPGKPGPKGEPGDPVRARGDPGIQGIKGEKGEPCLSCSSVVGAQHLVSSTGASGDVGSPGFGLPGLPGRAGVPGLKGEKGNFGEAGPAGSPGPPGPVGPAGIKGAKGEPCEPCPALSNLQDGDVRVVALPGPSGEKGEPGPPGFGLPGKQGKAGERGLKGQKGDAGNPGDPGTPGTTGRPGLSGEPGVQGPAGPKGEKGDGCTACPSLQGTVTDMAGRPGQPGPKGEQGPEGVGRPGKPGQPGLPGVQGPPGLKGVQGEPGPPGRGVQGPQGEPGAPGLPGIQGLPGPRGPPGPTGEKGAQGSPGVKGATGPVGPPGASVSGPPGRDGQQGQTGLRGTPGEKGPRGEKGEPGECSCPSQGDLIFSGMPGAPGLWMGSSWQPGPQGPPGIPGPPGPPGVPGLQGVPGNNGLPGQPGLTAELGSLPIEQHLLKSICGDCVQGQRAHPGYLVEKGEKGDQGIPGVPGLDNCAQCFLSLERPRAEEARGDNSEGDPGCVGSPGLPGPPGLPGQRGEEGPPGMRGSPGPPGPIGPPGFPGAVGSPGLPGLQGERGLTGLTGDKGEPGPPGQPGYPGATGPPGLPGIKGERGYTGSAGEKGEPGPPGSEGLPGPPGPAGPRGERGPQGNSGEKGDQGFQGQPGFTGPTGSPGFPGKVGSPGPPGPQAEKGSEGIRGPSGLPGSPGPPGPPGIQGPAGLDGLDGKDGKPGLRGDPGPAGPPGLMGPPGFKGKTGHPGLPGPKGDCGKPGPPGSTGRPGAEGEPGAMGPQGRPGPPGHVGPPGPPGQPGPAGISAVGLKGDRGATGERGLAGLPGQPGPPGHPGPPGEPGTDGAAGKEGPPGKQGFYGPPGPKGDPGAAGQKGQAGEKGRAGMPGGPGKSGSMGPVGPPGPAGERGHPGAPGPSGSPGLPGVPGSMGDMVNYDEIKRFIRQEIIKMFDERMAYYTSRMQFPMEMAAAPGRPGPPGKDGAPGRPGAPGSPGLPGQIGREGRQGLPGVRGLPGTKGEKGDIGIGIAGENGLPGPPGPQGPPGYGKMGATGPMGQQGIPGIPGPPGPMGQPGKAGHCNPSDCFGAMPMEQQYPPMKTMKGPFG

SEQ ID NO: 4226 - DNA, 2035 bp, Homo sapiens
aggaagctgcatgcatgagacccacagactcttgcaagctggatgccctctgtggatgaaagatgtatcatggaatgaacccgagcaatggagatggatttctagagcagcagcagcagcagcagcaacctcagtccccccagagactcttggccgtgatcctgtggtttcagctggcgctgtgcttcggccctgcacagctcacgggcgggttcgatgaccttcaagtgtgtgctgaccccggcattcccgagaatggcttcaggacccccagcggaggggttttctttgaaggctctgtagcccgatttcactgccaagacggattcaagctgaagggcgctacaaagagactgtgtttgaagcattttaatggaaccctaggctggatcccaagtgataattccatctgtgtgcaagaagattgccgtatccctcaaatcgaagatgctgagattcataacaagacatatagacatggagagaagctaatcatcacttgtcatgaaggattcaagatccggtaccccgacctacacaatatggtttcattatgtcgcgatgatggaacgtggaataatctgcccatctgtcaaggctgcctgagacctctagccccccagcataccccggctcaggggacacggacacaggcccaggggagtcagaaacctgtgacagcgtctcaggctcttctgagctgctccaaagtctgtattcacctcccaggtgccaagagagcacccaccctgcttcggacaaccctgacataattgccagcacggcagaggaggtggcatccaccagcccaggcatcgacattgcagatgagattcctctaatggaagaagatccctaatatgggtcaagatccagatgactctcctgctccttcggggaaaggaccttgtatcttggagtgaggtcacagaaggatagagcctgggggcaaaatgtctaacttgtctacatggggaccacagttcacattatgcatctcaggctccacagtgaggctgacaaactgcaatggcagtgcttttaaatgagatttgaggattcaccaagacccatggggaaccggggcagcagggaagccctcgcgtggtcttggatgaggggtgttaaatgtgtatcgtgctgtggaacatgggacaattccacgcacatcccaccgaatcatcacgcatcccattgactggcaagtactccccgccccctctgaaagcatgtcacatcatgtaaatttgcttctaacatctgcttcaaactgtctctggactccaaatttggatgggtcagcctctgcagaaagtttgtgttgagatgctggaagaacagcagagcctcctgcaccctcagcaagggaccagctcccaaaggaaaggtccttgtgtgacatttggagaatcttccttcatccagacaactctactcgaagcaagacgaaagcaggatgtggcagttgcagtgagaaaggaaaggaaaggtgggcagactctgctttctggaaatttcttcacaaagtagagctcatgaactctgtgctgtcttctggtaacatatcatcagtgtttgtattcatggtgtggcacatggatccatggcattgggtaaatctggtggtttttacacatggtcagaatgtgttcaaatacatctcatgatggagacagtaaccaaggtaatgttttgtttcagcattttaaaaagactccacttaacatttatctcagaatcatgagcctctctctagttgacaattgtcattgttcccccagccccaaattgaaccatacatttattttccaaaacagaaattgtttctgtaaacatatccgaccttcaaaagaagtgtgaggttggatttttcccccttttatttgtcctaagattccaggaggctggcctcccagcccagatagctcagccacctcacctgcctatcattcctgcattcctactttgagggtctcatcatgcccactgggtgttgttcctaagaaactgattgattaaaaaatttcccaaagtg

SEQ ID NO: 4227 - protein, 236 aa, Homo sapiens
MYHGMNPSNGDGFLEQQQQQQQPQSPQRLLAVILWFQLALCFGPAQLTGGFDDLQVCADPGIPENGFRTPSGGVFFEGSVARFHCQDGFKLKGATKRLCLKHFNGTLGWIPSDNSICVQEDCRIPQIEDAEIHNKTYRHGEKLIITCHEGFKIRYPDLHNMVSLCRDDGTWNNLPICQGCLRPLAPQHTPAQGTRTQAQGSQKPVTASQALLSCSKVCIHLPGAKRAPTLLRTTLT

SEQ ID NO: 4228 - DNA, 566 bp, Homo sapiens
atagaattagttccatattggtggaacacatagcagaggtttgagaagggagaatttagtcaactgagaagttctcatgaaaggagcaagttgaagatcacagagacaccttgaaacaaaaagccaggaataacttccaacccaagaggagaacagagaggcctcaaaaccaaagctaggataagaaacttgtagcccaagagttatcttccagacaaagaagcctgagattccaacgcagcttcagagagtactcactcaaaatgttactgaaactgaaggctttttaatgacttagccatgcatgcaaaaggcattccctaaggtggcacaaaaaacggagcccccatattccaagatagcccaggagaaagaaagacccctgttgccagagccagtgggcaaaggcacagaaaaggagacaagggtcctaatgggatgagaatcttttcgattaggcttttatacaactcctgagactggcagggtgacagccataatggggtaccaacaattctactcatggataccaggtctcaggactccaaatgattaccaaaatgaca

SEQ ID NO: 4229 - DNA, 439 bp, Homo sapiens
cttgcaaagtatggcaaaggcttggcaaagactataagcttttggaaaacagggactatgtcttcttcaacaatgtgtacacaacaagtagcaggttgtttggcacatggcagatgctcggcagtacatgccacactactacccttcctgctcttgtgcgcacacctaccctgatgatgcagccttcactggatatcaaaccatttatgtcttttccagtggacagtagttctgctgttgggctctttccaaattttaacacaatggatcctgtgcaaaaagcggttattaaccatacatttggagtatccattcccccaaagaagaaacaagttatttcttgtaatgtctgtcagcttcgctttaactcagatagccaggccgaggccactacaaaggaagtaaacatgccaagaaggtcaaagcactagacgcaacg

SEQ ID NO: 4230 - DNA, 196 bp, Homo sapiens
  misc_feature (177)..(177): n is a, c, g, or t
  misc_feature (183)..(183): n is a, c, g, or t
caaataaaataagctttgtgcttgggatttttttctttttttttttggttctggtagtgacaggtgtatttataatcaagttgaatcaagagtgacaagaagaaatacagctagagttatatttttgccccaggggtattcttttcctagaagagcaagtccatttttagaaaattnaaatgncttaatttgtaac

SEQ ID NO: 4231 - DNA, 342 bp, Homo sapiens
  misc_feature (342)..(342): n is a, c, g, or t
ggcattagaaaggtttaaaagaagtccacattgggtcacgtggcatcggctccctgggtttcgcagctgccaccgccacccgggtctggcttagctcccggatcctttaagatttggctccgccctgcgctctcgttggccaatcggcgccaagaccctgggggcgggggtcagcggctttgctccggaagccgcgctcttaggagtgcgcctggcgggacggtggggtctgccttggggttggacttagggttagggtctatgtcgcccccggtggtcacgagcatgctcccgccagcctcctcttgattgattgattgattgattgattgacaggtctcn

SEQ ID NO: 4232 - DNA, 412 bp, Homo sapiens
ttttttttttgctagcaggggattgggccagacaacccttgaagccatgtccctctctttgattctatgaaatggcagcacagtcacctacagacatctgaccttaaacactggcccatctgcaatgccacggctgagtttcccaaccacaggtaaaggccccacccaaaagccaaattctttcagtcaaagctcaaaaatttcagcccagcaattggatccctgtgaaggctacgtaataagcatagacaaaaacgtaaaatcaaaagaaaggtttggaaatgaaagtttaaatatggcaactgaagtccaaccaatggtatcatctacccccacccttctttcctcataaatgtgattcaaaatgacattaactccaaaaatgaacacagctcaaacaaggtgaccttac

SEQ ID NO: 4233 - DNA, 3627 bp, Homo sapiens
atttacgcgttgctgaatctcctgtggacaaaccaccaataggccaggactgtcctgtggacagacggggtgagcctcttcttgtgtctggagattctgaaaagatttgatcaccaggagatttttcgggacattaccaaaccactcattttagtggctgcctccgggtgatgatggctgtgtgaacgactgccatggcccaccggaagcttgagagcgtggggagcggcatgttggaccatagggtgagaccaggtcctgtccctcacagccaggagcccgagagcgaggacatggagctgcccttggagggctatgtgcccgagggcctggagctggctgccctgcggccagagagccccgcgccagaggaacaggagtgccacaaccacagccccgatggggactccagctctgactacgtgaacaacacctctgaggaggaggactatgacgagggcctccctgaggaggaggagggcatcacctactacatccgctactgccctgaggacgacagctacctagagggcatggactgcaacggggaggagtacctggcccacagtgcacaccctgtggacactgatgagtgccaggaggcggtggaggagtggacggactcggcgggcccgcacccccacggccacgaggctgaaggcagccaggactacccagacggccaactgcccattccggaggatgagccctccgtccttgaggcccatgaccaggaagaagatggtcactactgtgccagcaaagagggctaccaggactactaccccgaggaggccaacgggaacaccggcgcctccccctaccgcctgaggcgtggggatggggacctggaggaccaggaggaggacattgaccagatcgtggcagagatcaagatgagtctgagcatgaccagcatcaccagcgccagtgaggccagccccgagcatgggcctgagccagggcctgaggactctgtagaggcctgcccacccatcaaggccagctgcagccccagcaggcacgaggcgaggcccaagtcgctgaacctccttcccgaggccaagcaccccggagacccccagagaggcttcaagcccaagaccaggaccccagaagagaggctgaagtggccccacgagcaggtttgcaatggtctggagcagccaaggaagcagcagcgctctgatctcaatggacctgttgacaataacaacattccagagacaaagaaggtggcatcatttccaagttttgtggctgttccagggccctgcgaaccagaagacctcatcgacgggatcatctttgctgccaattacctggggtccacccagctgctatcagaacggaacccttccaaaaacatcagaatgatgcaagcgcaggaggccgtcagccgggtcaagaggatgcaaaaggctgctaagatcaagaaaaaagcgaattctgagggggatgcccagacgctgacggaagtggacctcttcatttccacccagaggatcaaggttttaaatgcagacacgcaggaaaccatgatggaccacgccttgcgtaccatctcctacatcgccgacattgggaacattgtagtgctgatggccagacgccgcatgccccggtcagcctctcaggactgcatcgagaccacgcccggggcccaggaaggcaagaagcagtataagatgatctgccatgtgttcgagtcggaggatgcccagctcatcgcccagtctatcggccaggccttcagcgtggcctaccaggagttcctgcgagccaatggcatcaaccccgaagacttgagccagaaggaatacagcgacatcatcaacacccaggagatgtacaacgacgacctcatccacttctcaaactcggagaactgcaaggagctgcagctggagaagcacaagggcgagatcctgggcgtggtggtggtggagtcgggctggggctccatcctgcccacggtgatcctggccaacatgatgaatggcggcccggctgcccgctcggggaagctgagcatcggggaccagatcatgtccatcaatggcaccagcctggtggggctgcccctcgccacctgccaaggcatcatcaagggcctgaagaaccagacacaggtgaagctcaacattgtcagctgtcccccggtcaccacggtccttatcaagcggccagacctcaagtaccagctgggcttcagcgtgcagaatggaattatctgcagcctcatgagagggggcattgctgagcgagggggcgtccgtgtgggccaccgcatcatcgagatcaacgggcagagcgtggtggccacagcccacgagaagatagtccaagctctgtccaactcggtcggagagatccacatgaagaccatgcccgccgccatgttcaggctcctcacgggtcaggagaccccgctgtacatctaggccaccccagcctggccacgcagccaggacaccgggcagggccgcccgggcccagaggagctgggagccgggccgcagacttgaccccgacgccacagcccagccacggacgctggctccccaaagggtgtgccctcaccacccacttgatttttttcattttgccaaaaaggggtatgtctttatcaaaggagagtcacagaacaaatgtttgtttgtaaagcgttccaagtattttgccacgttctggactgtcttctccctgcacaagccagggtgtgtctcggtagctgtgcgtggtgtggagtgtgtgtctttcctccctgaagctgtgcggagcgaactggcgcctccgagggacgcggctcccggggcagggcagccgtcacccctgcctcccgcccccttggctgggacgtctggggtcctgtggggcccccacaatggtcccaaacagctgcctctgccactgactgcagggacacgggcagcctggctcccaggacacgacttgtaatgaaagtttggggacatgtgattgattgattgattgattgtaaataaaggatgatggccacaacatgaaaactccatatttatttagatgctattattactgtttggacttttattttggcaggcttttttccagactctagggttttccaatgtgactaatgaccacacctgcctctcccgtcgtctcttctgggcaccctcccacccggctgcatacccgggcagggctcccacagagacaaggagggcacaggtgtctgccccctctttaaaatcgatctacacacatccacgcacatgcgaccccgaggaaacgaaacccactctagaaaacgcgaccttggccgcacctaaagcagccagccgtgagtgcagaccccttggccagcgtggcgcagtggccctgagcagtagtggcatgtgtgtagatcaagtcggatctagtccagctcggttcattagcgatccatgtaatctgacgtcatcttgtctcgaagtctctttttttggcccaggccttgaagaatacactgtgacttaagaagccttaccacgcagtaactaaagctttaggatgactgtattcgaggagtgccgtgtgttgcatgcagctacccgtaggaagacttcgcgcatatcactaataaacctgaagtcgtgatga

SEQ ID NO: 4234 - protein, 749 aa, Homo sapiens
MAHRKLESVGSGMLDHRVRPGPVPHSQEPESEDMELPLEGYVPEGLELAALRPESPAPEEQECHNHSPDGDSSSDYVNNTSEEEDYDEGLPEEEEGITYYIRYCPEDDSYLEGMDCNGEEYLAHSAHPVDTDECQEAVEEWTDSAGPHPHGHEAEGSQDYPDGQLPIPEDEPSVLEAHDQEEDGHYCASKEGYQDYYPEEANGNTGASPYRLRRGDGDLEDQEEDIDQIVAEIKMSLSMTSITSASEASPEHGPEPGPEDSVEACPPIKASCSPSRHEARPKSLNLLPEAKHPGDPQRGFKPKTRTPEERLKWPHEQVCNGLEQPRKQQRSDLNGPVDNNNIPETKKVASFPSFVAVPGPCEPEDLIDGIIFAANYLGSTQLLSERNPSKNIRMMQAQEAVSRVKRMQKAAKIKKKANSEGDAQTLTEVDLFISTQRIKVLNADTQETMMDHALRTISYIADIGNIVVLMARRRMPRSASQDCIETTPGAQEGKKQYKMICHVFESEDAQLIAQSIGQAFSVAYQEFLRANGINPEDLSQKEYSDIINTQEMYNDDLIHFSNSENCKELQLEKHKGEILGVVVVESGWGSILPTVILANMMNGGPAARSGKLSIGDQIMSINGTSLVGLPLATCQGIIKGLKNQTQVKLNIVSCPPVTTVLIKRPDLKYQLGFSVQNGIICSLMRGGIAERGGVRVGHRIIEINGQSVVATAHEKIVQALSNSVGEIHMKTMPAAMFRLLTGQETPLYI

SEQ ID NO: 4235 - DNA, 358 bp, Homo sapiens
  misc_feature (50)..(50): n is a, c, g, or t
  misc_feature (52)..(52): n is a, c, g, or t
  misc_feature (54)..(54): n is a, c, g, or t
  misc_feature (118)..(118): n is a, c, g, or t
  misc_feature (172)..(172): n is a, c, g, or t
  misc_feature (203)..(203): n is a, c, g, or t
  misc_feature (273)..(273): n is a, c, g, or t
  misc_feature (347)..(347): n is a, c, g, or t
cgctcttctgttctcgctctatttgccccgctgactgctggcctcgcatntntngccagtcttacgtctctgccgcccccactcccgcccgcgccccatcttcttgcgcgactcggcncgctggtccccccctcctcctcccgcgtcctgcctgccccctcctcctgctctngcaggctccttggcacccaggccgggaggancgcgcccagccgtctaaacgggaacagccctggctgagggagctgcagcgcaaggagtatctgacggcgncaggttgcgtaggtgcggcacgaggagttttcccggcagcgaggaggtcctgagcagcatggcccggagagcgncttttcctgcc

SEQ ID NO: 4236 - DNA, 385 bp, Homo sapiens
cggccgctactcgtgcatgcagtgcgccttctccacggctcgcggccgccatgaccctgcacctggaggaccaccgccccggcgcccccgcggcccccgcggccgggccgccgcgccccgacgcccccgcgggtaaggccgaggaatgcgcgggtggagaggggggcgggggcccaaggcgctgaggctcaggcgcccccctcctctgccccacccagatccggccccgcttgcacccaaggtgtcgccgctgctgtcagagggggagcttccagtgttctcgcagctctgaatcccgccgctttgggggtgggccatgggatgtgggtagttttgtcatttggagggggctgcagggaaggggggctggggtggacaataaaga

SEQ ID NO: 4237 - DNA, 1456 bp, Homo sapiens
cctgctcgggcgcgggcggcggcgcggccatgaagctgaagctgaagaacgtgtttctcgcctacttcctggtgtcgatcgccggcctcctctacgcgctggtacagctcggccagccatgtgactgccttcctcccctgcgggcagcagccgagcagctacggcagaaggatctgaggatttcccagctgcaagcggaactccgacggccaccccctgcccctgcccagccccctgaacccgaggccctgcctactatctatgttgttacccccacctatgccaggctggtacagaaggcagagctggtacgactgtcccagacactgagcctggtgccccggctgcattggctgctggtggaggatgctgagggtcccaccccgctggtctcagggctgctggctgcctctggcctcctcttcacacacctggtggtcctcacgcccaaagcccagcggcttcgggagggcgagcctggctgggttcatccccgtggtgtcgagcagcggaacaaggccctggactggctccggggcagagggggtgctgtgggtggggagaaggacccaccaccaccagggacccaaggagtcgtctactttgctgacgatgacaacacctacagccgggagctgtttgaggagatgcgctggacccgtggtgtctcagtgtggcctgtggggctggtgggcggcctgcgattcgagggccctcaggtacaggacggccgggtagtgggcttccacacagcatgggagcccagcaggcccttccctgtggatatggctggatttgccgtggccctgcccttgctgttagataagcccaatgcccaatttgattccaccgctccccggggccacctggagagcagtcttctgagccaccttgtggatcccaaggacctggagccacgggctgccaactgcactcgggtactggtgtggcatactcggacagagaagcccaagatgaagcaggaggagcagctgcagcggcagggccggggctcagacccagcaattgaggtgtgatggcggccccaccccaactaccacctcttttcaggcacagaccttgtgggactgggccccaggcctgcccaggatgtggttttccaagtcctgacccttggagccagaagtggcccctctgcccctccaggcccagggcatggtcctgctgcttcacccctcccctagcctgccgtgtggcactgcccacaggctggggacaagcagcccttgtgttgagtcaggttggccctgtctagggtggaacagaaggacagatggacccaggagggagggcagctgagtaactgggtaacttattggggctgggcatgcactggggggctggaggagctgggctggacccttcccacctgagcatgctgacccccttcctacctccagaataaagaatctcaacctggaaaaaaaaaaaaaaa

SEQ ID NO: 4238 - protein, 335 aa, Homo sapiens
MKLKLKNVFLAYFLVSIAGLLYALVQLGQPCDCLPPLRAAAEQLRQKDLRISQLQAELRRPPPAPAQPPEPEALPTIYVVTPTYARLVQKAELVRLSQTLSLVPRLHWLLVEDAEGPTPLVSGLLAASGLLFTHLVVLTPKAQRLREGEPGWVHPRGVEQRNKALDWLRGRGGAVGGEKDPPPPGTQGVVYFADDDNTYSRELFEEMRWTRGVSVWPVGLVGGLRFEGPQVQDGRVVGFHTAWEPSRPFPVDMAGFAVALPLLLDKPNAQFDSTAPRGHLESSLLSHLVDPKDLEPRAANCTRVLVWHTRTEKPKMKQEEQLQRQGRGSDPAIEV

SEQ ID NO: 4239 - DNA, 2340 bp, Homo sapiens
gtctgaacctctgccagtcctggagactggtgccctgagctccaaccagcgggcctcatcctacaccctcaccaccgcaacttctcacccgagcaagaagcagctcccagagagaaagaacgttcccacctgcctagccatgggagaggacgctgcacaggccgaaaagttccagcaccctgggtctgacatgcggcaggaaaagccctcgagccccagcccgatgccttcctccacaccaagccccagcctgaacctagggaacacagaggaggccatccgggacaactcacaggtgaacgcagtcacggtgctcacgctcctggacaagctggtgaacatgctagacgctgtgcaggagaaccagcacaagatggagcagcgacagatcagtttggagggctccgtgaagggcatccagaatgacctcaccaagctctccaagtaccaggcctccaccagcaacacggtgagcaagctgctggagaagtcccgcaaggtcagcgcccacacgcgcgcggtcaaagagcgcatggataggcagtgcgcacaggtgaagcggctggagaacaaccacgcccagctcctccgacgcaaccatttcaaagtgctcatcttccaggaggaaaatgagatccctgccagcgtgtttgtgaaacagcccgtttccggtgccgtggaagggaaggaggagcttccggatgaaaacaaatccctggaggaaaccctgcacaccgtggacctctcctcagatgatgatttgccccacgatgaggaggccctggaagacagtgccgaggaaaaggtggaagaaagtagggcagagaaaataaaaagatccagcctgaagaaagtggatagcctcaagaaagcattttctcgccagaacatcgagaaaaagatgaacaagctggggacaaagatcgtatctgtagagaggagagagaagattaagaaatctctcacgtcaaatcaccagaaaatatcctcaggaaaaagctcccccttcaaggtttctcccctcactttcgggcggaagaaagtccgagagggagaaagccatgcagaaaatgagaccaagtcagaagacctgcctagcagtgagcagatgccaaatgaccaggaagaggagtcctttgcagagggtcattccgaagcgtccctcgccagcgctctggtggaaggggaaattgcagaggaggctgctgagaaggcgacctccagggggagtaactcggggatggacagcaacatcgacttgactattgtggaagatgaagaggaggagtcagtggccctggaacaggcacagaaggtacgctatgagggtagctacgcgctaacatccgaggaggcggagcgctccgatggggaccccgtgcagcccgccgtgctccaggtgcaccagacctcctgagcttagagccaccgtgccatcctgtgctgtgctcaagcgggcagccagggctgaagaacaaactcttgcacatctccagcacgactcacccactcctgcgttcctgtccaggcagtaatcattgaccatatagtcatagtaagacacacgagaccaggctttaccatgaaagcgacctgtcacggactccacttttaatttgctcttaggttctatctctgtagaatgtctccaagattgaagaagaaactgagcagttgaaaaatgctaatctctttgacttagtcagaaaaaaacagaggataattaagatactagtcatgaaaagtgattcattcttttttgtcattccataagcttgctgaatagtgtaccggtaatatattgtatttccaccgtactctgtgaatctaattattattctttaagtgttgatatataatatacataaatatgtaagctaaacatataactatatgttttaagaagaaaacatctacgaaaggtaaaaagagatgatcagttggttgtttacttgctagaaaccattgttttattgcaaacgaaggaaaaatgaagagattataaaagtcagctaatgaagtaagatacgtagtaaagtcaggactattcaaaaagtaagaaagaaaatttggaaaatgagagaaacaggaaacaaagaatgccgaaaagaatgaaaacagagaaaaaatgtatgtgcttgaaagtaaaatacttacaatagtagcttaactatttcactctttaaataaaaatactaaagaagttcgtatatcctggaataacatgtcatcttcaaaatatttttattttctaatatttttaataataaacattttatagtgttaaagctgtatttttcttaataaataaaggacattacaaataaaaaaaaaaaaaaa

SEQ ID NO: 4240 - protein, 425 aa, Homo sapiens
MGEDAAQAEKFQHPGSDMRQEKPSSPSPMPSSTPSPSLNLGNTEEAIRDNSQVNAVTVLTLLDKLVNMLDAVQENQHKMEQRQISLEGSVKGIQNDLTKLSKYQASTSNTVSKLLEKSRKVSAHTRAVKERMDRQCAQVKRLENNHAQLLRRNHFKVLIFQEENEIPASVFVKQPVSGAVEGKEELPDENKSLEETLHTVDLSSDDDLPHDEEALEDSAEEKVEESRAEKIKRSSLKKVDSLKKAFSRQNIEKKMNKLGTKIVSVERREKIKKSLTSNHQKISSGKSSPFKVSPLTFGRKKVREGESHAENETKSEDLPSSEQMPNDQEEESFAEGHSEASLASALVEGEIAEEAAEKATSRGSNSGMDSNIDLTIVEDEEEESVALEQAQKVRYEGSYALTSEEAERSDGDPVQPAVLQVHQTS

SEQ ID NO: 4241 - DNA, 504 bp, Homo sapiens
  misc_feature (382)..(382): n is a, c, g, or t
  misc_feature (430)..(430): n is a, c, g, or t
caagacagcaggtgccacggcccgccccgcctgccagcccgaattcccgttctcctgtgtctactaacaaggacatgggggtgggcggtgacctccgcatccctcagagctcagagggtcctcgctgccaccggtccccccctagcccgtcatcagccggtggagctccatcttccattcctggttttagggcagaatccatggagactgcttccagaaggcatctggctctgagttataaattacttccctggtcctgacagtcacctggggtcccccctctccctggttccacctttctgaggaggagcctggagtcagggctgggttttggattaacccatccttcctagttaacacctttttgtttttattttatttnatttttgtttgttttctccgtgtgtgtgttttcctaaatttaatttanctctgtttcccctttttcctttttttttttaaataaaagagcaaaagcttttttaattaactttgtaaattaag

SEQ ID NO: 4242 - DNA, 318 bp, Homo sapiens
  misc_feature (37)..(37): n is a, c, g, or t
  misc_feature (48)..(48): n is a, c, g, or t
  misc_feature (51)..(52): n is a, c, g, or t
  misc_feature (55)..(56): n is a, c, g, or t
  misc_feature (58)..(58): n is a, c, g, or t
  misc_feature (70)..(70): n is a, c, g, or t
  misc_feature (73)..(73): n is a, c, g, or t
  misc_feature (111)..(111): n is a, c, g, or t
  misc_feature (120)..(120): n is a, c, g, or t
  misc_feature (163)..(163): n is a, c, g, or t
  misc_feature (231)..(231): n is a, c, g, or t
  misc_feature (234)..(234): n is a, c, g, or t
  misc_feature (265)..(265): n is a, c, g, or t
cgttcctgctgctgctctggtttctgcccatcactgnggggatccagnggnntgnncncatgttcactgnagntactaactcagttctgcctcctgactatgacagtaatnccacccagntcaactatggtgtggcagttactgatgtggaccatgatggggnctttgagatcgtcgtggcggggtacaatggacccaacctggttctgaagtatgaccgggcccagaagnggntggtgaacatcgcggtcgatgagcgcatacncctactacgcgctgcgggaccggcaggggaacgccatcggggtcacagcctgc

SEQ ID NO: 4243 - DNA, 404 bp, Homo sapiens
  misc_feature (367)..(367): n is a, c, g, or t
  misc_feature (391)..(391): n is a, c, g, or t
ttcttgtccctgttgcccccatctctacccccttttgttaatggttgagagaaatgtggaccagtgattctcagtttggtgcccaggtccccaaaggaagtgatggagagccttgagctaagttcaggcagcagcatgtggccagcagcagtgtgctgggagcagaggttggaatcagggctcagggccttcacttcaagggccctccccagctactcgggaggctgaggcaggagaatcgcttgaactcaggaggtggaggttgcggtgagccaagatcgtgccactgcactccagcctgggctacaagattgaaaagatcgaaactctgtctcaaacaaaaaaaaaaaaaattcaaggctgtttncaaggcagcctcaaaaagagcctngtgcccagggggt

SEQ ID NO: 4244 - DNA, 177 bp, Homo sapiens
  misc_feature (31)..(31): n is a, c, g, or t
  misc_feature (72)..(72): n is a, c, g, or t
  misc_feature (80)..(80): n is a, c, g, or t
  misc_feature (87)..(87): n is a, c, g, or t
  misc_feature (146)..(146): n is a, c, g, or t
gtggccatagagcagacatctcttaagatgntgcaggcagtaggaggtgcacctgcacgtcccactggagantatatctntaatcantgtggtgctaagtacacatccctagacagctttcagactcacctaaaaactcatctcgncactgtgcttccaaaattgacctgtcctcag

SEQ ID NO: 4245 - DNA, 175 bp, Homo sapiens
  misc_feature (65)..(65): n is a, c, g, or t
  misc_feature (81)..(81): n is a, c, g, or t
  misc_feature (109)..(109): n is a, c, g, or t
  misc_feature (163)..(163): n is a, c, g, or t
aaaaaagggaaaaaacttcaatccacatttattgagattacaaaaataacagcacatttcatganctcattacaactcggngttaccaacacatccacagataggaagngcatctttaaattaactgcttcttgccaatacaaatctcacggcataaaaaagnaatttattttca

SEQ ID NO: 4246 - DNA, 1378 bp, Homo sapiens
gggacccgggcttctgtgaaacatggcggtaggctgggaccataacacaagcatgactatatgaaggaagaggaaggttttcctgaagatgaggcgactgaatcggaaaaaaactttaagtttggtaaaagagttggatgcctttccgaaggttcctgagagctatgtagagacttcagccagtggaggtacagtttctctaatagcatttacaactatggctttattaaccataatggaattctcagtatatcaagatacatggatgaagtatgaatacgaagtagacaaggatttttctagcaaattaagaattaatatagatattactgttgccatgaagtgtcaatatgttggagcggatgtattggatttagcagaaacaatggttgcatctgcagatggtttagtttatgaaccaacagtatttgatctttcaccacagcagaaagagtggcagaggatgctgcagctgattcagagtaggctacaagaagagcattcacttcaagatgtgatatttaaaagtgcttttaaaagtacatcaacagctcttccaccaagagaagatgattcatcacagtctccaaatgcatgcagaattcatggccatctatatgtcaataaagtagcagggaattttcacataacagtgggcaaggcaattccacatcctcgtggtcatgcacatttgggcagcacttgtcaaccatggaatcttacaattttttctcatagaatagatcatttgtcttttggagagcttgttccagcaattattaatcctttagatggaactgaaaaaattgctatagatcacaaccagatgttccaatattttattacagttgtgccaacaaaactacatacatataaaatatcagcagacacccatcagttttctgtgacagaaagggaacgtatcattaaccatgctgcaggcagccatggagtctctgggatatttatgaaatatgatctcagttctcttatggtgacagttactgaggagcacatgccattctggcagttttttgtaagactctgtggtattgttggaggaatcttttcaacaacaggcatgttacatggaattggaaaatttatagttgaaataatttgctgtcgtttcagacttggatcctataaacctgtcaattctgttccttttgaggatggccacacagacaaccacttacctcttttagaaaataatacacattaacacctcccgattgaaggagaaaaactttttgcctgagacataaaacctttttttaataataaaatattgtgcaatatattcaaagaaaagaaaacacaaataagcagaaaacatacttattttaaaaaaaaaaaaaaaaaaaaaaaaaaaaaa

SEQ ID NO: 4247 - protein, 378 aa, Homo sapiens
MRRLNRKKTLSLVKELDAFPKVPESYVETSASGGTVSLIAFTTMALLTIMEFSVYQDTWMKYEYEVDKDFSSKLRINIDITVAMKCQYVGADVLDLAETMVASADGLVYEPTVFDLSPQQKEWQRMLQLIQSRLQEEHSLQDVIFKSAFKSTSTALPPREDDSSQSPNACRIHGHLYVNKVAGNFHITVGKAIPHPRGHAHLGSTCQPWNLTIFSHRIDHLSFGELVPAIINPLDGTEKIAIDHNQMFQYFITVVPTKLHTYKISADTHQFSVTERERIINHAAGSHGVSGIFMKYDLSSLMVTVTEEHMPFWQFFVRLCGIVGGIFSTTGMLHGIGKFIVEIICCRFRLGSYKPVNSVPFEDGHTDNHLPLLENNTH

SEQ ID NO: 4248 - DNA, 492 bp, Homo sapiens
aaaatgcaataaatttattatgaaaaacataatttattgagatatataataattatattatatatatattatataatatatatattaatatataataaataaaaaatttattatgagaggaaatggaaggggaagactgagagagccatcgcacagtgacgcaggcctgaccctgagtgaaggacagagggaaggtgttcaaggtggaagtgtctcagactgcaatgaagttctaaggaaagtttggcaaggccattgaggagtccttgagtcaaagtcacccatcggaagagtatcacttatcccaggaacagtcctgtcctaaaatccccgttgggctcagttattggctatgagcagcgtatgggaagtaagacctcggagtaaagggcaatggatttcaaagctcaggatggatttcagaactcagcagctggactgctggtaaattacaatttcctcagtcagagatctgagaagcacattctcatg

SEQ ID NO: 4249 - DNA, 2872 bp, Homo sapiens
cggcgctgggagacaccggacgcccgctcggctgcgctgcggctcaggcccccgctcgggcccgacccgctcggtcaccgccggctcgggcgcgcacctgccggctgcggccccagggccatgcggaggcccacgaggaggccggcggccacgcgcatcccgtagcccaggtggcccaggtctgcaccgcggcggcctcggcgccatggagcccccgtattcgctgacggcgcactacgatgagttccaagaggtcaagtacgtgagccgctgcggcgcggggggcgcgcgcggggcctccctgcccccgggcttcccgttgggcgctgcgcgcagcgccaccggggcccggtccgggctgccgcgctggaaccggcgcgaggtgtgcctgctgtcggggctggtgttcgccgccggcctctgcgccattctggcggctatgctggccctcaagtacctgggcccggtcgcggccggcggcggcgcctgtcccgagggctgccctgagcgcaaggccttcgcgcgcgccgctcgcttcctggccgccaacctggacgccagcatcgacccatgccaggacttctactcgttcgcctgcggcggttggctgcggcgccacgccatccccgacgacaagctcacctatggcaccatcgcggccatcggcgagcaaaacgaggagcgcctacggcgcctgctggcgcggcccgggggtgggcctggcggcgcggcccagcgcaaggtgcgcgccttcttccgctcgtgcctcgacatgcgcgagatcgagcgactgggcccgcgacccatgctagaggtcatcgaggactgcgggggctgggacctgggcggcgcggaggagcgtccgggggtcgcggcgcgatgggacctcaaccggctgctgtacaaggcgcagggcgtgtacagcgccgccgcgctcttctcgctcacggtcagcctggacgacaggaactcctcgcgctacgtcatccgcattgaccaggatgggctcaccctgccagagaggaccctgtacctcgctcaggatgaggacagtgagaaggtcctggcagcatacagggtgttcatggagcgagtgctcagcctcctgggtgcagacgctgtggaacagaaggcccaagagatcctgcaagtggagcagcagctggccaacatcactgtgtcagagtatgacgacctacggcgagatgtcagctccatgtacaacaaggtgacgctggggcagctgcagaagatcaccccccacttgcggtggaagtggctgctagaccagatcttccaggaggacttctcagaggaagaggaggtggtgctgctggcgacagactacatgcagcaggtgtcgcagctcatccgctccacaccccaccgggtcctgcacaactacctggtgtggcgcgtggtggtggtcctgagtgaacacctgtccccgccattccgtgaggcactgcacgagctggcacaggagatggagggcagcgacaagccacaggagctggcccgggtctgcttgggccaggccaatcgccactttggcatggcgcttggcgccctctttgtacatgagcacttctcagctgccagcaaagccaaggtgcagcagctagtggaagacatcaagtacatcctgggccagcgcctggaggagctggactggatggacgccgagaccagggctgctgctcgggccaagctccagtacatgatggtgatggtcggctacccggacttcctgctgaaacccgatgctgtggacaaggagtatgagtttgaggtccatgagaagacctacttcaagaacatcttgaacagcatccgcttcagcatccagctctcagttaagaagattcggcaggaggtggacaagtccacgtggctgctccccccacaggcgctcaatgcctactatctacccaacaagaaccagatggtgttccccgcgggcatcctgcagcccaccctgtacgaccctgacttcccacagtctctcaactacgggggcatcggcaccatcattggacatgagctgacccacggctacgacgactgggggggccagtatgaccgctcagggaacctgctgcactggtggacggaggcctcctacagccgcttcctgcgaaaggctgagtgcatcgtccgtctctatgacaacttcactgtctacaaccagcgggtgaacgggaaacacacgcttggggagaacatcgcagatatgggcggcctcaagctggcctaccacgcctatcagaagtgggtgcgggagcacggcccagagcacccacttccccggctcaagtacacacatgaccagctcttcttcattgcctttgcccagaactggtgcatcaagcggcggtcgcagtccatctacctgcaggtgctgactgacaagcatgcccctgagcactacagggtgctgggcagtgtgtcccagtttgaggagtttggccgggttttacactgtccaaaggtctcacccatgaaccctgcccacaagtgttccgtgtggtgagcctggctgcccgcctgcacgcccccactgcccccgcacgaatcacctcctgctggctaccggggcaggcatgcacccggtgccagccccgctctgggcaccacctgccttccagcccctccaggacccggtccccctgctgcccctcacttcaggaggggcctggagcagggtgaggctggactttggggggctgtgagggaaatatactggggtccccagattctgctctaagggggccagaccctctgccaggctggattgtacgggccccaccttcgctgtgttcttgctgcaaagtctggtcaataaatcactgcactgttaaaaaaaaaaaaa

SEQ ID NO: 4250 - protein, 775 aa, Homo sapiens
MEPPYSLTAHYDEFQEVKYVSRCGAGGARGASLPPGFPLGAARSATGARSGLPRWNRREVCLLSGLVFAAGLCAILAAMLALKYLGPVAAGGGACPEGCPERKAFARAARFLAANLDASIDPCQDFYSFACGGWLRRHAIPDDKLTYGTIAAIGEQNEERLRRLLARPGGGPGGAAQRKVRAFFRSCLDMREIERLGPRPMLEVIEDCGGWDLGGAEERPGVAARWDLNRLLYKAQGVYSAAALFSLTVSLDDRNSSRYVIRIDQDGLTLPERTLYLAQDEDSEKVLAAYRVFMERVLSLLGADAVEQKAQEILQVEQQLANITVSEYDDLRRDVSSMYNKVTLGQLQKITPHLRWKWLLDQIFQEDFSEEEEVVLLATDYMQQVSQLIRSTPHRVLHNYLVWRVVVVLSEHLSPPFREALHELAQEMEGSDKPQELARVCLGQANRHFGMALGALFVHEHFSAASKAKVQQLVEDIKYILGQRLEELDWMDAETRAAARAKLQYMMVMVGYPDFLLKPDAVDKEYEFEVHEKTYFKNILNSIRFSIQLSVKKIRQEVDKSTWLLPPQALNAYYLPNKNQMVFPAGILQPTLYDPDFPQSLNYGGIGTIIGHELTHGYDDWGGQYDRSGNLLHWWTEASYSRFLRKAECIVRLYDNFTVYNQRVNGKHTLGENIADMGGLKLAYHAYQKWVREHGPEHPLPRLKYTHDQLFFIAFAQNWCIKRRSQSIYLQVLTDKHAPEHYRVLGSVSQFEEFGRVLHCPKVSPMNPAHKCSVW

SEQ ID NO: 4251 - DNA, 439 bp, Homo sapiens
tttttttttttttttttttttttgttcaaaaattttttattaataattcattttcatagctcaaaaaaggatataatcagtagaacaactaaaaacaaaacctcacctctacagaaatagccagggtgtagactttattacataggcccatattaaaaaaaaaaaaacataaactggtttttcataaaattaaccacaatagtgcaagaggttcccctgaatgaaaatggatgatgaatgatggaaaatgtaaggcttggaacagctgaatcattcactggatcttgggttcatccatcctgacccactgaaatttattacagacattacaagaatggagggtgaggaatggtgcttctctgtcatcgcctggctaaaacactgattttgattaatctcttgaatacggtagttttctccaggttctcttgttaagtag

SEQ ID NO: 4252 - DNA, 4340 bp, Homo sapiens
agaaagcggcgcgcggagggtgtgagatggcagacaggtttgcaggaaaccctcagaaagggggctggaggatttagccactctgtcctccccttccggcagtccagggcctcctcccgagcacagcggcgctatggactctccaggatacaactgcttcgtggacaaagacaagatggacgctgccatccaggacctggggcccaaggagctgagctgcactgaactgcaggaactgaagcagctggcgcgccagggctactgggcccaaagccacgccctgcggggaaaggtgtaccagcgcctgatccgggacattccctgccgcacggtcacgcctgacgccagcgtgtacagcgacatcgtgggcaagatcgtgggcaagcacagcagcagctgcctgccgctgcccgagttcgtggacaacacgcaggtgcccagctactgcctgaatgcacgcggcgagggggccgtgcgcaagatcctcctgtgcctggccaaccagttccccgacatctccttctgccccgccctgccggccgtggtggccctgctgctgcactacagcatcgacgaggccgagtgcttcgagaaggcctgccgcatcctggcctgcaatgaccccggcaggaggctgatcgaccagagcttcctggcctttgagtcgtcctgcatgacgtttggggacctggtgaacaagtactgccaggcggcccacaagctgatggtggccgtgtcggaggatgtcctgcaggtctatgcggactggcagcgctggctgtttggggagctgcccctctgctacttcgcccgggtctttgacgtcttcctggtggagggctacaaggtgctgtaccgcgtggcgctggccatcctcaagttcttccataaggtgagggccgggcagccgctggagtcggacagcgtgaagcaggacatccgcacgttcgtcagagacatcgcgaagacggtgtcccctgagaagctgctggagaaagcgttcgccatccgcctcttgtcccgcaaggagatccagctcctgcagatggccaatgagaaagccctgaagcagaagggcatcaccgtgaagcagaagagtgtgtcactttctaaaaggcagtttgtacacttggccgtccatgcagagaacttccgctcggagatcgtcagcgtgagggagatgagagacatctggtcctgggtccccgagcgctttgccctgtgccagccccttctgctgttctcctccctgcagcacgggtacagcctggccaggttctacttccagtgtgaaggacatgagcctaccctcttgctcatcaagaccacgcagaaggaggtgtgtggtgcttacctgtccacagactggagtgagagaaataagtttggaggcaaactgggcttctttgggaccggagaatgctttgtgtttaggctgcagcctgaggtgcagcgctacgagtgggtggtgatcaagcaccccgagctgaccaagcccccacccttgatggctgccgagcccaccgccccactcagccactccgcctcctcagaccccgctgaccgcctctcgcccttcctggccgctcgccacttcaacctgccctccaagaccgagtccatgttcatggcggggggcagcgactgcctcatcgtcgggggaggaggcggccaggcgctctacatcgatggggacctgaaccggggccgcacaagccactgcgacaccttcaacaaccagcccctctgctccgagaacttcctcattgctgccgtggaggcctggggcttccaggaccctgacacccagtgacggcctgtgccacggtgactgagccgtggtggggcggtgggccgaggctgggctgccgcctcgggcagcagagagcagatgaaacccccatgtggtaggcagggttgggggacggcaggaccccatggccaagcctggcgttgcctggacctgctgctgcctctacctggggtttgggctgggcttccccagtccacctgcatctgggtcagagctggagggcctgctgtgcccccagccccacccagagctggcataggaagtaccttcctcctccgtggaggcttccatagcccaaggccttgggagtgtctgggtcttgctgcccctgagcctctctaggcagcctgagcccctggggtgggagtacaacggcagtgggaacgtgcagctaagggtgggcctgtggtgccccctgctggtgccgcatagcatcgcgccctcctgagcagggccctgcagcctggctggctggcgactgaatcccagcgtagatcccgagaacagactggcacccttgggcctgccccctggcggaccccaccccctgtcctgggcgtttgccccagttccctccccaggcctcctgggccacctctcacattaacccttcttggctgcctctgaggctcccctgggctgcgtttgggagctgctgggtgggaggaggagggtgggatttgtgctgggctccacccccagggagggtgggagctggagggggatgtcacatgtccttgtgtttctgcagagcctgaagcttttgctgggcctccctgcgtgttcccatctgaagaggtagccccgggagaggccctcagggaccgacccagaccagcaagctccatttccaggggtctgcccagagaagcctggacccagggggcttctcagctcccctcccttccagcccaggcctccttgagctcctgtagcctctgcagctgcccatttcacctctttgtcattgcaatgacctggggcccagggtcacgcccaagcccctctttgtggcatgctcatctcagtgcagccccaactgcttctctgcaccaggccccgtgccctcccctggccctggccacacagcacctccttggccaccttgcatggatgcatgtcctccctctgtccctcttgtggtgctgtggctggccacgtgtcagggttttctgtgagcctctcaccttacagcctttgggcccctgggcccctgccctgcctgagccctgcgctggccagacgcaggtaggtgccaggggaggccttgcctctgggcactatagggggcagccccctgccttgtgacctccctccatgccccatgacctccttcaactcgtcttgagggtctggtcaccacggaggggagaagggagacacagaggcccaagtggctgttctgggaccatggaagcctgggtcacagaggcaggtaccagcagtcctgcccccacccccgtccctgctggcctccagccagtgccacttggagtcccctgcaccgtgccactttccatccccacaccattgcctgctcctcccatggggctttagcctcccctgaccatctgctcatgtagcctctgactgggcgcacagtggtgcaggaggaaggaccgggaaccctgtgtggctttgggcaagctgacaaacccgtctggaactcagtttccccagctgtgaaatggggccagtccccatgccctgctgtcctcctcacaggactgttgagaggctcgcagggggatggggtgaatccctctcacggggagaggtatgggagggaagtcgccactcatctcagcccaccgcagccctccaggcccccgcctgagcccctgaggccctcatctgtaccgccagctttggtgttcattaaacatggtcttgctgcatcaactccagggctccaagctgagtctgatctcttcagccagaggggcctccgggggcttcctgggcctacagccaagcaggtgtgggaggctgcccgctgtagtgctcacccacattctatgactggaatgctgcaagcctcttccagagggagccctccaggagcagggaagtcatatccgtggaccatttgtaggtttccctctgcaaacttcctgaactgggtggtgatttttctggcgagttaagtccagcaggttctgcgtggctgcccccagggggccccacccgggccttccagtgatctggaccaggaagacggattgctgctgggtcatgatttccacatcatgagcgaagttctttgttttttgtgtgcatgcaaaatattgtttctttaaatttaatatcttttcctaacttttctactaacctagaaggtatgtgtgattattatcttttttattcttatcactgtacttgttagtatctgatattaggtattcccaaatagaacataatttattttgttaatgttctctatttcttcttgattatttattagctttggatgttaaaaattagccaaaagtggctgctctgcctatgaagtagccattctttgttt

SEQ ID NO: 4253 - protein, 595 aa, Homo sapiens
DGRQVCRKPSERGLEDLATLSSPSGSPGPPPEHSGAMDSPGYNCFVDKDKMDAAIQDLGPKELSCTELQELKQLARQGYWAQSHALRGKVYQRLIRDIPCRTVTPDASVYSDIVGKIVGKHSSSCLPLPEFVDNTQVPSYCLNARGEGAVRKILLCLANQFPDISFCPALPAVVALLLHYSIDEAECFEKACRILACNDPGRRLIDQSFLAFESSCMTFGDLVNKYCQAAHKLMVAVSEDVLQVYADWQRWLFGELPLCYFARVFDVFLVEGYKVLYRVALAILKFFHKVRAGQPLESDSVKQDIRTFVRDIAKTVSPEKLLEKAFAIRLLSRKEIQLLQMANEKALKQKGITVKQKSVSLSKRQFVHLAVHAENFRSEIVSVREMRDIWSWVPERFALCQPLLLFSSLQHGYSLARFYFQCEGHEPTLLLIKTTQKEVCGAYLSTDWSERNKFGGKLGFFGTGECFVFRLQPEVQRYEWVVIKHPELTKPPPLMAAEPTAPLSHSASSDPADRLSPFLAARHFNLPSKTESMFMAGGSDCLIVGGGGGQALYIDGDLNRGRTSHCDTFNNQPLCSENFLIAAVEAWGFQDPDTQ

SEQ ID NO: 4254 - DNA, 544 bp, Homo sapiens
cggccgcttgggcgcacttgccgggtcaccttgtcccggaggagaaatggcttccctgaggcaagtgtaacctacattcccagcccaccagcctgacgcccagccagggagagagtaccatggatggcatcattgaacagaagagcatgctggtgcacagtaaaatcagtgatgctggcaagaggaatggtttaattaacaccagaaacttgatggccgagagcagagatggtctggtgtctgtttacccagcgccccagtaccagagccaccgggtgggggccagcacagtgccggccagcctggacagcagcaggagtgagccgatgcagcagctgctggaccccaacaccctgcagcagtcagtggagtcccgctaccggcccaacatcatcctctattcagagggcgtgctgcgctcctggggggacggtgtggccgccgactgctgcgagaccacttcatcgaggaccggtcgcccaccaaagacagcctcgagtacccggatgggaagttcattgacctctcagctgatgacataaaa

SEQ ID NO: 4255 - DNA, 1299 bp, Homo sapiens
ggcgcctgcagacggcccctggaagggctctggtggggctgagcgctctgccgcgggggcgcgggcacagcaggaagcaggtccgcgtgggcgctgggggcatcagctaccggggtggtccgggctgaagagccaggcagccaaggcagccaccccggggggtgggcgactttgggggagttggtgccccgccccccaggccttggcggggtcatggggcccccccattctgggccggggggcgtgcgagtcggggccctgctgctgctgggggttttggggctggtgtctgggctcagcctggagcctgtctactggaactcggcgaataagaggttccaggcagagggtggttatgtgctgtaccctcagatcggggaccggctagacctgctctgcccccgggcccggcctcctggccctcactcctctcctaattatgagttctacaagctgtacctggtagggggtgctcagggccggcgctgtgaggcaccccctgccccaaacctccttctcacttgtgatcgcccagacctggatctccgcttcaccatcaagttccaggagtatagccctaatctctggggccacgagttccgctcgcaccacgattactacatcattgccacatcggatgggacccgggagggcctggagagcctgcagggaggtgtgtgcctaaccagaggcatgaaggtgcttctccgagtgggacaaagtccccgaggaggggctgtcccccgaaaacctgtgtctgaaatgcccatggaaagagaccgaggggcagcccacagcctggagcctgggaaggagaacctgccaggtgaccccaccagcaatgcaacctcccggggtgctgaaggccccctgccccctcccagcatgcctgcagtggctggggcagcaggggggctggcgctgctcttgctgggcgtggcaggggctgggggtgccatgtgttggcggagacggcgggccaagccttcggagagtcgccaccctggtcctggctccttcgggaggggagggtctctgggcctggggggtggaggtgggatgggacctcgggaggctgagcctggggagctagggatagctctgcggggtggcggggctgcagatccccccttctgcccccactatgagaaggtgagtggtgactatgggcatcctgtgtatatcgtgcaggatgggcccccccagagccctccaaacatctactacaaggtatgagggctcctctcacgtggctatcctgaatccagcccttcttggggtgctcctccagtttaattc

SEQ ID NO: 4256 - protein, 340 aa, Homo sapiens
MGPPHSGPGGVRVGALLLLGVLGLVSGLSLEPVYWNSANKRFQAEGGYVLYPQIGDRLDLLCPRARPPGPHSSPNYEFYKLYLVGGAQGRRCEAPPAPNLLLTCDRPDLDLRFTIKFQEYSPNLWGHEFRSHHDYYIIATSDGTREGLESLQGGVCLTRGMKVLLRVGQSPRGGAVPRKPVSEMPMERDRGAAHSLEPGKENLPGDPTSNATSRGAEGPLPPPSMPAVAGAAGGLALLLLGVAGAGGAMCWRRRRAKPSESRHPGPGSFGRGGSLGLGGGGGMGPREAEPGELGIALRGGGAADPPFCPHYEKVSGDYGHPVYIVQDGPPQSPPNIYYKV

SEQ ID NO: 4257 - DNA, 1539 bp, Homo sapiens
gctgactccagtgtcccgagaggcgccgcttcttccgctttctcgtcaggctcctgcaaccccaggcatgaaccaaggtttctgaactactgggcgggagccaacgtctcttctttctcccgctctggcggaggctttgtcgctgcgggctgggccccagggtgtcccccatggcggggccgcgggtggaggtcgatggcagcatcatggaagggggcggccagatcctgagagtctctacggccttgagctgtctcctaggcctccccttgcgggtgcagaagatccgagccggccggagcacgccaggcctgaggcctcaacatttatctggactggaaatgattcgagatttgtgtgatgggcaactggagggggcagaaattggctcaacagaaataacctttacaccagagaagatcaaaggtggaatccacacagcagataccaagacagcagggagtgtgtgcctcttgatgcaggtctcaatgccgtgtgttctctttgctgcttctccatcagaacttcatttgaaaggtggaactaatgctgaaatggcaccacagatcgattatacagtgatggtcttcaagccaattgttgaaaaatttggtttcatatttaattgtgacattaaaacaaggggatattacccaaaagggggtggtgaagtgattgttcgaatgtcaccagttaaacaattgaaccctataaatttaactgagcgtggctgtgtgactaagatatatggaagagctttcgttgctggtgttttgccatttaaagtagcaaaagatatggcagcggcagcagttagatgcatcagaaaggagatccgggatttgtatgttaacatccagcctgttcaagaacctaaagaccaagcatttggcaatggaaatggaataataattattgctgagacctccactggctgtttgtttgctggatcatcgcttggtaaacgaggtgtaaatgcagacaaagttggaattgaagctgccgaaatgctattagcaaatcttagacatggtggtactgtggatgagtatctgcaagaccagctgattgttttcatggcattagccaatggagtttccagaataaaaacaggaccagttacactccatacgcaaaccgcgatacattttgctgaacaaatagcaaaggctaaatttattgtgaagaaatcagaagatgaagaagacgccgctaaagatacttatattattgaatgccaaggaattgggatgacaaatccaaatctatagagtatttgcctcttaaatgatacctcattgatatattgcactatttcataaatactataaaataatgactaggaagtaacttattaaaggctatgacttaaatttgaagatgaagtacagtgttctaggtttgctgagaaggcttcattaaattaatctcactttgaatatctcctgagagatggacaatgaaatatcagttggtggatatgtgtgatagctgatttcaatattgaagtattgaaataaaatattctttacacctgag

SEQ ID NO: 4258 - protein, 366 aa, Homo sapiens
MAGPRVEVDGSIMEGGGQILRVSTALSCLLGLPLRVQKIRAGRSTPGLRPQHLSGLEMIRDLCDGQLEGAEIGSTEITFTPEKIKGGIHTADTKTAGSVCLLMQVSMPCVLFAASPSELHLKGGTNAEMAPQIDYTVMVFKPIVEKFGFIFNCDIKTRGYYPKGGGEVIVRMSPVKQLNPINLTERGCVTKIYGRAFVAGVLPFKVAKDMAAAAVRCIRKEIRDLYVNIQPVQEPKDQAFGNGNGIIIIAETSTGCLFAGSSLGKRGVNADKVGIEAAEMLLANLRHGGTVDEYLQDQLIVFMALANGVSRIKTGPVTLHTQTAIHFAEQIAKAKFIVKKSEDEEDAAKDTYIIECQGIGMTNPNL

SEQ ID NO: 4259 - DNA, 901 bp, Homo sapiens
  misc_feature (410)..(410): n is a, c, g, or t
  misc_feature (447)..(447): n is a, c, g, or t
  misc_feature (493)..(493): n is a, c, g, or t
gacgcttggatccagtaagcgagtgacaatttcaagactgccagccatgcacctctgtatgtttttggcccaagcagcagccgtgggcctatgtgcaaccctcacacgctagctacctcctcctgtgcttggagtggaaagtctgtggggttctctgtctggttctgcaagcttttcacaccatctcttcgctgtctgtctctatgctaggggtttcacacaactctacaccattgcattcatgcttgccgtatccctgactttctgcacaagtgcagggcagagatggcccttttgttttggtgagggagagagggaaacacttgggcacaaagaggggaagggactgtgaatcccagggagcaccctggcagatcccagcggtgttcgaatccaggaccatcttcatntacagctagctgcctccttccctggtaacccttctgnggtgccatccaccacactgcccaacctcactccccgtcccccccanaaagagtgacagtggcctgggctcggcctctcctgatcccaagggaggatgggtgaactgggcctcccgcaaacggcaactcgggctccttattctcaagcgggagccaagggactaacccagggccgggctgagcttttctcccctcccctcatggtttcagaaccggcgacaggctggggcccagggtcaggaggtgcctacaggaaccccgttggggatggatggcctcgtggtccttgatcttctggaggcctccacgagggtaaggtggtggtaaagcatgaggtaggcagtaacacggttggcgaatggttcacgccaaagcacatggacaagaatcttctctctggtggatcagagcccggtgatgaagtgggaagctgctggagatggatggcatgttaa

SEQ ID NO: 4260 - DNA, 464 bp, Homo sapiens
tttttttttcaaattgaatgtatatatttattataatctccaaaataatttcacttggtacaactgcttcttaaaaccatatcaatatcaggctcagaatttaattacaaccaagcaattcacaaaaacactgagcaacaaaacatgcttaatatttctttgagaaagacccttcaaatatgtgtacagcatcactgggagttacacaaaactgttacaaggtgaccattaagtgccccaattctgcacttctgacatacatgaatggctaatgtaaccacgtttgggaatctttttacatctcaaaataaagctttctgatgcaacttgccatccttttaaattttaaaggatattcttggtaattccttaggaaagtaaaactacacacactttcagagaaacaataagctgcttagatttttaaaattttttatattatacacttcaattatgggttattt

SEQ ID NO: 4261 - DNA, 583 bp, Homo sapiens
ctgctgcataacaaggagggaggactgagctggggaaaatctgagaacactgaaagaaaccactcacgttagcatagggctcagggcacacgttgccaccactcatcgcaggatgaggatacagagaggatcttccagaggggcagagccaaaatgagaggtaccaagcataagggcagcagaggtggagtagggaggaggcaaggagggggagaaccatcaatacgaatacgaggtccgaatgcggaccaactgataccattttctgttgctcagcaccctctaagcttgggtgtttcacttaatgtattcgacagtgttcatcacaggctagggaggtgagcttggaaaagcactgtagtttgtcagagactccagtttacatccagaaaggccatgaacataggacacgcttctgtctgtagaggcttcatatgagacccagaaagtctatcctatggcaagtctgacctctcctggcaatgctcagttctgattttcctgcttaaaggtttggagtctccattaaaatgggtttgtgggcaaatagtcctccttaatcctggccatgttacctttgggg

SEQ ID NO: 4262 - DNA, 321 bp, Homo sapiens
ttttttttttttttttttacagaggaagacgcttataatatgggaagttctgtccacagttacctgagatgttagggttagttgagcttaaaatagatacttccaattagaagcagccaaatataattttttatgtgagaaaataactgcaatgctagtatgaccctttattttcctagggctaaagtcagaaaacagaaacaaatataaaagtatcacattcatgtcaatggcttagtgaagacaggaccttattatcctttaaatgctgcttaaaatgctcccagactcgcccgtttatctgctcctcttccagcagag

SEQ ID NO: 4263 - DNA, 456 bp, Homo sapiens
ttttttttttttttttttttttttataaaacacatcacaattttattgcttgaagaatacagcatatgaaatcacaagaatgtcaaaatgaaaagtcactaggcttcaaacgtataatacattatcagatgcagtaaaatattaacctgaactctgcatcagaaaaaaaaaaaaagggtgtggaaaatatctaagttgtttacttaagaaacagatatacttaaaatagaaagtataaggatgttacagtacaaattagaaaagccaacacgtattaacttatcgttctagactagactacctttgggacttaaactttttaaaaaaacaatttcttctatctcatccaaatgcacttcatgggtatgacatccatgaagtaacttcaacttaaaacattcagcaaaattaaccttttcacttcatgggggaagtatatttaataaatgtataaca

SEQ ID NO: 4264 - DNA, 617 bp, Homo sapiens
tttttttttttttttttttggtcaagcaattttttccctttatttttgttaaataagattccagaaagtatagtgcaaacactcagtagaaaagttgcaattaagaaatgtacattcacatttaacatttcagtccattcactttttttaaaataaaaataggacaaattattcaattacttgtctcaatttaacaatcttgaaaaagactggaaggtaccctacagtgttcagttgacataaaaatagacccgtattgatcatacaaatctatcatgagaagttacccagtgagagtgagttattgtaattctgaatgtactcatcgtgtttctcacttctacagaagcatcctcagtgagttgtattgtgcgagaaaatgacacccttgcccacatcactctccattccatagagggacacaaccctatctagccaaacccagaagaacgcaggcgcttacacaacttttctcggacagtcgagaaaatccaaaagtgggctttgggcttaccttaaataggaatggaatgtaccactacgagatggtcatcataataaggacattgttgtttgagcggggggtgtgcaatcagtataaatgaggatggcggagg

SEQ ID NO: 4265 - DNA, 431 bp, Homo sapiens
  misc_feature (2)..(2): n is a, c, g, or t
angcttttttttttttttttttttccatatccaactgaagaaatttatttacttttttctaggtacatagatgacataattatagacacgttttgatacataggaaaacccttccgtccacctctctttatgctaaatgaatcatcacaataatttttacaatttttaaaacaatacacagctttcttgggctgaagcaattgcaagaacatattggtactggtatattacagctacttacaatgtttttaagaacagcaatggagaaaaataagttatttaaatattgatttcatatacagaaagtgcaatgttgttagttgttatataacttgctcgacagtttcttttctctatcaattttaaatcaagataactcggactcagactattatatttttttctgaaaataatacagtacacacatggca

SEQ ID NO: 4266 - DNA, 313 bp, Homo sapiens
tttttttttttttttttttatttttatattatttatttattctttgttagtttttgtgaaaagtaaatgaaatgatgtttgtaagaggatggtgctgtgtctggccagtagtcagtattgagcgcatgtaaaaaagaagaaacactaaacttctctttgtaataaattaattccagatacatgtttttggagactgactatgaggggaggtccacaggctctttgactaggggagaaggtccattattgttgcttctccagattcacttgagataaaaacaagtagagaaggcttcagtttcacagagggtcc

SEQ ID NO: 4267 - DNA, 445 bp, Homo sapiens
tttttttttttttttttttttttttttttttgatggtggaaatcattttattctcatacacaggttattacagcacaattaggaagagacaatcacaactcacacaatgctatattcaaattatgccaaagtcccaacatattcatttcatttgcaagttaattcctaaaagatcagagcagagtgatacacaagtttattaacacagactacaacgtcaatgaagcctcctggcattgtcggaaatagaaaacatgtataaaaatcttcgaaatgcaggttaaaatgcaaatccaagtgaaaggaaaaagcactactgtgaagcctaacagcaattatttcccgtcaaaggaggtttgtgtccagctggagagaaggcctggtggacagaagacaaaggaaggcaaaattcctaagggagaaattcaaaaaatgatgggggtgc

SEQ ID NO: 4268 - DNA, 416 bp, Homo sapiens
gcagggcgcgggcatccggctgcaggaccaggtggtgatcatcgacgaggcgcacaacctgatcgacaccatcacgggcatgcacagcgtggaggtcagcggctccccagctctgccaggcccattcccagctgctgcagtacatggagcgatacgggaagcgtttgaaggccaagaacctgatgtacctgaagcagatcctgtatttgctggagaaattcgtggctgtgctaggggggaacattaagcaaaatcccaatacacagagtctgtcacagacagggacggagctgaagaccatcaacgactttctcttccagagccagatcgacaacatcaacctgttcaaggtgcagcgatactgtgagaagagcatgatcagcagaaagctctttggcttcactgaacggtacgga

SEQ ID NO: 4269 - DNA, 541 bp, Homo sapiens
  misc_feature (7)..(8): n is a, c, g, or t
  misc_feature (66)..(66): n is a, c, g, or t
  misc_feature (234)..(234): n is a, c, g, or t
ggcacgnngggaggcccagggagaacggggaagggacatttagtttgagacggtgctgagataggntcatgaaggaagaggtgaagggaattcctgtaagagtggcgctgcgttgtcgccctctggtccccaaagagattagcgagggctgccagatgtgcctttccttcgtgcccggagagcctcaggtggtggttggtacagataaatccttcacctacgattttgtatttnatccctctactgaacaggaagaagtcttcaatacagcagtagcgccactcataaaaggtgtatttaaaggatataatgcaacggtcctggcctatgggcagactggctctggaaaaacctattcaatgggaggtgcatatactgcagagcaagagaatgaaccaacagttggggttattcctagggtaatacaactgctcttcaaagaaattgataaaaagagtgactttgaatttactctgaaagtgtcttacttagagatttacaatgaagaaattttggatcttctatgcccatctcgtgagaa

SEQ ID NO: 4270 - DNA, 1108 bp, Homo sapiens
cacacctcatacgcagccacatctgccctattctccatgctttccagcttgcctgcccttcctcatctctccctgcctgtgcagacctccacccttctttcctccacccctccatcccccaatgcttgtagaccttccattcattccgtctcatcgtgcgtggtctctgatcgtccatcacctgaccttctccaggactgtcttctcacccttccccactccctggtccccgggagcagctccttctgcccgactcactcacagtgcagggaaaggaggcagggaaaagaccaggattctgtgagttctgaggttgccacacacaaagaagctgtggtttctctgcctcggccactgatgagactaaaactggcttccccttggagacggcagatttcaggctgatccctgcttaagccctctcatccccacgctggtcctggtattgatacaagacccagctggtgacaaagcctccaatcctgggggtccacgagcctgggcctgacattcccagaactaccgccagtggcgccaggcccccacagtctgtggccgtggtcttagcccccagttccactctggatgggcctgtgacaccccaaagagaagaaggggactctggatagggtccccacatccagggcgtggggagaccattggcatttgggaaccattttccttcgaacggcttccccttgagctgagcattctgcttgctgcagtagacgggtcgccttttgcccataccgaaattttctgaaattaaatcgcacacccccaccatttcctctccctggggatctggaggaacatcatacatagtaggtgaatcgttttgtagagtgaagaatgctaatgtaaagcaaatagtcacccacgttccttgtaaatccaaatgtttctatattgtagctttgcttaaaatgggggtcggccccaactgcatcctcctctttggcgggctggggagcggcccccagccgggacgggagggcagcgaccccgaggcctcgtggacgtgggagagagtgtggtgggaagtcttgagcggaggaggggatctgcccttctccactcctctcttggatccgcctcggtttcctgt

SEQ ID NO: 4271 - DNA, 1089 bp, Homo sapiens
caagaggtgctgtttcatgggggcagcagcttcacagtgctgcgttgcaccagctttgcactggagagctgtgcccaccctgaccgccactactccttagctgacctgctcaagtacaacttctacctgcccttcttcttcttcgggcccatcatgacctttgatcgcttccatgctcaggtgagccaggtggagccagtgagacgcgagggtgagctgtggcacatccgagcccaggcaggcctaagcgtggtggccatcatggccgtcgacatcttctttcacttcttctacatcctcactatccccagcgacctcaagttcgccaaccgcctcccagacagtgccctcgctggcctagcctattcaaacctggtgtatgactgggtgaaggcggccgtcctctttggtgttgtcaacactgtggcatgcctcgaccacctggacccaccccagcctcccaagtgcatcaccgcactctacgtctttgcggaaacgcactttgaccgtggcatcaacgactggctttgcaaatatgtgtataaccacattggtggggagcattccgctgtgatcccagagctggcagccacagtggccacatttgccatcaccacactgtggcttgggccttgtgacattgtctacctgtggtcattccttaactgctttggcctcaactttgagctctggatgcaaaaactggcagagtgggggcccctagcacgaattgaggcctctctgtcagtgcagatgtcccgtagggtccgggccctgtttggagccatgaacttctgggccatcatcatgtacaaccttgtgagcctgaacagcctcaaattcacagagctggttgcccggcgcctgctactcacagggttcccccagaccacgctgtccatcctgtttgtcacctactgtggcgtccagctggtaaaggagcgtgagcgaaccttggcactggaggaggagcagaagcaggacaaagagaagccggagtaggagggagcgggtagagggatgggctctgctcagctattcttgggccagatggggcctgaccgatagaataaaagacttttctacaac

SEQ ID NO: 4272 - protein, 333 aa, Homo sapiens
QEVLFHGGSSFTVLRCTSFALESCAHPDRHYSLADLLKYNFYLPFFFFGPIMTFDRFHAQVSQVEPVRREGELWHIRAQAGLSVVAIMAVDIFFHFFYILTIPSDLKFANRLPDSALAGLAYSNLVYDWVKAAVLFGVVNTVACLDHLDPPQPPKCITALYVFAETHFDRGINDWLCKYVYNHIGGEHSAVIPELAATVATFAITTLWLGPCDIVYLWSFLNCFGLNFELWMQKLAEWGPLARIEASLSVQMSRRVRALFGAMNFWAIIMYNLVSLNSLKFTELVARRLLLTGFPQTTLSILFVTYCGVQLVKERERTLALEEEQKQDKEKPE

SEQ ID NO: 4273 - DNA, 8056 bp, Homo sapiens
ctgctctccctgagcccgctcccgagcgctgctttcccgccgcgggtgggcttcgcagcctcaggccagccgcggcccttggcccgctgcagccccggccctccaccttccccgtgcaggggcggcccggccagtgtcgctcatcccgggacgctcccttctcccacccaggactgccccgcggagctggcttggacacccaactttgccacctcgagggtcgtctctgctgggcgcgaacctgcccacccaccggttggccgcgcgctcggggaccgtgctcgtggcccccaagccggtgcccccattctggaactcagcgagtagggggcggctctggggaagtggcagggggcggctgcagctgctgcctccacttccctagccaggtgctgaagaggatcctcggagccgctctggcccccaggcgctggatgactggcaccagcgctcctcgcacctgtgttggtgtgtgagacttgggctggagtgcccacgtggctgtggagtcagtgtgattcatgattgaggaaacgcgtcctccatcctctctctccttggcactttccacacatgaggagaagaagagcttctgtttagaagacacgtgcccagagtcagaggccccttgcccaccatgaagggaacctgtgttatagcatggctgttctcaagcctggggctgtggagactcgcccacccagaggcccagggtacgactcagtgccagagaaccgagcatccagtcatctcctataaagaaattggcccctggttacgggagttcagagcgaagaatgctgcggatttctcgcagttaacatttgacccaggacagaaagaacttgttgtaggagcaagaaactacctcttcaggttacagcttgaggatctgtctcttatccaggctgtggaatgggagtgtgatgaagctaccaaaaaggcctgttacagcaaaggcaaatcaaaggaggaatgtcagaactacatccgggtgcttctggtgggtggcgaccggttattcacctgtgggaccaatgcattcacgcctgtctgcaccaaccgctcgttgagcaacctggctgagatccatgatcagatcagtggcatggcccgctgtccctacagtccccagcacaattccacagcgctcctcacagctggtggggagctctatgctgctacagccatggattttccaggacgtgatcctgccatttaccgaagcctaggcattttacctcctctccgcacggcgcagtacaactccaaatggctcaatgagccaaactttgtgtcatcttatgacatcggaaattttacctacttctttttccgagaaaatgcagtagagcatgactgtgggaaaacagtgttctccagagctgcccgggtgtgcaagaacgatattggtgggcgcttcctgctggaagacacctggaccacattcatgaaggctcgcctgaactgctcccgtcctggggaagtccccttttactacaacgaattgcagagtactttcttcctgcctgagctggatttgatctatggcatctttaccaccaatgtgaacagcattgcggcctcagctgtgtgcgtcttcaacctgagcgccatcgcgcaggccttctctgggcccttcaagtaccaagaaaactcgcgctcggcctggctaccgtatcccaacccaaacccccacttccagtgtggcaccgtggaccagggcctgtacgtgaacctgaccgagagaaatctgcaggatgctcagaagttcattctggtgcatgaggtggtacagccagtgaccacagtgccctccttcatggaggacaatagccgcttttcccacgtggcagtcgacgtggtgcagggcagagaagcgctcgtccacatcatctatttggccacagattacggaaccattaagaaagtgcgggtacccctgaatcagacctcaagcagctgtttgctggaagagattgagctcttccctgagaggcggagggagcccatcaggagcctgcagatcctgcacagccagagtgtcctgttcgtggggctgcgggagcacgtggtcaagatccccctgaagaggtgccagttctaccgcacacgcagcacctgcattggggcccaggacccttactgtggctgggatgtggtaatgaagaaatgcacaagcctggaggagagcctgagcatgacgcagtgggaacagagcatctctgcgtgtccgaccaggaatctcaccgtggatgggcactttggtgtgtggtctccgtggacgccttgcacgcacacagatggcagcgccgtgggatcctgcctctgtcgaacccgctcctgcgacagcccggccccgcagtgtggtggctggcagtgcgagggccctggcatggagatcgccaactgttccaggaacggaggctggactccctggacctcgtggtctccctgcagcactacctgtgggatcggcttccaggtgcggcagcgctcctgcagcaaccccactcccaggcacgggggccgggtgtgcgtgggacagaaccgcgaggaaagatactgcaatgaacatttgctatgtcccccacacatgttctggacaggctggggtccttgggaacggtgcacagcccaatgcgggggtggcattcaagctcgccgcaggatctgtgagaatgggcctgactgtgcaggctgcaatgtggagtaccagtcttgcaacaccaacccgtgtcctgagctgaagaagaccacgccctggacaccctggacacctgtcaacatctctgacaacggcgaccactatgagcaacgattccgatacacatgcaaagcccgcctggctgatccgaatttgctggaagtgggaagacagagaatcgaaatgcggtactgttctagcgacggcaccagtggctgctccacagatgggctttctggggatttcctgcgtgctgggagatactctgcccacacggtcaacggggcttggtcagcctggacgtcgtggtcacagtgcagccgtgactgcagcaggggcattcggaaccggaagcgtgtttgcaacaaccccgaacccaagtatgggggaatgccttgccttggcccatctctggaataccaggaatgcaacactttgccctgcccagtggatggcgtgtggtcttgctggtccccctggacaaaatgttcagcaacatgcggcggtggacactatatgaggacccgctcttgctccaatccagccccggcctatggaggggacatctgcctggggctgcacacagaagaggcactctgcaacacgcagccctgcccagagagctggtcggagtggtcggactggtctgagtgtgaagcctctggcgtccaagtccgcgcccgccagtgcatcctcctgttccccatgggcagccagtgctccgggaacaccacggagagccggccgtgtgtgtttgactctaatttcatcccagaagtatctgtggcaagatccagtagcgtagaagagaaaaggtgtggagagttcaacatgttccacatgatcgccgtggggctgagcagctccatcctcggctgcctcctcaccctgctcgtctatacttactgccagcggtaccagcagcaatcccacgatgcgactgtcatccaccccgtctcacctgccccccttaataccagcataaccaaccacatcaacaaactggacaagtacgactcggtggaggccatcaaggcatttaacaaaaacaacttgatcctagaggaaagaaacaaatacttcaacccacatctcactgggaagacctattctaatgcctactttacagatctcaataattatgatgagtactaacagctttcatgttttgggcttcttgtaaatccccagttcctcaaggcctgtgccccatgactgcccatgtttctgaggcttcagagtcgaagtttggatacatttcaagtgcatttcaagccaccagagtgtcccattggtgccaaaaatacacgtctttaaaagcaacaaaaattgaaataagacatcgtgaaaatcttgaccattgttgattgagccagggtggtgaagtttttaattggtgttcatcctatttttctgacaagtccattggtttgttttttgagcattattttataaatgtgccacccacattggaaggagtctttctttagaactttggagtgtaaatcttcatgatgttgtaaattcaagaaaataggcactttctctgaaagacctgctccttccacaagaagtgcataggtccataatatttcataaaatgaagaaaaagaatgtggccaaacaattattcaccatggattgcccaactttccaaatctggataaagctgtgggattcttggaagcagcttgagtgttttcatcttgcctgggaagcccaggaattccacctggtccacaccggcagaagttacagtagactgtgaggcaccccaccttgctcctgatgcagtttctgtgccattgctggtgctggtggaggcagcggagcagaggctcaggcacaatgaagcgtggatgtgttctgcaggttgctgcaaaactcaccttattctgacttttggatttcatggcattccaggaagctccttgccatgctgttggcctggaagtccacctgtctggtccatagtgacgtcctgaagagccagtctgtaaaataaccaaccacttacttagcgtttggatagactccatgccttctctctccctgcaaagaaaaatcttgaacatttatgatgtcaattagtgaaagtattgaaaatactaaattataactaaaagcaactttttatgttattgaaaatattgaaagaactgatattaatgataatcattttatttttcatctctctgatatacccaatgtgtggcaatcagcccctaccatgagcattaatgccatgtaaagctggctttctggagtctgccaggtccacacgaagtgctacccccagtttctgctgttacttgctgcctccaggccaggggagcaggagatgctcagctctggtgccttttcttttatttcagtgctgccttcccacccacccagtccattcaccctcacctctccctgcatggaggcaacagcatttccaagatgtaccttgggaagtcaggatagctggaagtaagggtttttggggatccctgtggtctcttcactgatcatcgataagcatttaagagtgtgctaacaccattcacagaggtccctggaaaaaaatatataattttctcacaaacaaccaatacataacctatggcagttggttgaataattattgaaaaaaagaacacgactgaaaaagttcatctgatgcctctgagcatgtgataaagtcctgggtagacatggaaacgtgttcttacaaatgaaccttcggatctatgaaagaaaatatagtagggggactaaggaacatagaattttattagcatatgtgattttacccttatctttgtttctaatttaaagaaacaatttcagaaagtgttagaagaattctatgtttaataatgaatattgttgagttcaaaatattctcatatacccagatttacagagatgacacagtattgaaatggcaggtgggctctgtaagttatttggggattaatgaaatccagggtcttggcaggggggactcaatgtggccctctcactcatccctcatatgtcaagagtccttcctgtcttatatgcacatgctccaaggtccatactcagtagggggaaatctagccggatggttccccaattgttcctcggctggattttcatcatcagaaatttccaactcatctcatcagttttcttgtaagaaaaaaacatttttcactttgtagcacaattttagttatttttgagtcttcttccctaatagtttgtaagcttaaagggacaattttaattttcccctggttaaagagggattctaatatttccaagaatgttttccactggaattgatgggaaatggtttctaaatggcatcgaagctggtctttaatgatcttttgcaatgacttgggaaaaacaccctccctcactacaggatcttcatgttgttaataatataaacaaacctttgaaattagcattgcaaaagaatcccatttttgtttcgtaccacactgttcaaaggaaaattgtttatctctcttcctttctctctctctcttatttgacagaatagcaagtgtttagataatttcagatatattcctaagtattttaccagctgtggaataagttgtgtttgtccatcactgtgtagctaccgttcacatgttctggctctgtactccacgcttatcgcgtgaaccctcacatgttggactttcacagtgtgatctctcacctgtcttggaaactccttcataaagccgctcttccttaggcctgggctgtttggaagtcctggtgaaactttgcggttcacattttaaattcctgaatgaccttttcattctctctttctttatctttgtttttgtccttcattccctccttttgttcttccttcctgcctttcacgtcacctacttatccgactatttcctccatttgcttcttttctatttgccatcacctgtgacccgagtggaacaaaaaccaacacatagttttaagctacacctttctgcacctgatgtaaaatgacattaatccactatttaacttctaaaattatttctgaatacagttgcagataggctggttttcatgaggaagctcgcttggctttagtcttacatttaaattctttgaaagtggctcccagtgctattcagggtcctttcttgaggccagactcatcaccatctactattgattttacagtgcactgacagtttacaggaaggagaagaacagaatttctgcacactacacaacatgtgggcttcctgtagctccagggacatgtagctttggtgaaactggggttttgtaacctctgaatgatatggacttagtgaattctaaggaactcagggggcacgtggtcaggctccaccgcacagaagagccacagtctccagactcatggcgttccctccagaactccccattcccctctgagcatatttctatgctgctgcttcttgtgacttacatgaggcatctcagcttcttcatgtttgtagggatggttccctaagcctgttcaagtaggctctcactagagttaccattcatatttgagaagaaaagaacatttattaaatgtatgtgtggggctgaggttctaaaggaattgaaaagagacgataaacattgaatgagggtgagggcatccctgctggggagaaacctctgtcccctaggaagagtccgttcatgtcatgtggtttgggatgaaccaggggtctgcccccatcgggtcacaggtgatgccaaatagaaaagaagcaaatggaggaaatagtcggataagtaggtgacgtgaaaggcaggacctggtcaccccagcaagtgctatggacagttcccggaaacggttgcccacttcacaggtccatgggtctgacccttggactctgccaggatcaactgcccagagtgccagagttttagccaaaggtgtacttacttccttatttatctccaaaaggatggaaactgtgggagtcaaagcctattttgctgagtgttcccactggatcctctgtagaattagcaggtcatgctgtcaaaatcatggacaaaggctgggtgcagtggctcatgcctataatcccagcactttgggaggccaaggtgggcggatcacctgagctcaggagtttaagaccagcctgggcaacatggggaaactccatctctacaaaatatacaaaatattagccagccatcgtggtgcgtgcctgtggtcccagtttcttgggaggctgaggcgggagtatcatttgagccaggaggttgaggttgcagtgagctgagatcacatcactgcactccatcctgggtgacagagagagaccctgtctcaaaaaaaaa

SEQ ID NO: 4274 - protein, 1074 aa, Homo sapiens
MKGTCVIAWLFSSLGLWRLAHPEAQGTTQCQRTEHPVISYKEIGPWLREFRAKNAADFSQLTFDPGQKELVVGARNYLFRLQLEDLSLIQAVEWECDEATKKACYSKGKSKEECQNYIRVLLVGGDRLFTCGTNAFTPVCTNRSLSNLAEIHDQISGMARCPYSPQHNSTALLTAGGELYAATAMDFPGRDPAIYRSLGILPPLRTAQYNSKWLNEPNFVSSYDIGNFTYFFFRENAVEHDCGKTVFSRAARVCKNDIGGRFLLEDTWTTFMKARLNCSRPGEVPFYYNELQSTFFLPELDLIYGIFTTNVNSIAASAVCVFNLSAIAQAFSGPFKYQENSRSAWLPYPNPNPHFQCGTVDQGLYVNLTERNLQDAQKFILVHEVVQPVTTVPSFMEDNSRFSHVAVDVVQGREALVHIIYLATDYGTIKKVRVPLNQTSSSCLLEEIELFPERRREPIRSLQILHSQSVLFVGLREHVVKIPLKRCQFYRTRSTCIGAQDPYCGWDVVMKKCTSLEESLSMTQWEQSISACPTRNLTVDGHFGVWSPWTPCTHTDGSAVGSCLCRTRSCDSPAPQCGGWQCEGPGMEIANCSRNGGWTPWTSWSPCSTTCGIGFQVRQRSCSNPTPRHGGRVCVGQNREERYCNEHLLCPPHMFWTGWGPWERCTAQCGGGIQARRRICENGPDCAGCNVEYQSCNTNPCPELKKTTPWTPWTPVNISDNGDHYEQRFRYTCKARLADPNLLEVGRQRIEMRYCSSDGTSGCSTDGLSGDFLRAGRYSAHTVNGAWSAWTSWSQCSRDCSRGIRNRKRVCNNPEPKYGGMPCLGPSLEYQECNTLPCPVDGVWSCWSPWTKCSATCGGGHYMRTRSCSNPAPAYGGDICLGLHTEEALCNTQPCPESWSEWSDWSECEASGVQVRARQCILLFPMGSQCSGNTTESRPCVFDSNFIPEVSVARSSSVEEKRCGEFNMFHMIAVGLSSSILGCLLTLLVYTYCQRYQQQSHDATVIHPVSPAPLNTSITNHINKLDKYDSVEAIKAFNKNNLILEERNKYFNPHLTGKTYSNAYFTDLNNYDEY

SEQ ID NO: 4275 - DNA, 5252 bp, Homo sapiens
cacgggggaagcaggcgggccccccagcacccgggaggccgagctgaagctgcggctaaagctggtggaggaggaagccaacatcttgggccggaagatcgtggagctggaggtggagaaccgtggcctcaaggcagagatggaggacacgcggggccagcaggagcgggagggcccgggtcgggaccacgcacccagcattcctacctcacccttcggtgactccctggagtcctccactgagctccgccgccacctgcagtttgtagaagaggaagcggagttgctccggaggtccatctccgagatcgaagaccacaaccggcaactgacccacgagctcagcaagtttaagtttgagcctccccgggagccgggctggctaggagagggtgcaagtcctggtgccgggggtggggcccccctgcaggaggagctgaagtcagccaggctgcagatcagcgagctcagcggcaaggtgctcaaactgcagcacgagaaccacgcgctgctgtccaacatccagcgctgcgacctggcagcccacctggggctgcgtgcccccagtccccgggacagcgatgccgagagtgatgcgggcaagaaggagagtgatggggaggagagccgcctgccccagcccaagcgggaagggcctgttggcggggagagtgactcggaggagatgtttgagaagacgtcgggcttcgggagcgggaagccatcggaggccagcgagccatgccccacggagctcctgaaggcccgggaggactctgagtacctagtgaccctaaaacacgaggcccagcggctagagcggacggtggagcgcctcatcacggacaccgacagcttcctccatgatgcggggctgcggggtggtgcgcccttaccggggcctggcctccagggcgaagaggagcagggtgagggggaccagcaggagccccagctgctggggaccatcaacgccaagatgaaggctttcaagaaagagctgcaggccttcctggagcaggtgaaccgcattggggatggcctatcccccttgccccacctcacagagtcctctagcttcctctccactgtgacttccgtgtcccgggactcccccatcgggaacctggggaaggagctgggcccagacttgcagtccagactgaaagagcagctggagtggcagctcgggccggcccgaggggacgagcgggagagcctgcgcctccgagccgcgcgggagctgcaccgccgcgcagacggggacaccgggagccacgggctgggaggccagacctgcttcagcctggagatggaggaggagcacctctatgccttgaggtggaaagaactggaaatgcacagcctggctttgcaaaacaccctccatgagcgaacctggagtgatgagaagaatctgatgcagcaggagctccggtccttgaagcagaacattttcctcttctacgtcaaactcaggtggctgctgaaacactggcggcaagggaagcagatggaggaggaaggagaggagttcactgagggtgaacatccagagaccctctccaggctcggggagcttggagtccaggggggtcaccaggcggatggcccagaccacgacagtgaccgaggctgtggctttccagtgggggagcactccccacactcccgggtgcagattggagatcacagcttgcggctgcagaccgcggacaggggacagccccacaaacaggtggtggaaaaccagcagctgttcagcgccttcaaggccttgctggaggacttccgtgcggagctgcgggaggatgagcgtgcccgactacggctgcagcagcaatatgccagcgacaaggcggcctgggacgtggagtgggccgtgctcaagtgccgtctggaacagctggaagagaagactgagaacaagttgggagaactaggctcctccgctgagagcaagggggccttgaagaaggagagagaggtgcaccagaagctcctggcagacagtcacagcctggtcatggacctgcgctggcagatccatcacagcgagaagaactggaaccgggagaaggtggaacttctcgaccgcctggacagagatcggcaggagtgggagcggcagaagaaggaattcttgtggaggatagagcagttgcagaaagagaacagtccccggagaggtggcagtttcctctgtgatcaaaaagacggcaacgttcgcccctttccccaccagggaagcctccgcatgccccgtccagtggccatgtggccttgtgcagatgctgactccatcccgtttgaagaccggccgctgtccaagctgaaggagtcggacaggtgctcggccagtgagaatctctacctggatgccttgtccctggatgacgagccagaagagccaccagcccacaggcccgagagggagttcaggaaccgcctccctgaggaagaagaaaatcacaaaggaaatcttcaaagggcggtgtccgtgtcctccatgtctgagttccagcgtctaatggacatctcccccttcctgcctgagaagggcctgccgtccaccagcagcaaggaggatgtcaccccacccctgtctccagacgacctcaagtacatcgaggagttcaacaagagctgggactacacacccaacaggggccacaatggtggggggccggacctttgggccgacaggaccgaggtggggcgggcagggcacgaggacagcacagagcctttccccgactcctcctggtacctaaccacaagtgtcaccatgaccacggacaccatgaccagcccagagcactgccagaagcagccactgcggagccacgtcctcaccgagcagtcggggttgcgcgtgttacacagcccgcctgccgtgcgcagggtcgacagcatcacggcggcaggtggtgagggtccctttcccacaagcagagccagagggagcccgggagacaccaaggggggccctccagaacccatgctcagcaggtggccttgcacctcccccaggcactcccgggactatgtggagggggcacggcgcccccttgatagtcccctctgtacctccctggggtttgcctccccactgcacagcctggagatgtccaagaacttgagtgatgacatgaaggaggtggccttctctgtcaggaatgccatctgctccggccctggcgagctgcaagtcaaggacatggcctgccagaccaatgggtcccggacgatggggacccagactgttcagaccatcagtgtgggcttgcagactgaagccctgcgtggcagcggtgtcaccagcagcccccacaagtgtctcactccaaaggctgggggcggtgctacacccgtgtcgtctccttcccggagccttaggagcagacaggtggcccctgccatcgagaaggtgcaggccaagtttgaacgcacatgctgctcccccaagtatggttctcccaagctgcagaggaagcccctccccaaagccgaccagccaaataacaggacgtcaccagggatggcccagaaagggtacagtgagtcagcctgggcccgctccaccaccacaagggagagccccgtgcacaccaccattaatgatggcctctccagcctcttcaacatcattgaccacagccccgtggtgcaggaccccttccagaaggggctgcgggccggcagtcggtctcgctcagcagagccccgaccagagctgggcccaggccaggaaacaggcaccaattcccgaggaaggtcgcctagccccattggggtggggtcagagatgtgcagggaggaagggggagagggcacgccagtgaagcaggacttatctgctccccctggctacaccctcactgagaacgtggcccggatcctcaacaagaagctgctggaacatgccttaaaggaggagaggaggcaggctgcccacgggcccccgggtctccacagtgacagccactcgctgggggacacagccgagccagggcccatggagaaccaaactgtcttgctaactgccccctggggactctagccctgcctgcctcacgctgaactaccttgttctgcactagctccatccctagagccctgcttctccaggcccgagagaccagcaaaccgtcgccctccgtcccgttgggccccacattcccccactgcctcacagcctcagtcacccggagacccgacgtccttggaggagcatggtggcgaggagccgcccgaggagcagccacaccgagatgcaagcttgcatggattatcacagtataattcactgtaatttgcataaccacaccatcaccatgaacaaaactctgcccaacaggagagatctagttttctcaaggtcaaagaatgttttttaaaaacacaaagctgctgaatgttcaacctgtgaaactgagatgtttctagaatgaaacagtaaatgtgcctgtaataacttaatttttttcatagctcagaaaactatttttgtctccatcttttttacacacagtatattaaacgaaaacgtaaataaggtataaatagatttaaaaaataaaagttttaaaaaatgtacattttaagagattctgaacaccctcgctgtcaatacctgactgcctctgttaaatttgcactgttacattttggttcagtttatttccatgttgaattagagtggattaagttaattttattttgtcagtgttactgttttttatgaattttttaatgcttcagactgtctgattcagtgaactttttgtagtgaaaaagccatgaagccagtagacaagacagatattctgtatgctggaggggatacaggatgattttgaaaaggtacaaagtcctcagtgggcttagaaaattcactgtatgatccttatattatcctacttggcttgcacgtcttcgggtgcatgtatataccgctactgtgtcctcgccatcacctaaatgtgactcagtctgttccactgtaatatgttgtgaatttccttgtactgtacttttattgttggtcttcttgcatcgatgatccaacagcaacaccatttttaaattattgtgaaaagattaactggcaatgtacagagtttactcaaagttttcttaagggaaaacactacaaaaagtcacaaggataccaaatggaaacacatgatgatgcctctgggtctgtatgagaccgtgatgaagtagaaataaagcccttctgagatggc

SEQ ID NO: 4276 - protein, 1353 aa, Homo sapiens
TGEAGGPPSTREAELKLRLKLVEEEANILGRKIVELEVENRGLKAEMEDTRGQQEREGPGRDHAPSIPTSPFGDSLESSTELRRHLQFVEEEAELLRRSISEIEDHNRQLTHELSKFKFEPPREPGWLGEGASPGAGGGAPLQEELKSARLQISELSGKVLKLQHENHALLSNIQRCDLAAHLGLRAPSPRDSDAESDAGKKESDGEESRLPQPKREGPVGGESDSEEMFEKTSGFGSGKPSEASEPCPTELLKAREDSEYLVTLKHEAQRLERTVERLITDTDSFLHDAGLRGGAPLPGPGLQGEEEQGEGDQQEPQLLGTINAKMKAFKKELQAFLEQVNRIGDGLSPLPHLTESSSFLSTVTSVSRDSPIGNLGKELGPDLQSRLKEQLEWQLGPARGDERESLRLRAARELHRRADGDTGSHGLGGQTCFSLEMEEEHLYALRWKELEMHSLALQNTLHERTWSDEKNLMQQELRSLKQNIFLFYVKLRWLLKHWRQGKQMEEEGEEFTEGEHPETLSRLGELGVQGGHQADGPDHDSDRGCGFPVGEHSPHSRVQIGDHSLRLQTADRGQPHKQVVENQQLFSAFKALLEDFRAELREDERARLRLQQQYASDKAAWDVEWAVLKCRLEQLEEKTENKLGELGSSAESKGALKKEREVHQKLLADSHSLVMDLRWQIHHSEKNWNREKVELLDRLDRDRQEWERQKKEFLWRIEQLQKENSPRRGGSFLCDQKDGNVRPFPHQGSLRMPRPVAMWPCADADSIPFEDRPLSKLKESDRCSASENLYLDALSLDDEPEEPPAHRPEREFRNRLPEEEENHKGNLQRAVSVSSMSEFQRLMDISPFLPEKGLPSTSSKEDVTPPLSPDDLKYIEEFNKSWDYTPNRGHNGGGPDLWADRTEVGRAGHEDSTEPFPDSSWYLTTSVTMTTDTMTSPEHCQKQPLRSHVLTEQSGLRVLHSPPAVRRVDSITAAGGEGPFPTSRARGSPGDTKGGPPEPMLSRWPCTSPRHSRDYVEGARRPLDSPLCTSLGFASPLHSLEMSKNLSDDMKEVAFSVRNAICSGPGELQVKDMACQTNGSRTMGTQTVQTISVGLQTEALRGSGVTSSPHKCLTPKAGGGATPVSSPSRSLRSRQVAPAIEKVQAKFERTCCSPKYGSPKLQRKPLPKADQPNNRTSPGMAQKGYSESAWARSTTTRESPVHTTINDGLSSLFNIIDHSPVVQDPFQKGLRAGSRSRSAEPRPELGPGQETGTNSRGRSPSPIGVGSEMCREEGGEGTPVKQDLSAPPGYTLTENVARILNKKLLEHALKEERRQAAHGPPGLHSDSHSLGDTAEPGPMENQTVLLTAPWGL

SEQ ID NO: 4277 - DNA, 3452 bp, Homo sapiens
atttcgccgggttgcttttgtcttgcgggctcctgtcgggttcggtgtttccgctctgaagactgcgacgcgggctccgatgcagctcgctccctgccggatgggtcatgggattctaaacatgaggcagatagctgatcagcttccttgggttttgctgatgacacaagagagctttgcctgaagatggaaacactggagtcagaactgacctgccctatttgtctggagctctttgaggaccctcttctactgccctgcgcacacagcctctgcttcaactgcgcccaccgcatcctagtatcacactgtgccaccaacgagtctgtggagtccatcaccgccttccagtgccccacctgccggcatgtcatcaccctcagccagcgaggtctagacgggctcaagcgcaacgtcaccctacagaacatcatcgacaggttccagaaagcatcagtgagcgggcccaactctcccagcgagacccgtcgggagcgggcctttgacgccaacaccatgacctccgccgagaaggtcctctgccagttttgtgaccaggatcctgcccaggacgctgtgaagacctgtgtcacttgtgaagtatcctactgtgacgagtgcctgaaagccactcacccgaataagaagccctttacaggccatcgtctgattgagccaattccggactctcacatccgggggctgatgtgcttggagcatgaggatgagaaggtgaatatgtactgtgtgaccgatgaccagttaatctgtgccttgtgtaaactggttgggcggcaccgcgatcatcaggtggcagctttgagtgagcgctatgacaaattgaagcaaaacttagagagtaacctcaccaaccttattaagaggaacacagaactggagacccttttggctaaactcatccaaacctgtcaacatgttgaagtcaatgcatcacgtcaagaagccaaattgacagaggagtgtgatcttctcattgagatcattcagcaaagacgacagattattggaaccaagatcaaagaagggaaggtgatgaggcttcgcaaactggctcagcagattgcaaactgcaaacagtgcattgagcggtcagcatcactcatctcccaagcggaacactctctgaaggagaatgatcatgcgcgtttcctacagactgctaagaatatcaccgagagagtctccatggcaactgcatcctcccaggttctaattcctgaaatcaacctcaatgacacatttgacacctttgccttagatttttcccgagagaagaaactgctagaatgtctggattaccttacagctcccaaccctcccacaattagagaagagctctgcacagcttcatatgacaccatcactgtgcattggacctccgatgatgagttcagcgtggtctcctacgagctccagtacaccatattcaccggacaagccaacgtcgttagtctgtgtaattcggctgatagctggatgatagtacccaacatcaagcagaaccactacacggtgcacggtctgcagagcggcaccaagtacatcttcatggtcaaggccatcaaccaggcgggcagccgcagcagtgagcctgggaagttgaagacaaacagccaaccatttaaactggatcccaaatctgctcatcgaaaactgaaggtgtcccatgataacttgacagtagaacgtgatgagtcatcatccaagaagagtcacacacctgaacgcttcaccagccaggggagctatggagtagctggaaatgtgtttattgatagtggccggcattattgggaagtggtcataagtggaagcacatggtatgccattggtcttgcttacaaatcagccccgaagcatgaatggattgggaagaactctgcttcctgggcgctctgccgctgcaacaataactgggtggtgagacacaatagcaaggaaatccccattgagcctgccccccacctccggcgcgtgggcatcctgctggactatgataacggctctatcgccttttatgatgctttgaactccatccacctctacaccttcgacgtcgcatttgcgcagcctgtttgccccaccttcaccgtgtggaacaagtgtctgacgattatcactgggctccctatcccagaccatttggactgcacagagcagctgccgtgagcgtctggccacatggagctgctttctggggaacagtaaggttcaggccactatttaggggactgagaaagcacaggcttcatgagtgtaatgaaatctcaccagaagtgtcccgaaatcggctcagatagggctcaaaacaagagattcctctccttttactgtgtcttgtattaagtacgggctttaataatttctttaatttttttgtatttagaggaaaatctatagattatttataagagaaacataatcaggattacaacttttaggaattacttggttttgcacattaagaggcccataagtttatcagctatttacaaccttcatttcatcacaatctgtgggcttacaaaaaaacaaaaacttttgtagttttgtatgttactcatcttcttacctgatatcccatgatgatcccatggtaggtcttctcacctcgatggtgcataacaggatgtgtttgaacctagtaggggaggaaacaggctttcttactctggtttaatttgaagtgttttaattgtgatgtcaaaaagttgtatcagatcaactaaaatggagagcaagacagagaatgaaaagagttgattttggacctcggaccttgccgtggctaaatctttaccttctcatagctgatgggataatgttggaaagaaaggttgtgaatcctttggccacattttgccctgcttctctcagggttaagggttctggaagaacattaagaatgagatgcaattgaaaatagtcattttgaatcctattgattattcaaaaattcaggctgattgtcttttatcagaggtaggattctgttttatagtatagaatctactttatcccttccttttaatagttcctttagacctgtgaaatttcttcactacatttaatagttctcctatttcccgctcccccatatcaattttccttttgtctccggggctgagtaaataaacatgttctgtcacaaatagcagcaccactttggattgattttgctctccaggacatcagcacatggccctgatcagcactaccacatccaaacataagtcactgaaaaacacttaatatttatgagttggtaatgacaagggacattgtataaagtactatttgctagattcatgcctcaaaagttattataaacagacctttattaaacacatcttgaaagatgtagaagtccctctatagtctagtatagtttacaatagagttgtaagaccaaaaaaaaaaaaaaaaaaaaa

SEQ ID NO: 4278 - protein, 667 aa, Homo sapiens
METLESELTCPICLELFEDPLLLPCAHSLCFNCAHRILVSHCATNESVESITAFQCPTCRHVITLSQRGLDGLKRNVTLQNIIDRFQKASVSGPNSPSETRRERAFDANTMTSAEKVLCQFCDQDPAQDAVKTCVTCEVSYCDECLKATHPNKKPFTGHRLIEPIPDSHIRGLMCLEHEDEKVNMYCVTDDQLICALCKLVGRHRDHQVAALSERYDKLKQNLESNLTNLIKRNTELETLLAKLIQTCQHVEVNASRQEAKLTEECDLLIEIIQQRRQIIGTKIKEGKVMRLRKLAQQIANCKQCIERSASLISQAEHSLKENDHARFLQTAKNITERVSMATASSQVLIPEINLNDTFDTFALDFSREKKLLECLDYLTAPNPPTIREELCTASYDTITVHWTSDDEFSVVSYELQYTIFTGQANVVSLCNSADSWMIVPNIKQNHYTVHGLQSGTKYIFMVKAINQAGSRSSEPGKLKTNSQPFKLDPKSAHRKLKVSHDNLTVERDESSSKKSHTPERFTSQGSYGVAGNVFIDSGRHYWEVVISGSTWYAIGLAYKSAPKHEWIGKNSASWALCRCNNNWVVRHNSKEIPIEPAPHLRRVGILLDYDNGSIAFYDALNSIHLYTFDVAFAQPVCPTFTVWNKCLTIITGLPIPDHLDCTEQLP

SEQ ID NO: 4279 - DNA, 407 bp, Homo sapiens
tttttttttttttttttttttttttttttagaagcagatacacaaaaacttttattaaggggaagttagacttacttcatgggaattaaccagttacaagggcatttaaattcatggggggggacactggaaaagtcaaaatggtcttttgaaagtccagtgttctggctttgtttgggccagggcaaccccaggtagaaccatccacaaagtaagtacaggtcaacaatgatatcagactagattggcaacaccatattcattgttacaagcattacagaacagaaaagtccaaggaccagaagacgattactaaagggattctgactataagccttttcttttacttaaatgcttccagaggaccagggtagcaaatccttaactttggggggacagagccactt

SEQ ID NO: 4280 - DNA, 649 bp, Homo sapiens
ccaaccctccagcagcccaacccgacgacgaagaggatgaggaagagctgctgctgctgcagccagagctccagggcgggctgcgcaccaaggccctgattgtggatgagtcctgccggcggtgaccatcttccaacatagggatatacctccctccttcttataactgaagatcctggagcccggaagattcagggcagacagaccctgataatgagcctggcagggaagggcaaccaacatcttgtaacttgctttccccaccctgtttctgggggcagagccaattgcccaatttctaccctaatccaaagtccctggtgtgggtggggttaaacgtgctggtgcatcctaggtcatccaagagtgagcgccaagtcctgagaaggggcacagaactccctggagggtggagatggagcacctgccccccatggcagggtacactctccccacagccttcctccccaccatcccgtggggactctcgggatttaagcactcgtctctctggggaagcccaagaccccacttccttttataggccacatttcctttcaattttctaaggtccctggtcccttttgttttacagggtcccggcctcctttctttgaaccacagcctggttttacaaattccaataagt

SEQ ID NO: 4281 - DNA, 377 bp, Homo sapiens
  misc_feature (47)..(47): n is a, c, g, or t
  misc_feature (49)..(49): n is a, c, g, or t
  misc_feature (52)..(52): n is a, c, g, or t
  misc_feature (131)..(131): n is a, c, g, or t
  misc_feature (133)..(133): n is a, c, g, or t
  misc_feature (140)..(140): n is a, c, g, or t
  misc_feature (201)..(201): n is a, c, g, or t
  misc_feature (233)..(233): n is a, c, g, or t
  misc_feature (242)..(242): n is a, c, g, or t
  misc_feature (314)..(314): n is a, c, g, or t
  misc_feature (320)..(320): n is a, c, g, or t
  misc_feature (329)..(329): n is a, c, g, or t
  misc_feature (337)..(337): n is a, c, g, or t
  misc_feature (347)..(347): n is a, c, g, or t
  misc_feature (361)..(361): n is a, c, g, or t
attcggaacgaggcaagaagtcgagcgaagatggcagcccgaccccngnaangcgcggcaagaagggcagccccagcgcgcagtccttcgaggagctgcagagccagcgcatcctggccaacgtgcgcgangncagccanccccagtcgctcaacgaggccttcgcggcgctgcgcaagatcatccccacgctgccctctnacaagctgagcaagatccagacgctcaagctngccgccagntacatagacttcctctaccaggtcctgcagagcgacgagatggacaataagatgaccagctgcagctacgtngcccangagcgcctnagctacgncttcttcgtnttgcgcattgaggnctcgtttgttcatgtt

SEQ ID NO: 4282 - DNA, 391 bp, Homo sapiens
  misc_feature (230)..(230): n is a, c, g, or t
  misc_feature (323)..(323): n is a, c, g, or t
caagacaggaagccaccccaaacttgaccgagaagatctttgacccttgcctttgagcccccaggagggaacgggatcatggagagccctctaaagcctgcactctccctgctccacagctttcagggtgtgtttatgagtgactccacccaagcttgtagctgttctctcccatctaacctcaggcaagatcctggtgaaacagcatgacatggcttctggggtggagngtgggggtggaggtcctgctcctagagatgaactctatccagccccttaattggcaggtgtatgtgctgacagtactgaaagctttcctcttnaactgatcccacctccacccaaaagtcagcagtggcactggatcccgtgggctttggggaagtcactt

SEQ ID NO: 4283 - DNA, 257 bp, Homo sapiens
  misc_feature (24)..(24): n is a, c, g, or t
  misc_feature (28)..(28): n is a, c, g, or t
  misc_feature (37)..(38): n is a, c, g, or t
  misc_feature (44)..(44): n is a, c, g, or t
  misc_feature (51)..(51): n is a, c, g, or t
  misc_feature (53)..(53): n is a, c, g, or t
  misc_feature (62)..(62): n is a, c, g, or t
  misc_feature (132)..(132): n is a, c, g, or t
  misc_feature (159)..(159): n is a, c, g, or t
  misc_feature (183)..(183): n is a, c, g, or t
  misc_feature (191)..(191): n is a, c, g, or t
  misc_feature (202)..(202): n is a, c, g, or t
  misc_feature (219)..(219): n is a, c, g, or t
  misc_feature (232)..(232): n is a, c, g, or t
tatacttatagcttttcttcattnatanacaagacannaaaatnaaatacnanttgagccantataaggtaaactttgtacatacagataaccccagaaggagcttcacactgcagcatatcatattgcttncattgctacacccacaattgggttcgnagagagtgtgctcgtgtttgcatnctgtaagntcttagcttantccctcccctatctgcngtgggttccatgntaataaaatgataaggggttggctt

SEQ ID NO: 4284 - DNA, 428 bp, Homo sapiens
  misc_feature (160)..(160): n is a, c, g, or t
  misc_feature (194)..(194): n is a, c, g, or t
  misc_feature (403)..(403): n is a, c, g, or t
  misc_feature (420)..(420): n is a, c, g, or t
aaactgttatggaaaaacattttattacacatattcaacttgcttccaatgaaatgattaatttttctatataattttcatgtataatggcgtccaatgtttgtcttccgttttttttcctttcaaaaccagccccaaaaagtaaaacaaaaattccatngggtacagtatgtaatgcaagttaacgaatgggnaatagatacatttgactctgaaacgaaaaaaggacaatcgtattgccatagaggctcttttcctgcattctgatcctatccagcaacggtcagctgagagggtttaattttgcaccaataaaaataagcaccgtagggtcgtgagactcctgggtaaacacgtgcgttagtggacacgtgttgcaaagcacaaaagggtacagtactcngagggggaccaggtacnggggttgt

SEQ ID NO: 4285 - DNA, 329 bp, Homo sapiens
  misc_feature (61)..(61): n is a, c, g, or t
  misc_feature (64)..(64): n is a, c, g, or t
  misc_feature (167)..(167): n is a, c, g, or t
  misc_feature (175)..(175): n is a, c, g, or t
  misc_feature (178)..(178): n is a, c, g, or t
  misc_feature (199)..(199): n is a, c, g, or t
  misc_feature (205)..(205): n is a, c, g, or t
  misc_feature (279)..(279): n is a, c, g, or t
  misc_feature (292)..(292): n is a, c, g, or t
  misc_feature (312)..(312): n is a, c, g, or t
  misc_feature (328)..(328): n is a, c, g, or t
ggagaagatgctgctgtccctggtgctccacacgtactccatgcgctacctgctgcccagngtngtgctcctgggcacggtgcctacctacgtgttggcctggggggtctggaggatgctctccgactttctgcccgaccgattataccaagcgctggacgaccggntgtactgngtntaccagagcatggtgctcttnttcttngagaattacaccggggtccagatattgctatatggagatttgccaaaaaataaagaaaatataatatatttagnaaataattaaagnacggttgaatggattgttgntgacatcttggccatna

SEQ ID NO: 4286 - DNA, 485 bp, Homo sapiens
caaagtgacagatgtctgtgatgtttcatgacataggttatgatcgagccaatttacaaaatttaataaccaacctaaactcacatacatatttgttaagaagctgacatcagttcagtattgtaaggaaactaactaggtggtgatgatgataaaagaattagggaaaatattttatttgatatattcccttttataattcctaaaatgaagattctatttaagggttataatttatataagtttagtcatataccattacattatgataccataagcagagtgcattatgattctctagaaatataattcaatcagatatgtattatatttatttatgtcacacattttctttactgagaataaaaattatcttattttcagaagctttgtatcaatcagtttcatgtaataagcaacccagatatctactagattatgtatttcttcatttgaaactacactgttttctcctagtcccttga

SEQ ID NO: 4287 - DNA, 5774 bp, Homo sapiens
gtcactttggttgatagcagccgctctggtagaggttaggacttcagctgatggacaagctggtaatgaagaaatggtgcaaatagatttaccaataaagagatatagagagtatgagctggtgactccagtcagcacaaatctagaaggacgctatctctcccatactctttctgcgagtcacaaaaagaggtcagcgagggacgtgtcttccaaccctgagcagttgttctttaacatcacggcatttggaaaagattttcatctgcgactaaagcccaacactcaactagtagctcctggggctgttgtggagtggcatgagacatctctggtgcctgggaatataaccgatcccattaacaaccatcaaccaggaagtgctacgtatagaatccggaaaacagagcctttgcagactaactgtgcttatgttggtgacatcgtggacattccaggaacctctgttgccatcagcaactgtgatggtctggctggaatgataaaaagtgataatgaagagtatttcattgaacccttggaaagaggtaaacagatggaggaagaaaaaggaaggattcatgttgtctacaagagatcagctgtagaacaggctcccatagacatgtccaaagacttccactacagagagtcggacctggaaggccttgatgatctaggtactgtttatggcaacatccaccagcagctgaatgaaacaatgagacgccgcagacacgcgggagaaaacgattacaatatcgaggtactgctgggagtggatgactctgtggtccgtttccatggcaaagagcacgtccaaaactacctcctgaccctaatgaacattgtgaatgaaatttaccatgatgagtccctcggagtgcatataaatgtggtcctggtgcgcatgataatgctgggatatgcaaagtccatcagcctcatagaaaggggaaacccatccagaagcttggagaatgtgtgtcgctgggcgtcccaacagcaaagatctgatctcaaccactctgaacaccatgaccatgcaatttttttaaccaggcaagactttggacctgctggaatgcaaggatatgctccagtcaccggcatgtgtcatccagtgagaagttgtaccctgaatcatgaggatggtttttcatctgcttttgtagtagcccatgaaacgggccatgtgttgggaatggagcatgatggacaaggcaacaggtgtggtgatgagactgctatgggaagtgtcatggctcccttggtacaagcagcattccatcgttaccactggtcccgatgcagtggtcaagaactgaaaagatatatccattcctatgactgtctccttgatgacccttttgatcatgattggcctaaactcccagaacttcctggaatcaattattctatggatgagcaatgtcgttttgattttggtgttggctataaaatgtgcaccgcgttccgaacctttgacccatgtaaacagctgtggtgtagccatcctgataatccctacttttgtaagactaaaaagggacctccacttgatgggactgaatgtgctgctggaaaatggtgctataagggtcattgcatgtggaagaatgctaatcagcaaaaacaagatggcaattgggggtcatggactaaatttggctcctgttctcggacatgtggaactggtgttcgtttcagaacacgccagtgcaataatcccatgcccatcaatggtggtcaggattgtcctggtgttaattttgagtaccagctttgtaacacagaagaatgccaaaaacactttgaggacttcagagcacagcagtgtcagcagcgaaactcccactttgaataccagaataccaaacaccactggttgccatatgaacatcctgaccccaagaaaagatgccacctttactgtcagtccaaggagactggagatgttgcttacatgaaacaactggtgcatgatggaacgcactgttcttacaaagatccatatagcatatgtgtgcgaggagagtgtgtgaaagtgggctgtgataaagaaattggttctaataaggttgaggataagtgtggtgtctgtggaggagataattcccactgccgaaccgtgaaggggacatttaccagaactcccaggaagcttgggtaccttaagatgtttgatataccccctggggctagacatgtgttaatccaagaagacgaggcttctcctcatattcttgctattaagaaccaggctacaggccattatattttaaatggcaaaggggaggaagccaagtcgcggaccttcatagatcttggtgtggagtgggattataacattgaagatgacattgaaagtcttcacaccgatggacctttacatgatcctgttattgttttgattatacctcaagaaaatgatacccgctctagcctgacatataagtacatcatccatgaagactctgtacctacaatcaacagcaacaatgtcatccaggaagaattagatacttttgagtgggctttgaagagctggtctcaggtttccaaaccctgtggtggaggtttccagtacactaaatatggatgccgtaggaaaagtgataataaaatggtccatcgcagcttctgtgaggccaacaaaaagccgaaacctattagacgaatgtgcaatattcaagagtgtacacatccactctgggtagcagaagaatgggaacactgcaccaaaacctgtggaagttctggctatcagcttcgcactgtacgctgccttcagccactccttgatggcaccaaccgctctgtgcacagcaaatactgcatgggtgaccgtcccgagagccgccggccctgtaacagagtgccctgccctgcacagtggaaaacaggaccctggagtgagtgttcagtgacctgcggtgaaggaacggaggtgaggcaggtcctctgcagggctggggaccactgtgatggtgaaaagcctgagtcggtcagagcctgtcaactgcctccttgtaatgatgaaccatgtttgggagacaagtccatattctgtcaaatggaagtgttggcacgatactgctccataccaggttataacaagttatgttgtgagtcctgcagcaagcgcagtagcaccctgccaccaccataccttctagaagctgctgaaactcatgatgatgtcatctctaaccctagtgacctccctagatctctagtgatgcctacatctttggttccttatcattcagagacccctgcaaagaagatgtctttgagtagcatctcttcagtgggaggtccaaatgcatatgctgctttcaggccaaacagtaaacctgatggtgctaatttacgccagaggagtgctcagcaagcaggaagtaagactgtgagactggtcaccgtaccatcctccccacccaccaagagggtccacctcagttcagcttcacaaatggctgctgcttccttctttgcagccagtgattcaataggtgcttcttctcaggcaagaacctcaaagaaagatggaaagatcattgacaacagacgtccgacaagatcatccaccttagaaagatgagaaagtgaaccaaaaaggctagaaaccagaggaaaacctggacaacctctctcttcccatggtgcatatgcttgtttaaagtggaaatctctatagatcgtcagctcattttatctgtaattggaagaacagaaagtgctggctcactttctagttgctttcatcctccttttgttctgcattgactcatttaccagaattcattggaagaaatcaccaaagattattacaaaagaaaaatatgttgctaagattgtgttggtcgctctctgaagcagaaaagggactggaaccaattgtgcatatcagctgactttttgtttgttttagaaaagttacagtaaaaattaaaaagagataccaatggtttacactttaacaagaaattttggatatggaacaaagaattcttagacttgtattcctatttatctatattagaaatattgtatgagcaaatttgcagctgttgtgtaaatactgtatattgcaaaaatcagtattattttaagagatgtgttctcaaatgattgtttactatattacatttctggatgttctaggtgcctgtcgttgagtattgccttgtttgacattctataggttaattttcaaagcagagtattacaaaagagaagttagaattacagctactgacaatataaagggttttgttgaatcaacaatgtgatacgtaaattatagaaaaagaaaagaaacacaaaagctatagatatacagatatcagcttacctattgccttctatacttataatttaaaggattggtgtcttagtacacttgtggtcacagggatcaacgaatagtaaataatgaactcgtgcaagacaaaactgaaaccctctttccaggacctcagtaggcaccgttgaggtgtcctttgtttttgtgtgtgtgtgttcttttttaattttcgcattgttgacagatacaaacagttatactcaatgtactgtaataatcgcaaaggaaaaagttttgggataacttatttgtatgttggtagctgagaaaaatatcatcagtctagaattgatatttgagtatagtagagctttggggctttgaaggcaggttcaagaaagcatatgtcgatggttgagatatttattttccatatggttcatgttcaaatgttcacaaccacaatgcatctgactgcaataatgtgctaataatttatgtcagtagtcaccttgctcacagcaaagccagaaatgctctctccagggagtagatgtaaagtacttgtacatagaattcagaactgaagatatttattaaaagttgatttttttttcttgatagtatttttatgtactaaatatttacactaatatcaattacatattttggtaaactagagagacataattagagatgcatgctttgttctgtgcatagagacctttaagcaaactactacagccaactcaaaagctaaaactgaacaaatttgatgttatgcaaacatcttgcatttttagtagttgatattaagttgatgacttgtttcccttcaaggaaacattaaattgtatggactcagctagctgttcaatgaaattgtgaattagaaacatttttaaaagtttttgaaagagataagtgcatcatgaattacatgtacatgagaggagatagtgatatcagcataatgattttgaggtcagtacctgagctgtctaaaaatatattatacaaactaaaatgtagatgaattaacctctcaaagcacagaatgtgcaagaacttttgcattttaatcgttgtaaactaacagcttaaactattgactctatacctctaaagaattgctgctactttgtgcaagaactttgaaggtcaaattaggcaaattccagatagtaaaacaatccctaagccttaagtcttttttttttcctaaaaattcccatagaataaaattctctctagtttacttgtgtgtgcatacatctcatccacaggggaagataaagatggtcacacaaacagtttccataaagatgtacatattcattatacttctgacctttgggctttcttttctactaagctaaaaattcctttttatcaaagtgtacactactgatgctgtttgttgtactgagagcacgtaccaataaaaatgttaacaaaatat

SEQ ID NO: 4288 - protein, 1201 aa, Homo sapiens
SLWLIAAALVEVRTSADGQAGNEEMVQIDLPIKRYREYELVTPVSTNLEGRYLSHTLSASHKKRSARDVSSNPEQLFFNITAFGKDFHLRLKPNTQLVAPGAVVEWHETSLVPGNITDPINNHQPGSATYRIRKTEPLQTNCAYVGDIVDIPGTSVAISNCDGLAGMIKSDNEEYFIEPLERGKQMEEEKGRIHVVYKRSAVEQAPIDMSKDFHYRESDLEGLDDLGTVYGNIHQQLNETMRRRRHAGENDYNIEVLLGVDDSVVRFHGKEHVQNYLLTLMNIVNEIYHDESLGVHINVVLVRMIMLGYAKSISLIERGNPSRSLENVCRWASQQQRSDLNHSEHHDHAIFLTRQDFGPAGMQGYAPVTGMCHPVRSCTLNHEDGFSSAFVVAHETGHVLGMEHDGQGNRCGDETAMGSVMAPLVQAAFHRYHWSRCSGQELKRYIHSYDCLLDDPFDHDWPKLPELPGINYSMDEQCRFDFGVGYKMCTAFRTFDPCKQLWCSHPDNPYFCKTKKGPPLDGTECAAGKWCYKGHCMWKNANQQKQDGNWGSWTKFGSCSRTCGTGVRFRTRQCNNPMPINGGQDCPGVNFEYQLCNTEECQKHFEDFRAQQCQQRNSHFEYQNTKHHWLPYEHPDPKKRCHLYCQSKETGDVAYMKQLVHDGTHCSYKDPYSICVRGECVKVGCDKEIGSNKVEDKCGVCGGDNSHCRTVKGTFTRTPRKLGYLKMFDIPPGARHVLIQEDEASPHILAIKNQATGHYILNGKGEEAKSRTFIDLGVEWDYNIEDDIESLHTDGPLHDPVIVLIIPQENDTRSSLTYKYIIHEDSVPTINSNNVIQEELDTFEWALKSWSQVSKPCGGGFQYTKYGCRRKSDNKMVHRSFCEANKKPKPIRRMCNIQECTHPLWVAEEWEHCTKTCGSSGYQLRTVRCLQPLLDGTNRSVHSKYCMGDRPESRRPCNRVPCPAQWKTGPWSECSVTCGEGTEVRQVLCRAGDHCDGEKPESVRACQLPPCNDEPCLGDKSIFCQMEVLARYCSIPGYNKLCCESCSKRSSTLPPPYLLEAAETHDDVISNPSDLPRSLVMPTSLVPYHSETPAKKMSLSSISSVGGPNAYAAFRPNSKPDGANLRQRSAQQAGSKTVRLVTVPSSPPTKRVHLSSASQMAAASFFAASDSIGASSQARTSKKDGKIIDNRRPTRSSTLER

SEQ ID NO: 4289 - DNA, 514 bp, Homo sapiens
tttttttttttttttttttttttatttgcatttgagtgctttattatattggaattgcagtgatattaacatttgtacaaatgcacaaaatcttgtctcttcttgctagaaagagatgtaaaaatctgacctagttgaacagtcttaatgaactcattgtccattggtaacaataaatgtgttcacgatgcaacaaaaagcttaacacaaaattaaacatattaaatgctgcagcaagtatttacatgtatgtacccctttttttctccttccaataaggaaggtggttgctttacaaatagacaaacaaacacaaatgctttgctgtttacaaatacaaagaaccccaagtccagaacttaaagtgacagcacctttttgggacttcctcagttaacacttactttacacagtgctaaacttttttcttttaattatatttttggacaatatttatattccaattgtcctagaacattggatttgaactgagctatttttctgggccttttca

SEQ ID NO: 4290 - DNA, 374 bp, Homo sapiens
  misc_feature (66)..(66): n is a, c, g, or t
  misc_feature (373)..(373): n is a, c, g, or t
ctagtgttaaaaccctaatagtgtttgaattcaaaaagcttatttatctgggtaacccaaactttntctgttttgtttttggaagggtttttgtggtatgtcatttggtattctattctgaaaatgcctttctcctaccaaaatgtgcttaagccactaaagaaatgaagtggcattaattagtaaattgttagcatggtcatgtttgaatattctcacatcaagcttttgcattttaattgtgttgtctaagtatacttttaaaaaatcaagtggcactctaggatgcttaatagtactttaatatttgtagcatacagactaatttttctaaaagggtaagtctgttctaggctgctttgtggaacaaggnt

SEQ ID NO: 4291 - DNA, 403 bp, Homo sapiens
ttttttttttttgtagagatggggattttgcttcattgcccagggtgatcttgaactggaacagatttgcccacctcggcctcccagagtgctgggattacagattacaggtgtgagccactatgcccagcctctactcttaaatttaaggaaaaaatagttttgcataccccaatcctctcaagcctctgcttcctagcccacactggtaatgaaaggccagaattacacttttgcctcatatgcagctttgtggttcttcatcctctgagcaattagttctaaagatcttaatccttcaaaggctgtaatgttacctggccaggacctgctttcagtcgcttcagatcaaaatgggtttaactgagtaactcaaaggccaagacaggggttagggaaggac

SEQ ID NO: 4292 - DNA, 656 bp, Homo sapiens
ataggctaggtacgggctcggtgttaatcggccgaggctcggcggcttccgtcgatgtctaggtggctgctccgcccgccacggtcatttccattgactcacacgcgccgcctggaggaggaggctgcgctggacacgccggtggcgcctttgcctgggggagcgcagcctggagctctggcggcagcgctgggagcggggcctcggaggctgggcctggggacccaaggttgggcgaggcgcaggaggtgggctcagggttctccagagaatccccatgagctgacccgcagggcggccgggccagtaggcaccgggcccccgcggtgacctgcggccccgaagctggagcagccactgcaaatgctgcgctgaccccaaatgctgtgtcctttaaatgttttaattaagaataattaataggtccgggtgtggaggctcaagccttaatccccagcacctggcgaggccgaggagggaggatcccttgagcccagaggttcgagactagcctgggcaacacagtcagactcctttaaaaaaacaaacaaacaaaaaaaacatagacttctttatatcttttgagctccctcccttttattatgtaatgaatatgtgttgcttttgtaataggaaaatataaagttaaaatttca

SEQ ID NO: 4293 - DNA, 324 bp, Homo sapiens
tttaatgagactaacattattttaaagtgtttatttttttctataatacatttcattcaaatcataaaagtctgatacatttttttctcaagaacaacttacactcatttgagatgctttttctttcctttaatcttataggatggacaaagatacactttaatggacaaaaaacaccagagttcattacaaatacagcttcccaggccccacctccagcacttctgactgagcgtctgggaccagtcctaggatcgcaaaactgtaaaattcccccagtcaactccacggcaggcaggcctggaaccacccttagtggaacac

SEQ ID NO: 4294 - DNA, 266 bp, Homo sapiens
ttttttaaagaaaaagatatttgcatttctttacttagacttattttttcattgatacttcatcctccctccatcaaatcctgctcctttactggtttggtgtctatctttggacaagtaatttggccttccagatttgccttcctcatctgaaaagtgatggtaaatttatggggttgtcacctggtttcttggggttccaagaaatatagtactgcagttccaggagtcatttttattagagtaaaagccctagaatatatttt

SEQ ID NO: 4295 - DNA, 500 bp, Homo sapiens
tttttttaaatatttaagagtttatttgagcagtgatccatgaattgggcagcttcaagccagaagtggctagggagctccccagagagaacatgaggaggaggctttttaggacaaatagataaaagcaaagataatatttcattggttacagttatacagttacacagttatacagttgccttatttggtctatcccatgaggaagtcctagttactaattacgtttttgttggctgcttctgattggttgagcttaagttctgtgtttctttaacataggcatttacaagaaataccacaaataaagtttcagacatgcttgcaaatcaagcaaggttaaggtcacttaggaggcccaactggctctgtctgctcaaggattcttctggcctcgtctccattttacatgaactgttgcataaataaacacagagtacctgaaacaacggaggtgatcattctgcctaccgagtgttggccacgccaagcttggagtg

SEQ ID NO: 4296 - DNA, 341 bp, Homo sapiens
tagtaataaagtatttttaaaataaaacatgtacattttttggacataaagctattatacacttaatagactactaaagagtgtaaacataacttttatatgcactgagaaaccaaaaattttgtgtgactcactttattgcgatatccactttattatggtggtctggaactgatcctgtaatatctccatggtatgcctgtgctgtacagggggtaaagtgtgaggggtcaagaattttcatgccagaaattccatagcagcctactagaactctggaagtatcgcctttggtcgcagtgccagattctggtgaggatttcctggaccccgatttatat

SEQ ID NO: 4297 - DNA, 729 bp, Homo sapiens
acctgcgtcctctgacctgagagcgaaggggaaagcggcgagatgactgaccgctacaccatccatagccagctggagcacctgcagtccaagtacatcggcacgggccacgccgacaccaccaagtgggagtggctggtgaaccaacaccgcgactcgtactgctcctacatgggccacttcgaccttctcaactacttcgccattgcggagaatgagagcaaagcgcgagtccgcttcaacttgatggaaaagatgcttcagccttgtggaccgccagccgacaagcccgaggagaactgagactctgccttaccaccgcagtgcggggcacctctcccagcgtttctccggtttgccaatcctcttaagtattcctgtctccaaaggaccggctctccatggctcctgcgcctcgtgctttccgcgtacagaagtgcttgcccggggagtcccgcctgacctgccttcatgtggacccttagaacagcactgggagaccagcaggactcctgagaactgtgctggtggagaggtcctagagccggcgagcgtttgagaagagggcatggcgctggagtgagatgggattggcgtctcgatttggctaatgatggtcatggcttttccataagttagaaatcgtcacaaaaaacaaaaaaaaaaccgggctttttggggcggacaaaggtttaaggcatggcttgttccgcctttgtaagggactcg

SEQ ID NO: 4298 - DNA, 2824 bp, Homo sapiens
gcggccgctttcgatttcgctttcccctaaatggctgagcttctcgccagcgcaggatcagcctgttcctgggactttccgagagccccgccctcgttccctcccccagccgccagtaggggaggactcggcggtacccggagcttcaggccccaccggggcgcggagagtcccagacccggccgggaccgggacggcgtccgagtgccaatggctagctctaggtgtcccgctccccgcgggtgccgctgcctccccggagcttctctcgcatggctggggacagtactgctacttctcgccgactgggtgctgctccggaccgcgctgccccgcatattctccctgctggtgcccaccgcgctgccactgctccgggtctgggcggtgggcctgagccgctgggccgtgctctggctgggggcctgcggggtcctcagggcaacggttggctccaagagcgaaaacgcaggtgcccagggctggctggctgctttgaagccattagctgcggcactgggcttggccctgccgggacttgccttgttccgagagctgatctcatggggagcccccgggtccgcggatagcaccaggctactgcactggggaagtcaccctaccgccttcgttgtcagttatgcagcggcactgcccgcagcagccctgtggcacaaactcgggagcctctgggtgcccggcggtcagggcggctctggaaaccctgtgcgtcggcttctaggctgcctgggctcggagacgcgccgcctctcgctgttcctggtcctggtggtcctctcctctcttggggagatggccattccattctttacgggccgcctcactgactggattctacaagatggctcagccgataccttcactcgaaacttaactctcatgtccattctcaccatagccagtgcagtgctggagttcgtgggtgacgggatctataacaacaccatgggccacgtgcacagccacttgcagggagaggtgtttggggctgtcctgcgccaggagacggagtttttccaacagaaccagacaggtaacatcatgtctcgggtaacagaggacacgtccaccctgagtgattctctgagtgagaatctgagcttatttctgtggtacctggtgcgaggcctatgtctcttggggatcatgctctggggatcagtgtccctcaccatggtcaccctgatcaccctgcctctgcttttccttctgcccaagaaggtgggaaaatggtaccagttgctggaagtgcaggtgcgggaatctctggcaaagtccagccaggtggccattgaggctctgtcggccatgcctacagttcgaagctttgccaacgaggagggcgaagcccagaagtttagggaaaagctgcaagaaataaagacactcaaccagaaggaggctgtggcctatgcagtcaactcctggaccactagtatttcaggtatgctgctgaaagtgggaatcctctacattggtgggcagctggtgaccagtggggctgtaagcagtgggaaccttgtcacatttgttctctaccagatgcagttcacccaggctgtggaggtactgctctccatctaccccagagtacagaaggctgtgggctcctcagagaaaatatttgagtacctggaccgcacccctcgctgcccacccagtggtctgttgactcccttacacttggagggccttgtccagttccaagatgtctcctttgcctacccaaaccgcccagatgtcttagtgctacaggggctgacattcaccctacgccctggcgaggtgacggcgctggtgggacccaatgggtctgggaagagcacagtggctgccctgctgcagaatctgtaccagcccaccgggggacagctgctgttggatgggaagccccttccccaatatgagcaccgctacctgcacaggcaggtggctgcagtgggacaagagccacaggtatttggaagaagtcttcaagaaaatattgcctatggcctgacccagaagccaactatggaggaaatcacagctgctgcagtaaagtctggggcccatagtttcatctctggactccctcagggctatgacacagaggtagacgaggctgggagccagctgtcagggggtcagcgacaggcagtggcgttggcccgagcattgatccggaaaccgtgtgtacttatcctggatgatgccaccagtgccctggatgcaaacagccagttacaggtggagcagctcctgtacgaaagccctgagcggtactcccgctcagtgcttctcatcacccagcacctcagcctggtggagcaggctgaccacatcctctttctggaaggaggcgctatccgggaggggggaacccaccagcagctcatggagaaaaaggggtgctactgggccatggtgcaggctcctgcagatgctccagaatgaaagccttctcagacctgcgcactccatctccctcccttttcttctctctgtggtggagaaccacagctgcagagtagcagctgcctccaggatgagttacttgaaatttgccttgagtgtgttacctcctttccaagctcctcgtgataatgcagacttcctggagtacaaacacaggatttgtaattcctactgtaacggagtttagagccagggctgatgctttggtgtggccagcactctgaaactgagaaatgttcagaatgtacggaaagatgatcagctattttcaacataactgaaggcatatgctggcccataaacaccctgtaggttcttgatatttataataaaattggtgttttgt

SEQ ID NO: 4299 - protein, 808 aa, Homo sapiens
MAELLASAGSACSWDFPRAPPSFPPPAASRGGLGGTRSFRPHRGAESPRPGRDRDGVRVPMASSRCPAPRGCRCLPGASLAWLGTVLLLLADWVLLRTALPRIFSLLVPTALPLLRVWAVGLSRWAVLWLGACGVLRATVGSKSENAGAQGWLAALKPLAAALGLALPGLALFRELISWGAPGSADSTRLLHWGSHPTAFVVSYAAALPAAALWHKLGSLWVPGGQGGSGNPVRRLLGCLGSETRRLSLFLVLVVLSSLGEMAIPFFTGRLTDWILQDGSADTFTRNLTLMSILTIASAVLEFVGDGIYNNTMGHVHSHLQGEVFGAVLRQETEFFQQNQTGNIMSRVTEDTSTLSDSLSENLSLFLWYLVRGLCLLGIMLWGSVSLTMVTLITLPLLFLLPKKVGKWYQLLEVQVRESLAKSSQVAIEALSAMPTVRSFANEEGEAQKFREKLQEIKTLNQKEAVAYAVNSWTTSISGMLLKVGILYIGGQLVTSGAVSSGNLVTFVLYQMQFTQAVEVLLSIYPRVQKAVGSSEKIFEYLDRTPRCPPSGLLTPLHLEGLVQFQDVSFAYPNRPDVLVLQGLTFTLRPGEVTALVGPNGSGKSTVAALLQNLYQPTGGQLLLDGKPLPQYEHRYLHRQVAAVGQEPQVFGRSLQENIAYGLTQKPTMEEITAAAVKSGAHSFISGLPQGYDTEVDEAGSQLSGGQRQAVALARALIRKPCVLILDDATSALDANSQLQVEQLLYESPERYSRSVLLITQHLSLVEQADHILFLEGGAIREGGTHQQLMEKKGCYWAMVQAPADAPE

SEQ ID NO: 4300 - DNA, 2104 bp, Homo sapiens
gtcgggaccggcaagatggcggcgcggacagcgttcggtgctgtgtgccggcgcctctggcagggattagggaatttttctgtaaacacttctaagggcaatacagccaaaaatggtggcttgcttctcagtaccaatatgaagtgggtacagttttcaaacctacacgttgatgttccaaaggatttgaccaaacctgtggcaacaatctctgatgaaccagacatattatataagcgcctctcggttttggtgaaaggtcacgataaggctgtattggacagttatgaatattttgctgtgcttgctgctaaagaacttggtatctctattaaagtacatgaacctccaaggaaaatagagcgatttactcttctccaatcagtgcatatttacaagaagcacagagttcagtatgaaatgagaacactttacagatgtttagagttagaacatctaactggaagcacagcagatgtctacttggaatatattcagcgaaacttacctgaaggggttgccatggaagtaacaaagacacaattagaacagttaccagaacacatcaaggagccaatctgggaaacactatcagaagaaaaagaagaaagcaagtcataaagcctcagggaggccatttttgcctaaatttgaaatgagggtgggccagatgagtatgtttaagtggagagtgcttccagctgagatgatttgagtctgtcctaactgctccattgagttctcgtgccctcatcagctgagggcagggaatggaactttaatggaagaaccacttttatctattctttttattcattgtttcagttctgatttcagcaaacatgagcaaaccactttgactgaaagcagaaagagtgaaaattctattttgttacgctactggtgttcaattattagtttgtaccatttttaatttatgtcagttgatgcatctgaaaataagtgcttggagtgttcgtacccttatttttttttaagattcctagaaggaatctttggttaattcagattgagcagttaaagtttttgctatttacctttgtgcaggctggcatatgctaatttgggggtggtaaccaaccgattttatctcatgtaagcattacattttgaagactgaatatacttcacagcagatcaaacacatttatggcatgcactaacctcttcttggagcccagaactttatagagttgcctaccagggttactgtaatggaatttatgatcttaagaaattactagttgtattatttatcctatgattcattcattcaataagcttttactgcataaactttacatccagcactgtagttaagtacccaaaattgaatagaaataatggcttttgaaaattgcacaaagcaggccaggcacggtggctcacgcctgtaatcccagcactttgggaggccgaggcaggcggatcacgaggtcaagagatccagaccatcctggctaacacggtgaaaccccgtctctaataaaaatacaaaaattagctggacatggtggcacgtgcctgtaatcccagctactcaggaggctgaggcaggagaatcgcgtgaacccgggcccggtggaggctgcagtgagacgagatcgcgccactgcactccagcctggcgacagagcgagacaccgtctcaaaaaaaaaaaaaaagaaaattgtgcaaagcataggtaaatatttttctttattaagcttctcactgagaagccctctttattttggtaaatgtcactctgtttgttaggagatgtctgcttttccatgaaatgaaatagtggctaaagccctgaaagaggcaagactacaatgggctgaaacagttggtatagcaaccccagagaagtgcttcattttctttttatagtagaagcaggtccatgtcttttgtggtttcctgcacatctttggagtagttatgacttctcagtttttccccccttaaactgcattgcctattcttttttcctgacatgctatcaggtatcagtgtgttgaatacataatgcttgtgtatcagacttacgttactgtcatcaccattaaaagaattgcagccttgtgccccatg

SEQ ID NO: 4301 - protein, 201 aa, Homo sapiens [sequence omitted]

SEQ ID NO: 4302 - DNA, 512 bp, Homo sapiens
gcacatcaaacaggttgaccctcagcttggactgcagctagccagcatgctaggctgctcattctatgaagtgtctgtcagtgaaaattataatgatgtctacagcgccttccacgtcctctgtaaagaggtcagtcacaaacagcagcctagcagtacacccgagaagcgaagaacctccctcattcccaggcccaagtcacccaacatgcaggacctgaagaggaggtttaagcaagccctctctgccaaagtgaggactgtcacctccgtctgaagcaggaggagcactcaagggggtttggtcttcccaggaagagggcctgaggttctcctagtgcaggaacgttgaatattggcaatgattcctggttccagaaagggctggagcagaagggccaagagggctgtggaactgctacagaaaaggaagtgttgttctgagcagggggacaggattgatgaggcttgaaagagcccactgagccactctctgaatatgtgaaatgtac

SEQ ID NO: 4303 - DNA, 596 bp, Homo sapiens
agaatgacgaacgcagactagttacttaagagtgaaaagcaaatgaagaagtctgggagaaaagagcaagcaagagaaagagaagagcaagaagaaaaaaggaggtaaaacagaacaggatggctatcaggaacccaccaacaaacacttcacgcagagtcccaagaagtcagtggccgacctgctggggtcctttgaaggcaaacgaggactccttctgatcactgctcccaaggctgagaacaatatgtatgtgcaacaacgtgatgaatatctggaaagtttctgcaagatggctaccaggaaaatctctgtgatcaccatcttcggccctgtcaacaacagcaccatgaaaatcgaccactttcagctagataatgagaagcccatgcgagtggtggatgatgaagacttggtagaccagcgtctcatcagcgagctgaggaaagagtgcggaatgacctacaatgacttcttcatggtgctaacagatgtggatctgagagtcaagcaatactatgaggtaccaataacaatgaagtctgtgtttgatctgatcgatactttccagtcccgaatcacagatatggagaagc

SEQ ID NO: 4304 - DNA, 542 bp, Homo sapiens
tttttttttttttttttgtccgcttttggccaggggggccctgtttatttgctgaattctgtactttaccaacagaaaaaaggagcacaacaaacatgcacatgttactgacttctgcattctcgtcgcattgcacacatacatttcacctgctgtctgcagtgtgcacacactgtcaacactttacagtagttcatggatcctccgtgttcatgcacatcccattttcagtgtggctgtgaccttcctccaggtcacctactgtagagctcgctaagccattcccctctgcaccggcattgggcttgaagtgaactcaacaccattgctcccatgattccttttctctcaaggattattctgggaaagtgggctctccaagccacccagtgtgtagagtccttgatcattctcatcatacatttatgtcctgctctccagaaacactgaatcagtcagactgtagagtgtcaccagtttccctctagccttgcaagtgctgggtgtatttatgtgtacgtgtgtatatatagagagagact

SEQ ID NO: 4305 - DNA, 291 bp, Homo sapiens
  misc_feature (146)..(146): n is a, c, g, or t
  misc_feature (172)..(172): n is a, c, g, or t
  misc_feature (247)..(247): n is a, c, g, or t
  misc_feature (256)..(256): n is a, c, g, or t
  misc_feature (286)..(286): n is a, c, g, or t
ttttttttttttttttttttttaaaaatgatgaatattttatttttcagacgtccatattttaaatgtaatagttttataaaagaaaaggttggcaacctgttaaggagatcttcatgtgaaaaatacatgtagaagttttaaaantttgtggatataattgtcattcaganttaagcaggttgattgctgttatctaggatgggtctcttcctttatgtttttcagtcacataatcttgatttccntagttatcncatgtacttaaaggaagttaatcaatgccnatatg

SEQ ID NO: 4306 - DNA, 2570 bp, Homo sapiens
attaaaatgagaaatacataagatgataaataaaatgaaggtgaaggtattccagatctaccgaaaagattttcagtatcacagattattcataagaaattgagaaaaggaacaatcagaagttgcaaaagatggtatagccgaatataatggaaataggaaaaattagtcgaaaataaaggttgatttagaaatgaagaaaatgaatatatttcttaatacaaaataagtgggaaatgagaagttataccaataaaaagcatttacaaatttaggggatattgtaacccagtataattttctgacaggttggactttgaccctaatggacttactggtgaactttttcaaatgtttaaataatgtctatccatgtatcatgaaggacagtatgcttcaaattgtcttttgaggcagacatgttctcagtactaaaagacatttttagaaggattttattctcaacagatgcaaaatgcaaaataaaatattgacaaacaatacagcaacaaataatttactatcactcaggattataaggctggtgttaagcagaacagccattaaatcagcatcaaaagaacaaatagtaaaatccaaagtattaattacagataacttttcaaaaattcatcattcacccttgatttaattatttctctggcaattatttaatagacttctcggagtctgttaagtacttaaaccaagaactaccattattcctactgggaaaacataaacatttctcaagtggaaagtaaacagtgttggcactatttttatatatggttaaagagacctgtcattgcaataaaagccagcattcacaaaatgaggaagataaggaaagtagcataaatattttctattaacatggctttacaactgctaaaacttatagtataaaaatgtactaacaaagactaattcaagaagttgcaggatacacaatttttaaaaatctcatttctacatcttagcagtgacaaactgcaatttaaaaagtgtgtttggttattaatatatatgagacttttaaagaaagttatataactacatagagataaattaagaaagatgcctaaatagaagcaagtttaaagagctatatttttaaacatgaacaaactcccatgggagccatgccagtgtagtggaaaagtagtacatggggagatggggagtttttttgaaaaccagaattacagttctcatttcactacttaccagttgtatactcttgggaaagtcactcctagtatctatttcaccatctacagaagagaaatacttcacagaattattgtggggattaagttagataatgtgttttaaaatataaagctacatccaaagaaatgccaatatgtgacattagtatgaaatttactacagttccatttaacattccaactggttgctgtgtggaatatggcataattgtaataaattatttaggaaagcaagcaaagatgtaagtttttttaatttagggggaaaaaatgggagccttgctctccaaatccttaaaacatgctattaagcaacctttctgaatattctgtggtgccaagtagaaagtttaactgaaattaataagccaatggaaagaaagaaatattaataactgctggtggaaagactagctagatgtcagtgtggaaagattagatccactttacatgtgatattccaaatgaattaaaatgttaagtataaaaagaaaaatactacaagtctcacaccaatagtggtataaaggaacttcatggcaattggcaaggtagatcaactaagagaaaaagttttaaatgtgtagtaaataggaaaaagacaaaacaagatggaatttaaaagaagctatttgcattacacatggatgcactcagtttttgtaaaactatatgcatatccataggggtttgtactcttaggcaaatttataaagcgatcgtgtataaatgatataaaaaatcaatttgaatggtattcaaatttcctaatattaaaaatgcaactttgacttagttcatgctattgtattagcaaaactgttttaattgcatgtgtccttatagcagcagcattgtgtattagtagccttttaagagaactgtgtagaagactataaaaagggctttataactgatcttttgacatactcactttgagtggcatatgcccaggaaaatatttaaaagaaagaaaagctatttgtacaaagttttctagcagttccactcagataactttaagggggaaaaaagcccaacgattggaaatggttaagtaaattttggtgtattgctagtgctatcacagaatgttatatagccattcaataatattgatatatgtcaaattgtatgcaaaaaagtgagattcaaaaatgttaataagaacataaattgtgtttactgatacatgtgaaaatttaggtctacattgaaaagaatcagaagataacatgtaattcagtttaacattaggggttctttatttttcttctgttaaatattgatgtatgcaataaaaaataaaagattaattggtaaagtggtttactg

SEQ ID NO: 4307 - DNA, 444 bp, Homo sapiens
cactcttgcactcctgtaatgagcctggcactgtgatgaaacacttttcccgtgtcgtttgagtgcatcttctcaacaaccctaggagggttcttgaagcttttgagattaacaatggcaggaaaatcatcactttttaaagtaattctccttggagatggtggagttgggaagagttcacttatgaacagatatgtaactaataagtttgatacccagctcttccatacaataggtgtggaatttttaaataaagatttggaagtggatggacattttgttaccatgcagatttgggacacggcaggtcaggagcgattccgaagcctgaggacaccattttacagaggttctgactgctgcctgcttacttttagtgtcgatgattcacaaagcttccagaacttaagtaactggaagaaagaatccatatattatgccgaa

SEQ ID NO: 4308 - DNA, 554 bp, Homo sapiens
gagacaagtaaattgactacatcaagactgccactatatgggagcagatttagagatagaagatgctcatggacatacaccactcactctagcggctagacagggacataccaaggtggttaattgtttgattgggtgtggagcaaatattaatcatactgatcaagatggttggacagcattaagatctgctgcttggggtggccatactgaggtagtttctgcactactttatgctggcgtaaaagtggattgtgcagatgctgatagccgaacagctttgagagcagcagcatggggaggacacgaggatattgtactgaatttgctacaacatggcgctgaagtgaacaaagctgataatgaaggtagaactgctttgatagcagcagcatacatgggacatagagagattgtggaacacctactggaccatggagcagaagtaaatcatgaggatgttgatggcaggactgcactctctgtagctgcactttgtgtgcctgcaagtaaagggcacgcatcagttgttagccttttattgatcgaggtgc

SEQ ID NO: 4309 - DNA, 210 bp, Homo sapiens
  misc_feature (133)..(133): n is a, c, g, or t
  misc_feature (164)..(164): n is a, c, g, or t
  misc_feature (175)..(175): n is a, c, g, or t
  misc_feature (187)..(187): n is a, c, g, or t
  misc_feature (192)..(192): n is a, c, g, or t
  misc_feature (198)..(198): n is a, c, g, or t
  misc_feature (203)..(203): n is a, c, g, or t
tgtaggcaatgtcactactgggcaaatacacttactgtgttctagaggcagccctttcttatgcagaaaatacaatacgcactgcatgagaagcttttaggagttgattctaatccaggtctgttcgaccttnggatatcatgcatgttggtaggttgggtgtnggtgagaaaangtttttaaggcnaaatntagatngcccnatttcaa

SEQ ID NO: 4310 - DNA, 3212 bp, Homo sapiens
gaattcgcggccgcgtcgacgatctcttggagacggcgacccaggcatctggggagccacagaagtcgtactcccttaaaccctgctttgctccccctgtggatgtaaccccttagctggcattttgcatctcaattggcttgtgatggaggcgtctttggggattcagatggatgagccaatggctttttctccccagcgtgaccggtttcaggctgaaggctctttaaaaaaaaacgagcagaattttaaacttgcaggtgttaaaaaagatattgagaagctttatgaagctgtaccacagcttagtaatgtgtttaagattgaggacaaaattggagaaggcactttcagctctgtttatttggccacagcacagttacaagtaggacctgaagagaaaattgctctaaaacacttgattccaacaagtcatcctataagaattgcagctgaacttcagtgcctaacagtggctggggggcaagataatgtcatgggagttaaatactgctttaggaagaatgatcatgtagttattgctatgccatatctggagcatgagtcgtttttggacattctgaattctctttcctttcaagaagtacgggaatatatgcttaatctgttcaaagctttgaaacgcattcatcagtttggtattgttcaccgtgatgttaagcccagcaattttttatataataggcgcctgaaaaagtatgccttggtagactttggtttggcccaaggaacccatgatacgaaaatagagcttcttaaatttgtccagtctgaagctcagcaggaaaggtgttcacaaaacaaatcccacataatcacaggaaacaagattccactgagtggcccagtacctaaggagctggatcagcagtccaccacaaaagcttctgttaaaagaccctacacaaatgcacaaattcagattaaacaaggaaaagacggaaaggagggatctgtaggcctttctgtccagcgctctgtttttggagaaagaaatttcaatatacacagctccatttcacatgagagccctgcagtgaaactcatgaagcagtcaaagactgtggatgtactgtctagaaagttagcaacaaaaaagaaggctatttctacgaaagttatgaatagtgctgtgatgaggaaaactgccagttcttgcccagctagcctgacctgtgactgctatgcaacagataaagtttgtagtatttgcctttcaaggcgtcagcaggttgcccctagggcaggtacaccaggattcagagcaccagaggtcttgacaaagtgccccaatcaaactacagcaattgacatgtggtctgcaggtgtcatatttctttctttgcttagtggacgatatccattttataaagcaagtgatgatttaactgctttggcccaaattatgacaattaggggatccagagaaactatccaagctgctaaaacttttgggaaatcaatattatgtagcaaagaagttccagcacaagacttgagaaaactctgtgagagactcaggggtatggattctagcactcccaagttaacaagtgatatacaagggcatgcttctcatcaaccagctatttcagagaagactgaccataaagcttcttgcctcgttcaaacacctccaggacaatactcagggaattcatttaaaaagggggatagtaatagctgtgagcattgttttgatgagtataataccaatttagaaggctggaatgaggtacctgatgaagcttatgacctgcttgataaacttctagatctaaatccagcttcaagaataacagcagaagaagctttgttgcatccattttttaaagatatgagcttgtgataatggatcttcatttaatgtttactgttatgaggtagaataaaaaagaatactttgtaatagccacaagttcttgtttagagaccagagcaggattaataatttattttaacattttagtgtttggtggcacattctaaaatatagattaagaatacttaaaatgcctgggatagttcttgggactaacaacatgatcttctttgagttaaacctacctaagtagattttaggtgggttcctattaggtcagatttttagcttccctaattacctttcactgacatacagaaaaaggagcagttttagttttaattaattaaaattaacagatgtgatgaggattaaatgaatcaaaagacttaatttgtagattcttttagagttatgagctaggtatagtttggggaaactcaacctggtgctggtgctcttaacaattttgtaaataaagaagataatttccttttctagaggtacatattaggccttttatgaacactaaaacaatgaggaaatgttggtcatggggcaaagtatcacttaaaattgaattcatccatttttaaaaaacacttcatgaaagcattctggtgtgaattgccatttttttcttactggcttctcaattttcttccttctctgcccctacctaaaacattctcctcggaaattacatggtgctgaccacaaagtttctggatgttttattaaatattgtacgtgtttacagttgggaatttaaaataatacatacactggttgataaagggaagctgcaggaccaaggtgaagattgatagtccaaatgcttttcttttttgagttgtatattttttcacaccatcttagatataattaggtagctgctgaaaggaaaagtgaatacagaattgacggtattattggagatttttcctctgcgtagagccatccagatctctgtatcctgttttgactaagtcttaggtgggttgggaagacagataatgaagtaggcaaagagaaaaggacccaagatagaggtttatattcagaaatggtatatatcaatgacagcatatcaaacttcctatgggaaaaagtctggtgggtggtcagctgacagatttcccatttagtagtcatagaatacagaaatagtttagggacatgtattcattttgttattttgagcattgataggtcagtatatctacctaatctgtttggtaagtataggatatataaaccattaccattgatctgtcttatgccataatcttaaaaaaaaattgaatgctcttgaatttgtatattcaataaagttatccttttataaaaaaaaagtcgacgcggccgc

SEQ ID NO: 4311 - protein, 574 aa, Homo sapiens
MEASLGIQMDEPMAFSPQRDRFQAEGSLKKNEQNFKLAGVKKDIEKLYEAVPQLSNVFKIEDKIGEGTFSSVYLATAQLQVGPEEKIALKHLIPTSHPIRIAAELQCLTVAGGQDNVMGVKYCFRKNDHVVIAMPYLEHESFLDILNSLSFQEVREYMLNLFKALKRIHQFGIVHRDVKPSNFLYNRRLKKYALVDFGLAQGTHDTKIELLKFVQSEAQQERCSQNKSHIITGNKIPLSGPVPKELDQQSTTKASVKRPYTNAQIQIKQGKDGKEGSVGLSVQRSVFGERNFNIHSSISHESPAVKLMKQSKTVDVLSRKLATKKKAISTKVMNSAVMRKTASSCPASLTCDCYATDKVCSICLSRRQQVAPRAGTPGFRAPEVLTKCPNQTTAIDMWSAGVIFLSLLSGRYPFYKASDDLTALAQIMTIRGSRETIQAAKTFGKSILCSKEVPAQDLRKLCERLRGMDSSTPKLTSDIQGHASHQPAISEKTDHKASCLVQTPPGQYSGNSFKKGDSNSCEHCFDEYNTNLEGWNEVPDEAYDLLDKLLDLNPASRITAEEALLHPFFKDMSL

SEQ ID NO: 4312 - DNA, 225 bp, Homo sapiens
gctgccgcctactactactatacggctgcgagaagacgacagaagggctggaagacatggccactaaataccagggcattgtggcaaccataaagaaaaaggaatacaatttcctagaccagcggaaaatggattttgaccaagattacgaagagttttgcaagcagactaatgaccttcatgtaggttgtataataaaattcctgttggcaaaaaaaaaaaaaa

SEQ ID NO: 4313 - DNA, 2352 bp, Homo sapiens
acagagccccgccgccgccagagcgatgttcccgcagagccggcacccgacgccgcaccaggctgcaggccagcccttcaagttcactatcccggagtccctggaccggattaaagaggaattccagttcctgcaggcgcagtatcacagccttaaattggaatgtgagaaactggcaagtgaaaagacagaaatgcagaggcactatgtgatgtattatgaaatgtcatatggattaaacattgaaatgcacaaacagactgaaatcgccaagagattgaatacgatttgtgcacaagtcatcccatttctgtctcaggaacatcaacaacaggtggcccaggctgttgaacgtgccaaacaggtgaccatggcagagttgaatgccatcatcgggcagcagcagttgcaagctcagcatctttctcatggccacggacccccagttccccttacgcctcacccttcgggacttcagcctcctggaatcccgcccctcgggggcagtgccggccttcttgcgctgtctagtgctctgagtgggcagtctcacttggcaataaaagatgacaagaagcaccacgatgcagagcaccacagagacagagagccgggcacaagtaattccctcctggtcccagacagtctaagaggcacagataaacgcagaaatggacctgaattttccaatgacatcaagaaaaggaaggtggatgataaggactccagccactatgacagtgatggtgacaaaagcgatgacaacttagttgtggatgtgtctaatgaggacccttcttctccgcgagcaagccctgcccactcgccccgggaaaatggaatcgacaaaaatcgcctgctaaagaaggatgcttctagcagtccagcttccacggcctcctcggcaagttccacttctttgaaatccaaagaaatgagcttgcatgaaaaagccagcacgcctgttctgaaatccagcacaccaacgcctcggagcgacatgccaacgccgggcaccagcgccactccaggcctccgtccaggtctcggcaagcctccagccatagaccccctcgttaaccaagcggcagctggcttgaggacacccctggcagtgcccggcccatatcctgctccttttgggatggtcccccacgctggcatgaacggcgagctgaccagcccaggcgctgcctacgccagtttacacaacatgtcgccccagatgagcgccgcagccgcccgcggccgccgtggtcggtacgggcgctcccccatggtggggtttgatcctccccctcacatgagagtacctaccattcctccaaacctggcaggaatccctggggggaaacctgcatactccttccacgttactgcagacggtcagatgcagcctgtcccttttcccccgacgcccctcatcggacccggaatcccccggcatgctcgccagatcaacaccctcaaccacggggaggtggtgtgcgctgtgaccatcagcaaccccacgagacacgtgtacacaggcgggaagggctgcgtcaaggtctgggacatcagccaccctggcaataagagccctgtctcccagctcgactgtctgaacagagacaattatatccgttcctgtaaattgctacccgatggctgcactctcatagtgggaggggaagccagtactttgtccatttgggacctggcggctccaaccccgcgcatcaaggcggagctgacgtcctcggcccccgcctgctacgccctggccatcagccccgattccaaggtctgcttctcatgctgcagcgacggcaacatcgctgtgtgggatctgcacaaccagacactagtgaggcaattccagggccacacagacggagccagctgtattgacatttctaatgatggcaccaagctctggacgggtggtttggacaacacagtcaggtcctgggacctgcgcgaggggcggcagctgcagcagcacgacttcacctcccagatcttctccctggggtactgccccaccggggagtggctggcagtgggcatggagagcagcaatgtggaggtgctgcacgtgaacaagcctgacaagtaccagctgcacctgcatgagagctgcgtgctgtccctgaaatttgcttactgtggtaaatggtttgtgagtactggaaaagataacctcctcaatgcttggcggaccccctatggagccagcatattccagtccaaagagtcctcgtcagtgcttagctgtgacatctctgtggatgataagtacatagtcactggctcgggggacaagaaggctacagtctatgaagtcatctactgaaaacattatgtggt

SEQ ID NO: 4314 - protein, 770 aa, Homo sapiens
MFPQSRHPTPHQAAGQPFKFTIPESLDRIKEEFQFLQAQYHSLKLECEKLASEKTEMQRHYVMYYEMSYGLNIEMHKQTEIAKRLNTICAQVIPFLSQEHQQQVAQAVERAKQVTMAELNAIIGQQQLQAQHLSHGHGPPVPLTPHPSGLQPPGIPPLGGSAGLLALSSALSGQSHLAIKDDKKHHDAEHHRDREPGTSNSLLVPDSLRGTDKRRNGPEFSNDIKKRKVDDKDSSHYDSDGDKSDDNLVVDVSNEDPSSPRASPAHSPRENGIDKNRLLKKDASSSPASTASSASSTSLKSKEMSLHEKASTPVLKSSTPTPRSDMPTPGTSATPGLRPGLGKPPAIDPLVNQAAAGLRTPLAVPGPYPAPFGMVPHAGMNGELTSPGAAYASLHNMSPQMSAAAARGRRGRYGRSPMVGFDPPPHMRVPTIPPNLAGIPGGKPAYSFHVTADGQMQPVPFPPTPLIGPGIPRHARQINTLNHGEVVCAVTISNPTRHVYTGGKGCVKVWDISHPGNKSPVSQLDCLNRDNYIRSCKLLPDGCTLIVGGEASTLSIWDLAAPTPRIKAELTSSAPACYALAISPDSKVCFSCCSDGNIAVWDLHNQTLVRQFQGHTDGASCIDISNDGTKLWTGGLDNTVRSWDLREGRQLQQHDFTSQIFSLGYCPTGEWLAVGMESSNVEVLHVNKPDKYQLHLHESCVLSLKFAYCGKWFVSTGKDNLLNAWRTPYGASIFQSKESSSVLSCDISVDDKYIVTGSGDKKATVYEVIY

SEQ ID NO: 4315 - DNA, 555 bp, Homo sapiens
tttttttttatggtacctagatgatttcctttttattactggaattaaatatacttaaataacatacagagcttaatgaaaaagatcatgaatcactccaccataagaattatcaggacatgataaaatcttatgtatcttaatggtaaaaacaatctgattattaggtctttgtttgaggcagtttatctacagttcaaaaaaatgctttcactgattacattccaaagtatttctttcattgtcagcaggagtgtctggcatttaattaaaatatattcctctaactataaataattgaatggttttaaatctatggctaatattggcaaaccgataaataaccaaataatgtaagaactagaattatcaaaacacttttgcgaacacagttctgcttggagggctccacggaggaagtgcctcactttcaagaaaggaatgacgtttcttctgttttcgttcaattctttcttgtttttccttattttccagccatttttcatattcattaatagcttgtttatctttatcttttttctcagctcttttcag

SEQ ID NO: 4316 - DNA, 325 bp, Homo sapiens
  misc_feature (265)..(265): n is a, c, g, or t
  misc_feature (321)..(321): n is a, c, g, or t
tgaaatgaacatttcacttggtttaggaccgtgtctgtaagtaaaagacaccaatgctaatagatatgacttacaaaaatgccacatatcgaaattgattgaggattgaaatatatatactttggcattgagaagagaggaagagaaaaaaataaaaaaagtgtgacattgtaatatttattgtatttaattaaatcttgaggaaaggaactcttgaggcaatggaccagtgacaggatataaagcctgttttatttggatggcntcattactgaggttttctcatctattcattcatacacggggaggggcctgtccttnaacc

SEQ ID NO: 4317 - DNA, 2397 bp, Homo sapiens
cccccgagccgcgccgagtctgccgccgccgcagcgcctccgctccgccaactccgccggcttaaattggactcctagatccgcgagggcgcggcgcagccgagcagcggctctttcagcattggcaaccccaggggccaatatttcccacttagccacagctccagcatcctctctgtgggctgttcaccaactgtacaaccaccatttcactgtggacattactccctcttacagatatgggagacatgggagatccaccaaaaaaaaaacgtctgatttccctatgtgttggttgcggcaatcagattcacgatcagtatattctgagggtttctccggatttggaatggcatgcggcatgtttgaaatgtgcggagtgtaatcagtatttggacgagagctgtacatgctttgttagggatgggaaaacctactgtaaaagagattatatcaggttgtacgggatcaaatgcgccaagtgcagcatcggcttcagcaagaacgacttcgtgatgcgtgcccgctccaaggtgtatcacatcgagtgtttccgctgtgtggcctgcagccgccagctcatccctggggacgaatttgcgcttcgggaggacggtctcttctgccgagcagaccacgatgtggtggagagggccagtctaggcgctggcgacccgctcagtcccctgcatccagcgcggccactgcaaatggcagcggagcccatctccgccaggcagccagccctgcggccccacgtccacaagcagccggagaagaccacccgcgtgcggactgtgctgaacgagaagcagctgcacaccttgcggacctgctacgccgcaaacccgcggccagatgcgctcatgaaggagcaactggtagagatgacgggcctcagtccccgtgtgatccgggtctggtttcaaaacaagcggtgcaaggacaagaagcgaagcatcatgatgaagcaactccagcagcagcagcccaatgacaaaactaatatccaggggatgacaggaactcccatggtggctgccagtccagagagacacgacggtggcttacaggctaacccagtggaagtacaaagttaccagccaccttggaaagtactgagcgacttcgccttgcagagtgacatagatcagcctgcttttcagcaactggtcaatttttcagaaggaggaccgggctctaattccactggcagtgaagtagcatcaatgtcctctcaacttccagatacacctaacagcatggtagccagtcctattgaggcatgaggaacattcattctgtattttttttccctgttggagaaagtgggaaattataatgtcgaactctgaaacaaaagtatttaacgacccagtcaatgaaaactgaatcaagaaatgaatgctccatgaaatgcacgaagtctgttttaatgacaaggtgatatggtagcaacactgtgaagacaatcatgggattttactagaattaaacaacaaacaaaacgcaaaacccagtatatgctattcaatgatcttagaagtactgaaaaaaaaagacgtttttaaaacgtagaggatttatattcaaggatctcaaagaaagcattttcatttcactgcacatctagagaaaaacaaaaatagaaaattttctagtccatcctaatctgaatggtgctgtttctatattggtcattgccttgccaaacaggagctccagcaaaagcgcaggaagagagactggcctccttggctgaaagagtcctttcaggaaggtggagctgcattggtttgatatgtttaaagttgactttaacaaggggttaattgaaatcctgggtctcttggcctgtcctgtagctggtttattttttactttgccccctccccactttttttgagatccatcctttatcaagaagtctgaagcgactataaaggtttttgaattcagatttaaaaaccaacttataaagcattgcaacaaggttacctctattttgccacaagcgtctcgggattgtgtttgacttgtgtctgtccaagaacttttcccccaaagatgtgtatagttattggttaaaatgactgttttctctctctatggaaataaaaaggaaaaaaaaaaggaaactttttttgtttgctcttgcattgcaaaaattataaagtaatttattatttattgtcggaagacttgccacttttcatgtcatttgacattttttgtttgctgaagtgaaaaaaaaagataaaggttgtacggtggtctttgaattatatgtctaattctatgtgttttgtctttttcttaaatattatgtgaaatcaaagcgccatatgtagaattatatcttcaggactatttcactaataaacatttggcatagat

SEQ ID NO: 4318 - protein, 346 aa, Homo sapiens
MGDPPKKKRLISLCVGCGNQIHDQYILRVSPDLEWHAACLKCAECNQYLDESCTCFVRDGKTYCKRDYIRLYGIKCAKCSIGFSKNDFVMRARSKVYHIECFRCVACSRQLIPGDEFALREDGLFCRADHDVVERASLGAGDPLSPLHPARPLQMAAEPISARQPALRPHVHKQPEKTTRVRTVLNEKQLHTLRTCYAANPRPDALMKEQLVEMTGLSPRVIRVWFQNKRCKDKKRSIMMKQLQQQQPNDKTNIQGMTGTPMVAASPERHDGGLQANPVEVQSYQPPWKVLSDFALQSDIDQPAFQQLVNFSEGGPGSNSTGSEVASMSSQLPDTPNSMVASPIEA

SEQ ID NO: 4319 - DNA, 556 bp, Homo sapiens
cgagtccgcggcggcgtccagggtcggcagcaaccgcagccgagcccgagcgggtggcggcgccatggcgtgcgcggggctgctcaccgtgtgcctgctccggccgcccgcgccccagccccagccccagaccccgcggcacccccagctcgcgcccgacccggggcccgccggacacacgctcttccaggacgttttccgcagagcagacaagaatgatgatgggaagctctcatttgaggaattccagaattactttgccgatggggttctcagcctgggggagctgcaggaactgttcagcggcattgatgggcatctcaccgacaatttagaaacagaaaaactgtgtgactacttctcagagcacctgggtgtctaccggccggtgctggctgcattggaatcgctgaaccgtgcagtgctcgctggcatggatgccaccaagctggagtacgagagggcctccaaagtggaccagtttgtgacacgcttcctgctgcgggagacggtgagccagctgcaagcccttcaaagctcgctgggagggggcgtc

SEQ ID NO: 4320 - DNA, 383 bp, Homo sapiens
  misc_feature (143)..(143): n is a, c, g, or t
  misc_feature (147)..(147): n is a, c, g, or t
  misc_feature (296)..(296): n is a, c, g, or t
  misc_feature (360)..(360): n is a, c, g, or t
aaagagatggggtcttgttctgttgcccaggctggagtgcagtggctcaattatagctcactgcagccttgaactcctgggttcaagcaatccttctgctgtagcctcccgagtagctaggaccataggcgtgtgctgggaanccanctattatttacacttttagttaaagtaactgttattaaaatagcaaatgactcaatgtttggcattccgttgtaggaaaaacctgaagacataagaactacacatgaggaatatgtcatttagcactttcactttttgatctccacagnagacaatgagaagtcataccataacaatgacgacaacttcagtcagcagctgggcttactcctnccacagaatgcgcctttataaac

SEQ ID NO: 4321 - DNA, 565 bp, Homo sapiens
ttttgcagttagtatttttgtattttaattaaatggggaggttgaagattttttaaatatcaaattctgtagataaaaagtatgatttacagtctgaaatggaagaaggcagtggattaaacattgcagaagagaagattattgaactagaaggaatagaagttgaaactaacataaatgaaacacacagtaacaaatgacttgaaaacataaaaacaccatcggcatcaaaactttaaacgccccagtatagggcttaaatggaatccctgaagggcgtgtagtggagaagagagataaagatatttaaaacatactggatgaaagatttagaagctccatggaaaccataaacttcaaatattacagaaatatgattattctaagaacaagaaacatgaagaaaacttcaccaaggaacgccttaatcaaatccatcaaaaccagtgataaaaaggaaatcctaaaaggaataaaaagggaaagaacatgttacatacagagcactaaatataaggatggcataagatttcacatacaaacaagaagtttgcaataaagaact

SEQ ID NO: 4322 - DNA, 542 bp, Homo sapiens
  misc_feature (258)..(258): n is a, c, g, or t
  misc_feature (438)..(438): n is a, c, g, or t
tttttttttttttttttttttatgtattgatttcatgatttatttatatatctccccaccccttccaatacttgaaaaaaaaaaaaagaatggcagtaccagaaggcattggttaagtgtcccaggaaccacacaagcagtgactcctaaagaagttcaaaggaaggagagaacccatggggagggggtgcagtgggggggggtcaggggggctccctggaggggaaaatggtctaggcaaggatgcaaactggccantaaggtgggtccatgcaggaagctgagggaggtggaaggccccggggtctcgagcgcatctgcccgccctagtcggggaagagcaggaagccggagaagacgctgtcagagccctggatgcccaccatgtcgtagtagttattgacaggcaggcacaccttcttgcccacctgcaacctnagcagcacaccgcccgagttgaccctggattgtttttgactgtggccaccagaggtgaccactttgacgccggtggggacagcagcaccgcacagtttgcttga

SEQ ID NO: 4323 - DNA, 2530 bp, Homo sapiens
ccgtgcagtccgagatgggctcgtctcgggcaccctggatggggcgtgtgggtgggcacgggatgttggcactgctgctggctggtctcctcctgccagggaccttggctaagagcattggcaccttctcagacccctgtaaggaccccacgcgtatcacctcccctaacgacccctgcctcactgggaagggtgactccagcggcttcagtagctacagtggctccagcagttctggcagctccatttccagtgccagaagctctggtggtggctccagtggtagctccagcggatccagcattgcccagggtggttctgcaggatcttttaagccaggaacggggtattcccaggtcagctactcctccggatctggctctagtctacaaggtgcatccggttcctcccagctggggagcagcagctctcactcgggaagcagcggctctcactcgggaagcagcagctctcattcgagcagcagcagcagctttcagttcagcagcagcagcttccaagtagggaatggctctgctctgccaaccaatgacaactcttaccgcggaatactaaacccttcccagcctggacaaagctcttcctcttcccaaacctctggggtatccagcagtggccaaagcgtcagctccaaccagcgtccctgtagttcggacatccccgactctccctgcagtggagggcccatcgtctcgcactctggcccctacatccccagctcccactctgtgtcagggggtcagaggcctgtggtggtggtggtggaccagcacggttctggtgcccctggagtggttcaaggtcccccctgtagcaatggtggccttccaggcaagccctgtcccccaatcacctctgtagacaaatcctatggtggctacgaggtggtgggtggctcctctgacagttatctggttccaggcatgacctacagtaagggtaaaatctatcctgtgggctacttcaccaaagagaaccctgtgaaaggctctccaggggtcccttcctttgcagctgggccccccatctctgagggcaaatacttctccagcaaccccatcatccccagccagtcggcagcttcctcggccattgcattccagccagtggggactggtggggtccagctctgtggaggcggctccacgggctccaagggaccctgctctccctccagttctcgagtccccagcagttctagcatttccagcagctccggttcaccctaccatccctgcggcagtgcttcccagagcccctgctccccaccaggcaccggctccttcagcagcagctccagttcccaatcgagtggcaaaatcatccttcagccttgtggcagcaagtccagctcttctggtcacccttgcatgtctgtctcctccttgacactgactgggggccccgatggctctccccatcctgatccctccgctggtgccaagccctgtggctccagcagtgctggaaagatcccctgccgctccatccggatatcctagcccaagtgaagcctctggggccccagctagctgaccctgaagttttcctaccccaaggagagttactcgacagtccataagtcaactgttgtgtgtgtgcatgccttgggcacaaacaagcacatacactatatcccatatgggagaaggccagtgcccaggcatagggttagctcagtttccctccttcccaaaagagtggttctgctttctctactaccctaaggttgcagactctctcttatcaccccttcctccttcctcttctcaaaatggtagattcaaagctcctctcttgattctctcctactgtttaaattcccattccaccacagtgcccctcagccagatcaccaccccttacaattccctctactgtgttgaaatggtccattgagtaacacccccatcaccttctcaactgggaaacccctgaaatgctctcagagcacctctgacgcctgaagaagttataccttcctcttcccctttaccaaataaagcaaagtcaaaccatcatctggaaacagtggccacttttcactgacctctcttcgacatctagtcaacccacccaatatgccactgggtttcgctcccaattccaccccaccctccattacagagctcaccacgccctcctagatcaccgtccccaacacacccattgcctctcaaggcccttatctcagccccttcctgtggccatttccctcagtgcccagatgattccctgggtgagggagacactggggcaccctcagaggttggagcaggctccctgctgtccctggatcctggacagatggctcagtaaactgtgggactaggtgcagacttttgccttcttggagtcctgggtctcctctgagaggtctgggtggtgctcctcctacgcctctagaggtctctgtgttcctcattttccttcaaaagcgggctgtatttctcttctaccttccagctcctcccacagaggaggaagacaataaatatttgttgaactg

SEQ ID NO: 4324 - protein, 486 aa, Homo sapiens
MLALLLAGLLLPGTLAKSIGTFSDPCKDPTRITSPNDPCLTGKGDSSGFSSYSGSSSSGSSISSARSSGGGSSGSSSGSSIAQGGSAGSFKPGTGYSQVSYSSGSGSSLQGASGSSQLGSSSSHSGSSGSHSGSSSSHSSSSSSFQFSSSSFQVGNGSALPTNDNSYRGILNPSQPGQSSSSSQTSGVSSSGQSVSSNQRPCSSDIPDSPCSGGPIVSHSGPYIPSSHSVSGGQRPVVVVVDQHGSGAPGVVQGPPCSNGGLPGKPCPPITSVDKSYGGYEVVGGSSDSYLVPGMTYSKGKIYPVGYFTKENPVKGSPGVPSFAAGPPISEGKYFSSNPIIPSQSAASSAIAFQPVGTGGVQLCGGGSTGSKGPCSPSSSRVPSSSSISSSSGSPYHPCGSASQSPCSPPGTGSFSSSSSSQSSGKIILQPCGSKSSSSGHPCMSVSSLTLTGGPDGSPHPDPSAGAKPCGSSSAGKIPCRSIRIS

SEQ ID NO: 4325 - DNA, 1440 bp, Homo sapiens
cagtcacatttcagccactgctctgagaatttgtgagcagcccctaacaggctgttacttcactacaactgacgatatgatcatcttaatttacttatttctcttgctatgggaagacactcaaggatggggattcaaggatggaatttttcataactccatatggcttgaacgagcagccggtgtgtaccacagagaagcacggtctggcaaatacaagctcacctacgcagaagctaaggcggtgtgtgaatttgaaggcggccatctcgcaacttacaagcagctagaggcagccagaaaaattggatttcatgtctgtgctgctggatggatggctaagggcagagttggataccccattgtgaagccagggcccaactgtggatttggaaaaactggcattattgattatggaatccgtctcaataggagtgaaagatgggatgcctattgctacaacccacacgcaaaggagtgtggtggcgtctttacagatccaaagcaaatttttaaatctccaggcttcccaaatgagtacgaagataaccaaatctgctactggcacattagactcaagtatggtcagcgtattcacctgagttttttagattttgaccttgaagatgacccaggttgcttggctgattatgttgaaatatatgacagttacgatgatgtccatggctttgtgggaagatactgtggagatgagcttccagatgacatcatcagtacaggaaatgtcatgaccttgaagtttctaagtgatgcttcagtgacagctggaggtttccaaatcaaatatgttgcaatggatcctgtatccaaatccagtcaaggaaaaaatacaagtactacttctactggaaataaaaactttttagctggaagatttagccacttataaaaaaaaaaaaaaggatgatcaaaacacacagtgtttatgttggaatcttttggaactcctttgatctcactgttattattaacatttatttattatttttctaaatgtgaaagcaatacataatttagggaaaattggaaaatataggaaactttaaacgagaaaatgaaacctctcataatcccactgcatagaaataacaagcgttaacattttcatatttttttctttcagtcatttttctatttgtggtatatgtatatatgtacctatatgtatttgcatttgaaattttggaatcctgctctatgtacagttttgtattatactttttaaatcttgaactttataaacattttctgaaatcattgattattctacaaaaacatgattttaaacagctgtaaaatattctatgatatgaatgttttatgcattatttaagcctgtctctattgttggaatttcaggtcattttcataaatattgttgcaataaatatccttgaacacaaaaaaaaaaaaaaaaaa

SEQ ID NO: 4326 - protein, 277 aa, Homo sapiens
MIILIYLFLLLWEDTQGWGFKDGIFHNSIWLERAAGVYHREARSGKYKLTYAEAKAVCEFEGGHLATYKQLEAARKIGFHVCAAGWMAKGRVGYPIVKPGPNCGFGKTGIIDYGIRLNRSERWDAYCYNPHAKECGGVFTDPKQIFKSPGFPNEYEDNQICYWHIRLKYGQRIHLSFLDFDLEDDPGCLADYVEIYDSYDDVHGFVGRYCGDELPDDIISTGNVMTLKFLSDASVTAGGFQIKYVAMDPVSKSSQGKNTSTTSTGNKNFLAGRFSHL

SEQ ID NO: 4327 - DNA, 328 bp, Homo sapiens
ttttttttttttttttttttttttttatacatatacaaacatttttattgacaagtgagccaataagggcacatttagtttacagataaccaaaaacatttgaaatgcataacattaaaatttccaagattcatgttgcagtacaaacatgtggcaggttaaacatcaggcataaaaaggacaaatactgaaacgcaaagggccagagatcccaagtcgcttaacactatttaaaatgttattcaactgcaaacttcagtctttggaaccattccagatagctactggttaagtgatacgaagtaggaaaaaagaaggttctggaagg

SEQ ID NO: 4328 - DNA, 3447 bp, Homo sapiens
gggcacagggtgctccccagacctccctcctccaagtagagctgaaatgggaaggaacccctgggacagcccctgccctgctagatctttgcctcagattgctgctgtggccaggcccaggatctccagccctatggctctgagtcctgacatgctgggggcccaggggctctggacacactccatccagggatcccttcctgccatctgggcagcaaccatggggacaaagggaggaagcagagtcctgtttccttgccacttgtccaaggcacttccccatcctgacagcggcccccacccagcccaggattctgggttgtggtctcgagctcacttcccgttatctttggggctggggctgacatcaggaggacatctgactggtggatggagccagcctgggaacatcgtagctggggcagtgcctagggctctcccttcccagagagacatggagaatggggttgagggagggcccttccctagccgctgtggcaactccagtgagctgttctgggcaaagtgtggcccaagtcggcagccccagccctgcagtgctggggacgctgacaggacacgggaagaggccatgctctccctcgggacctgctgttccatgtgtcccaagccctcctgctttccagatggcccctcaggaaaccacctttccagggcctctgctcccttgggcgctcgctgggtctgcatcaacggagtgtgggtagagccgggaggacccagccctgccaggctgaaggagggctcctcacggacacacaggccaggaggcaagcatgggcgtcttgcgggcggtagcgccgacactgtgcgctctcctgcagacagcctctccacgtcaagcttccagtctgtcaagtccatctctaattcaggtgagcaggctggcgtccatgtgctcacaggggtgagtgccccacggggaccccagcctgggtggcctctaggggtgctgaccaggtaccctctgctgggccaagctccaggatttggggatgaaggtgcagctgaaaagagccctgcaagctgaagccaccgggaggggattaagggggggtgggcaggaccagggaccagtcacagggcagtaaggcctcacagcaggcaccccagggtggggcagcaagcaggcaggaggggcctccccgggtggccgcctagggaggacgtaccctggctgcccagcagcagccctgcttggccgtgtccccgccacaagcaggcaggacacaggagggatggcactgcccacggagccctgggctcatggcaccttctgcagagtgaactgggagcagagagcctcttttccccactctgtgaggccgggcattttcctcagcccagccctaaccctcaccattcctgtgatgggcccaggtgctggacgggccttgtccttgccgaggaaacccatgcaggctgggtcccaagcctctcatgcagtttcattttacccaagatggggccagcttccactatgttgattgttctagagtgttcacaggcaccacccatgggcttcaccctcagaaccacattgattccccccagaaccctccaaggcaggcttccctttacagaggaggaaactgaggcagggacaggggcttcttgggtacacacagctgttcctggaaaacttgggcggtgactgttggtgcctgcagtgaccggccttgtagggtctgacttgcagccaactctcaaggcaaggccaggccccagcccggctccttcaacaagcaagattcaaaagctgacgtcccccagaaggcggacctggaagaggagcccctacttcacaacagcaagctggacaaggttcctggggtacaagggcaggccaggtaaggcttgggtgttcctggggtgcaagggcaggccaggtaagtcttgcctgcaccctaagggccccatgactacatttactaggctcacgccctgcagtcagccaactgctctgcccctagctccaggggcctgtctccagggctcatgatagcagatgacggccacgctctacccatcggtgggcgctgtcttcctcccttcccctgggggtcctgcagagtacctgtgctgacctgagcccacgaggggggccagtagcggcccctaaaccacttcctcagagaaaagtaaagtaatattctgaccaagagaaggcttgctgcccctggccacagcctgcctttggagggcactaggccagcaggtcagagtaggaacaggttctggtgatccctgagtttgcgggactgccctgagatgctacagagcgcacactttcagcagcgcaaccagcaggacaggctcctgcatctgcacatcccgagaccaggcctggagcaagatgccccactgggtgtggggtcacgaccaagagcagcctggcagctagctggtcacccactgaagcccatctgacccttagggcaccttcagaggggagaaagggacaggccccagtcccagagacccccacctggtgcccagagcaccctgctcagtgggagaggggaaccaggccctcttccccacattggcctgggcgctgcctggggaggtatgctgggtgggtggttagacgcacctgggcaggtcacctctggctgctgcaatgactgtttcagaaaggagaaagcagaggcctctaacgcaggagctgcctgtatggggaacagccagcaccagggcaggcagatgggggcggcggcacaccccccaatgatcctgccccttcccctgcgaaagcccaccacacttaggcagtgcgaagtgctcatccgcgagctgtggaataccaacctcctgcagacccaagagctgcagcacctcaagtccctcctggaagggagccagaggccccaggcagtcccggaggaagctagctttcccagggaccaagaagccacgcatttccccaaggtctccaccaagagcctctccaagaaatgcctgcttctgagcccacctgtggcggagcgtgccatcctgcccgcactgaagcagaccccgaagaacaactttgccgagaggcagaagaggctgcaggcaatgcagaaacggcgcctgcatcgctcggtgctttgagctacccgcatctggtcagtgccaggcccaccaacctgcagctggagattggctctctatagcatttcctgacacttccgctacttttaggcctggctaaattccaagatagataacactcaagatagataaagtacttgatctccaaactgacaaactgtttattttctagctgttattttgctatttggcatttacataaaagcacacgatgaagcaggtatcgccttacctgttgaaactgaaaataaagcttgtttatttccaaaaaaaaaaaaaaaaaaaaaaaaaaaaaaaaaaaaaaaaaaaaaaaaaaaaaaaaaaaaaaag

SEQ ID NO: 4329 - protein, 349 aa, Homo sapiens
GTGCSPDLPPPSRAEMGRNPWDSPCPARSLPQIAAVARPRISSPMALSPDMLGAQGLWTHSIQGSLPAIWAATMGTKGGSRVLFPCHLSKALPHPDSGPHPAQDSGLWSRAHFPLSLGLGLTSGGHLTGGWSQPGNIVAGAVPRALPSQRDMENGVEGGPFPSRCGNSSELFWAKCGPSRQPQPCSAGDADRTREEAMLSLGTCCSMCPKPSCFPDGPSGNHLSRASAPLGARWVCINGVWVEPGGPSPARLKEGSSRTHRPGGKHGRLAGGSADTVRSPADSLSTSSFQSVKSISNSGEQAGVHVLTGVSAPRGPQPGWPLGVLTRYPLLGQAPGFGDEGAAEKSPAS

SEQ ID NO: 4330 - DNA, 477 bp, Homo sapiens
ggtgatctgaggatcccggccgcgcgagagccatacgaattctgtctacttatgaagagtatatccaactaagcagtacctccctgtgtatacaacttatctgctgatcccaaggtatgggaagaagctgcactcagaaacttgcaaattgtgcaactgttccccacgattcccttggggccagtgccgactgaggcatctccaggaggccccagttgggcttggggacatgctgagaggtgacagcactgctctcaagtcatatcctctgcttctgcaaaagctgtggagctcacccatcaatagcagctccatgccgggcgcagtggctcacgcctgtaatcccagcactttcggaggctcaggcgggcagatcatctgaggtcaggagtccgtgaccagcctggccaacatggtgaaaccccgtctccactaaaagtacaaaacttagctgggtgtggacattcggcgtgtgca

SEQ ID NO: 4331 - DNA, 665 bp, Homo sapiens
cgcatcttacggctaggtacgaggctgggtggcggtgcggctgccccgctacgcgccctggacgactttgttctggggtcggcgcgtctggcggctccggatccatgcgacccgcagcgatggtgccaccgcgtcatcaacaacctcctctactaccaaaccaactaccttctctgcttcggcatcggcctcgctctcgccgggtacgtgcggccacttcatacgctcctgagcgcgctggtagtggcggtggccctcggcgtgctggtgtgggcagctgagacccgcgcagctgtgcgccgctgccgccgcagccaccctgcagcctgcctggccgcagtgcttgccgtcggcctcctggtgctctgggtcgcgggcggcgcttgcaccttcctgttcagcatcgccgggccggtgcttctgatcctggtgcacgcctcgttgcgcctgcgcaaccttaagaacaagattgagaacaagatcgagagcattggtctcaagcggacgccaatgggcctgctactagaggcactgggacaagagcaggaggctggatcctaggcccctgggatctgtacccaggacctggagaataccaacccaccccagccataattgggaccaagagccctttcccagcacttaaaacaggagcctagagcccc

SEQ ID NO: 4332 - DNA, 1458 bp, Homo sapiens
  misc_feature (410)..(410): n is a, c, g, or t
  misc_feature (1096)..(1096): n is a, c, g, or t
  misc_feature (1134)..(1134): n is a, c, g, or t
  misc_feature (1433)..(1433): n is a, c, g, or t
attgattaaaaggtgacctttcttattggactgataagacaaaaatatagattccaaatctattgacatatgatatcacatccacaaatgtttgcctatttttgtagcattattttggttgcaaagtctcttagggaatgcacaaaaataatacaaccttaaaaatcagactagaagatggaatataagtggtttccttgtaatttttttttaagcttggagaggtaataacacatctttgaattcaaactgaggactgctgcttaatggtgcttttacagggtggttctaaaatttttgagagtcaggtattgctttctctgactgtttaattcaccactggcacgtgtttcctatcctcaagcataagtttaaaagattacaaacctcatgctgctcagttttttctntccagtaaatcagatgcatggtttctctaaatttacatatagaaaatcgagatgtggtgggtattagactaacacttcagtgataggaagaagagactgatttctcatatttgtgtaaaacattctcttacctaactaccatctggtccacattaatttcctctcatagccatagctttccattaccaatgagttttccatgtattcacagcatatgggccaggaaatctttctacagagaatgtgtcccttaggcatatatttcccctagattaccgtattaagaaatgttctccctaaaccatacttatggcattaccataaaattgcctcttgaacacagttaaattgaaagtgctcaaaatgcatatcaattcaggtaaaagaaatcttgctacttggaggggaggtattttttattcttccccactttctctttctaactccctacaaagctatttctaattatttgcttatgctgggcactgaattttctcttaggctgaccatatattttattaaagtagtcttgaattcaggagtggaaaaaaaaaagttatgttttagacctcaatgtaagctgaaaggaaataaaggaacttctatatttccatttctcaggctgattttccttcccctgttctcttatctgtatcatgacatgagacgtgaacctcagaaatgtnaaaacaaaaagtcctagaataaagcattcccttgaatnttaaatgaacatgcttttagcagcctggatacgaagcagactattttcaacaaattgaatgtttccccacttgtgtgagagccaaacaagtgccatacagaaagggacctcttcaatgttaccaaagctttgtggcagcatttaagtgtggtggcgccatagaagtcactatagcatggacgagccacttggcttgctttttcctgctaatcaaagttttaagaagataaaaagctatctttgttatatatgttttgtctaatttgcaatattacagtctcctggggggaaatccaacntccaataataattgtaaaaaaaaaa

SEQ ID NO: 4333 - DNA, 440 bp, Homo sapiens
  misc_feature (17)..(17): n is a, c, g, or t
  misc_feature (303)..(303): n is a, c, g, or t
  misc_feature (313)..(313): n is a, c, g, or t
  misc_feature (406)..(406): n is a, c, g, or t
  misc_feature (419)..(419): n is a, c, g, or t
gccagactgcttagcgnctgagatccgcgtgaaaagtcctctgcccacgagagcagggagttggggccacgcagaaatggcctcaaggggactctgctccacgtggggccaggcgtgtgactgacgctgtccgacgaaggcgcctacggacggacgcagcacacgaagtcacgtgcaagtgcctttgattcgttccttctttctaaagacgacagctttcgttgttagcactgaattattgaaaatgtcaaccagattctagaaactgcggtcatccagttcttcctgacacccgggatgggngcttgggaanccgtttgaagccttaatagatcattttacattcaatttttttaactcagcaagtgagaacttacaagaggggtttttttttttttttttttcncttaatggaacanattttctaaaggaattttttt

SEQ ID NO: 4334 - DNA, 255 bp, Homo sapiens
gtaggcagggactgggttctactgtgagctgagatccctggagctccatgaaaaggagaaaagaatgccgtgtttcctggatctatggagggaatcccaggatttcctggaaaccgaggattaatgggccaaaagggagaaattgggcctccaggacagcaaggaaaaaaaggagccccagggatgcctggtttaatgggaagcaatggctcaccaggccagcctggaacaccgggatctaagggaagcaaaggt

SEQ ID NO: 4335 - DNA, 342 bp, Homo sapiens
  misc_feature (20)..(20): n is a, c, g, or t
  misc_feature (22)..(22): n is a, c, g, or t
  misc_feature (30)..(30): n is a, c, g, or t
  misc_feature (36)..(36): n is a, c, g, or t
  misc_feature (39)..(39): n is a, c, g, or t
gctgctgcctgcaggtaaantnaaaagggnaaattntanctcccccttggtggtggtgctcaagagcgctgaacggatgggttacaccgggctcaatatcacctatccctgcaggcaggccatcctccccttgctcgatgagctttctgacgaggcgcgcggtattggcgcggtcaacacggtggtgttcagggagggcaagcgcatcggccacaacaccgattgccttgggtttgccgaggggtttcgccgtggtcttgcccaggccgcacgtcaccgtgtgatacagatgggggctggcggcgccggtgcggcggtggcacatgcgttgctgtccgaagg

SEQ ID NO: 4336 - DNA, 366 bp, Homo sapiens
gattcggcactaggccacaaccccacaagctccaacccatccctccagcgtctcagaaagcactatttctggagccaaggaggagactgtggccaccctcaccatgaccgaccgggtgcccagtcctctctccacagtggtatccacagccacaggaatttcctcaaccgcctggtccccgccgggactcggaagcctgggacagcagggaacatctcccatgtggccgagggggacaaaccgcagcacagagccaccatctgcctgagcaagatggatatcgcctgggtgatcctggccatcagcgtgcccatctcctcctgctctgtcctgctgacggtgtgctgcatgaagaggaagaagaag

SEQ ID NO: 4337 - DNA, 367 bp, Homo sapiens
cccagaggctgggtgcgaggctagcggggtcagtcgggttctaggccatacggctgcagcccaggcggccggagcggaacccagccccgctccgagtgccacgtctccaggaaccccctccttactcttggacaacactccgcccccgcccgggcctccgtcccccaaaccgccctcatttgtgcagcgcagatccttcggacacatccctaggtgtctccatcctcattcggtccatccaactcccagacctcacgtcaaccggctgcaccccactttccagcctgcgccccagatctgcagccttcgcccctagatacacccgcctggtgatgaggcgctcctcgcgttccttccgtctccagtg

SEQ ID NO: 4338 - DNA, 431 bp, Homo sapiens
attaattcgaatttagcaatacgatctctaagtggtgccatgaattaaagatgccacttcgggctttcagtgcttctcagcttttgggcaaagggcttgtgtcttcaggggcagctcagctttcctgagtcctgactgctggcattcgtctgcatttgcctgtgcttctgcgagtcggacctcaagctgccaacactgcatgtggataaatccagttttcccgggccagcatgcaaaatgaagaggactccatctaagctgagaagcatggcctccccagagcagcctgcagcctccaagccttcctggcccaggcaaatgccagtgtgcaccaggctggctgctgggggcaggtctttggaggggagcagcatttccagccttctgaacatagttaatagtaatgacagccgtaacactaacgcgctctg

SEQ ID NO: 4339 - DNA, 471 bp, Homo sapiens
  misc_feature (268)..(268): n is a, c, g, or t
ggctggtcagctccagacagacagaagaaagggattcttttcagtctagaaaaatgctcaccccttcctcagaacatttccactgtgacgaaaagagactgatgaagcctcagagagaaaggcaactctgggtggtgatgcaatagtgcagaatccagaatggatgtcctctttgtagccatctttgctgtgcacttatcctgggacaagaatatgaggatgaagaaagactgggagaggatgaatattatcaggtggtctattatanacagtcacccccagttatgatgactttagtgcagatttcaccattgattactccatatttgagtcagaggacaggctgaacaggttggataaggacataacagaagcaatagagactaccattagtcttgaaacagcacgtgcagaccatccgaagcctgtaactgtgaaaccagtaacaacggaacctcagagtccagatct

SEQ ID NO: 4340 - DNA, 374 bp, Homo sapiens
aatgggattaataatacttacctacctcacaggggtgttgtgaggctctattcatttgctcctttattctttcctgtattctctgtatgtccagcactttgtagccatgggaggaaagggactataaaagtgtacaatgttaatggaatgatacggtacctgaaagccttgttttctagtaagaaaatgctaccttgctgtacatacttataaccttgtatttggaaatgagaaataggtttatattttcagatctctcaaaaatcacatcatttgaccaaagaataatttaagacacatagaacagatttttttaatttatattttcatcctgaccagcttagttctaataatttttagttgtgagtgattaa

SEQ ID NO: 4341 - DNA, 455 bp, Homo sapiens
aagtcacctcttctggtttaatttaacctgccaagtaccctacaaatcagcatcttgtttgaagggagattgaggacacaggcagatagttcctatgtattcacctgtatctggtatcatgatggtgaggaacagggttatgtcttgacatttgcagccctgaggacctccactgacaactggcttaagatccagaaggcatcttttccaaatcacataccaaacttgtattttaaaaatttgataataaatgaacaaaattgagagcttgtacaacatgtatatttcttgatcaagtgcttagataatacatgcttatggtattggttcaccagcagtgaatgtttctttggctgaccagcacttgttactctatgatattcccagacattgcttgcttgagacattggataaaaccacccaacttcacctatcatttgggtttatgggttcag

SEQ ID NO: 4342 - DNA, 362 bp, Homo sapiens
  misc_feature (12)..(12): n is a, c, g, or t
  misc_feature (348)..(348): n is a, c, g, or t
  misc_feature (350)..(350): n is a, c, g, or t
tgatccggccgnaaaccaaggaccttctgttcagagatgacacagtatgtttggccaaacttcatgacataaacacatattaaaaatacttaggagaagaatatgtcaaggctgttgggaacctgagaaaatgctccacctcatcactcctggaagcctgcactttccgtagaccttaaaatctcagaggtagggctgccaccaaggtgaagatgggaacgcagatgatccatgagtttgccctggtttcactggcccaagtggtttgtgctaaccacgtctgtcttcacagctctgtgttgccatgtgtgctgaacaaaaaataaaaattattattgattttataananaaaaaaaaaaaa

SEQ ID NO: 4343 - DNA, 2156 bp, Homo sapiens
ggcacgagcccagaaacaaagacttcacggacaaagtcccttggaaccagagagaagccgggatggaaactccaaacaccacagaggactatgacacgaccacagagtttgactatggggatgcaactccgtgccagaaggtgaacgagagggcctttggggcccaactgctgccccctctgtactccttggtatttgtcattggcctggttggaaacatcctggtggtcctggtccttgtgcaatacaagaggctaaaaaacatgaccagcatctacctcctgaacctggccatttctgacctgctcttcctgttcacgcttcccttctggatcgactacaagttgaaggatgactgggtttttggtgatgccatgtgtaagatcctctctgggttttattacacaggcttgtacagcgagatctttttcatcatcctgctgacgattgacaggtacctggccatcgtccacgccgtgtttgccttgcgggcacggaccgtcacttttggtgtcatcaccagcatcatcatttgggccctggccatcttggcttccatgccaggcttatacttttccaagacccaatgggaattcactcaccacacctgcagccttcactttcctcacgaaagcctacgagagtggaagctgtttcaggctctgaaactgaacctctttgggctggtattgcctttgttggtcatgatcatctgctacacagggattataaagattctgctaagacgaccaaatgagaagaaatccaaagctgtccgtttgatttttgtcatcatgatcatcttttttctcttttggaccccctacaatttgactatacttatttctgttttccaagacttcctgttcacccatgagtgtgagcagagcagacatttggacctggctgtgcaagtgacggaggtgatcgcctacacgcactgctgtgtcaacccagtgatctacgccttcgttggtgagaggttccggaagtacctgcggcagttgttccacaggcgtgtggctgtgcacctggttaaatggctccccttcctctccgtggacaggctggagagggtcagctccacatctccctccacaggggagcatgaactctctgctgggttctgactcagaccataggaggccaacccaaaataagcaggcgtgacctgccaggcacactgagccagcagcctggctctcccagccaggttctgactcttggcacagcatggagtcacagccacttgggatagagagggaatgtaatggtggcctggggcttctgaggcttctggggcttcagtcttttccatgaacttctcccctggtagaaagaagatgaatgagcaaaaccaaatattccagagactgggactaagtgtaccagagaagggcttggactcaagcaagatttcagatttgtgaccattagcatttgtcaacaaagtcacccacttcccactattgcttgcacaaaccaattaaacccagtagtggtgactgtgggctccattcaaagtgagctcctaagccatgggagacactgatgtatgaggaatttctgttcttccatcacctccccccccccgccaccctcccactgccaagaacttggaaatagtgatttccacagtgactccactctgagtcccagagccaatcagtagccagcatctgcctccccttcactcccaccgcaggatttgggctcttggaatcctggggaacatagaactcatgacggaagagttgagacctaacgagaaatagaaatgggggaactactgctggcagtggaactaagaaagcccttaggaagaatttttatatccactaaaatcaaacaattcagggagtgggctaagcacgggccatatgaataacatggtgtgcttcttaaaatagccataaaggggagggactcatcatttccatttacccttcttttctgactatttttcagaatctctcttcttttcaagttgggtgatatgttggtagattctaatggctttattgcagcgattaataacaggcaaaaggaagcagggttggtttcccttctttttgttcttcatctaagccttctggttttatgggtcagagttccgactgccatcttggacttgtcagcaaaaaaaaaaaaaaaaa

SEQ ID NO: 4344 - protein, 355 aa, Homo sapiens
METPNTTEDYDTTTEFDYGDATPCQKVNERAFGAQLLPPLYSLVFVIGLVGNILVVLVLVQYKRLKNMTSIYLLNLAISDLLFLFTLPFWIDYKLKDDWVFGDAMCKILSGFYYTGLYSEIFFIILLTIDRYLAIVHAVFALRARTVTFGVITSIIIWALAILASMPGLYFSKTQWEFTHHTCSLHFPHESLREWKLFQALKLNLFGLVLPLLVMIICYTGIIKILLRRPNEKKSKAVRLIFVIMIIFFLFWTPYNLTILISVFQDFLFTHECEQSRHLDLAVQVTEVIAYTHCCVNPVIYAFVGERFRKYLRQLFHRRVAVHLVKWLPFLSVDRLERVSSTSPSTGEHELSAGF

SEQ ID NO: 4345 - DNA, 3014 bp, Homo sapiens
gcggagcccacggagcccacggaggagcccacggaggagccccagcgtccgaacgggcagaccccctcgagccgcgaaggagcccgagaagcagccacgatgtgcggaatctttgcctacatgaactacagagtcccccggacgaggaaggagatcttcgaaaccctcatcaagggcctgcagcggctggagtacagaggctacgactcggcaggtgtggcgatcgatgggaataatcacgaagtcaaagaaagacacattcagctggtcaagaaaagggggaaagtcaaggctctcgatgaagaactttacaaacaagacagcatggacttaaaagtggagtttgagacacacttcggcattgcccacacgcgctgggccacccacggggtccccagtgctgtcaacagccaccctcagcgctcagacaaaggcaacgaatttgttgtcatccacaatgggatcatcacaaattacaaagatctgaggaaatttctggaaagcaaaggctacgagtttgagtcagaaacagatacagagaccatcgccaagctgattaaatatgtgttcgacaacagagaaactgaggacattacgttttcaacgttggtcgagagagtcattcagcagttggaaggtgcattcgcgctggttttcaagagtgtccactacccaggagaagccgttgccacacggagaggcagccccctgctcatcggagtccggagcaaatacaagctctccacagaacagatccctatcttatacaggacgtgcactctggagaatgtgaagaatatctgtaagacacggatgaagaggctggacagctccgcctgcctgcatgctgtgggcgacaaggccgtggaattcttctttgcttctgatgcaagcgctatcatagagcacaccaaccgggtcatcttcctggaggacgatgacatcgccgcagtggctgatgggaaactctccattcaccgggtcaagcgctcggccagtgatgacccatctcgagccatccagaccttgcagatggaactgcagcaaatcatgaaaggtaacttcagtgcgtttatgcagaaggagatcttcgaacagccagaatcagttttcaatactatgagaggtcgggtgaattttgaaaccaacacagtgctcctgggtggcttgaaggaccacttgaaggagattcgacgatgccgacggctcatcgtgattggctgtggaaccagctaccacgctgccgtggctacgcggcaagttttggaggaactgactgagcttcctgtgatggttgaacttgctagtgattttctggacaggaacacacctgtgttcagggatgacgtttgctttttcatcagccagtcaggcgagaccgcggacaccctcctggcgctgcgctactgtaaggaccgcggcgctctcaccgtgggcgtcaccaacaccgtgggcagctccatctctcgcgagaccgactgcggcgtccacatcaacgcagggccggagatcggcgtggccagcaccaaggcttataccagtcagttcatctctctggtgatgtttggtttgatgatgtctgaagaccgaatttcactacaaaacaggaggcaagagatcatccgtggcttgagatctttacctgagctgatcaaggaagtgctgtctctggaggagaagatccacgacttggccctggagctctacacgcagagatcgctgctggtgatggggcggggctacaactatgccacctgcctggaaggagccctgaaaattaaagagataacctacatgcactcagaaggcatcctggctggggagctgaagcacgggcccctggcactgattgacaagcagatgcccgtcatcatggtcattatgaaggatccttgcttcgccaaatgccagaacgccctgcagcaagtcacggcccgccagggtcgccccattatactgtgctccaaggacgatactgaaagttccaagtttgcgtataagacaattgagctgccccacactgtggactgcctccagggcatcctgagcgtgattccgctgcagctgctgtccttccacctggctgttctccgaggatatgacgttgacttccccagaaatctggccaagtctgtaactgtggaatgaggctgagaccgtgacaagaccatcaccacctttcatctgattccagacctgtcccaacagcagggatgctacatgggaagagaagtggacatcccacatgttctgcgtgctcctgtagagcttgacagcttccacgtgccttctacccaagtgcttttgcttacagcagatactgtttctctgtgtcctgaagtcgccagaggagaagggaatcattgtttacacatggggatcagagcagacttctccactactgtgcaatagagatacagctctcttcagagtaactgtgaaccttttataaccaacactagagttagttttaaaagacaagatatttataatgacgactgtatagcttttaagttatttttctagtatgtggctttctgtagccgtggtaacggccaaactgttcatcctagctacccatgctctgtgtccaggcttgctcctggcaggtggcattcatctcagatgtgagcacaaggcattggccctctggactcctttctccttttctttcctctctaggctgctcctgaatcctgttctctgacatccgtggagcccctcctgcatccacctatgcctcctataagtccagttgaaatctcagcctccttcaacattttcttctcgtgtgtggcccacatccctccacttctccaacttctgtttaatctgatcacggctctttttaagccctggcagcattttggtccctgctccttgcccatagtaaaacagcttgaaatatcccatgcaagagagtagtttcaagtgggcgactctgctctctatttaaaagcgtgcacaatcaaaagtactatgcaattttaggacaataaagaacatacagttcc

SEQ ID NO: 4346 - protein, 682 aa, Homo sapiens
MCGIFAYMNYRVPRTRKEIFETLIKGLQRLEYRGYDSAGVAIDGNNHEVKERHIQLVKKRGKVKALDEELYKQDSMDLKVEFETHFGIAHTRWATHGVPSAVNSHPQRSDKGNEFVVIHNGIITNYKDLRKFLESKGYEFESETDTETIAKLIKYVFDNRETEDITFSTLVERVIQQLEGAFALVFKSVHYPGEAVATRRGSPLLIGVRSKYKLSTEQIPILYRTCTLENVKNICKTRMKRLDSSACLHAVGDKAVEFFFASDASAIIEHTNRVIFLEDDDIAAVADGKLSIHRVKRSASDDPSRAIQTLQMELQQIMKGNFSAFMQKEIFEQPESVFNTMRGRVNFETNTVLLGGLKDHLKEIRRCRRLIVIGCGTSYHAAVATRQVLEELTELPVMVELASDFLDRNTPVFRDDVCFFISQSGETADTLLALRYCKDRGALTVGVTNTVGSSISRETDCGVHINAGPEIGVASTKAYTSQFISLVMFGLMMSEDRISLQNRRQEIIRGLRSLPELIKEVLSLEEKIHDLALELYTQRSLLVMGRGYNYATCLEGALKIKEITYMHSEGILAGELKHGPLALIDKQMPVIMVIMKDPCFAKCQNALQQVTARQGRPIILCSKDDTESSKFAYKTIELPHTVDCLQGILSVIPLQLLSFHLAVLRGYDVDFPRNLAKSVTVE

SEQ ID NO: 4347 - DNA, 394 bp, Homo sapiens
  misc_feature (42)..(42): n is a, c, g, or t
  misc_feature (388)..(388): n is a, c, g, or t
attcggcacagggcgaggttttatacacctgaaagaagagantgtcaagacgaagagccgtttacaagctaagcagcagccccagcccagccagacggaatccccccaagaagcccagataatccaggccaagaagaggaaaactacccaggatgtcaaaaaaagaagagaggaggtcaccaagaaacatcagtatgaaattaggaattgttggccacctgtattatctggggggatcagtccttgcattatcattgaaacacctcacaaagaaataggaacaagtgatttctccagatttacaaattacagatttaaaaatctttttattaatccttcacctttgcctgattttaagctgggggatgttcaaaaggaagttctgggntaaaca

SEQ ID NO: 4348 - DNA, 962 bp, Homo sapiens
cagcgaacgttgcatagcctcccgggaccctcaggccgccacctctgctgccaggcagtccaggtcctcagcttcccggggcccttgtccgtgaactctgtgctcagctgccacaccttcactgtgccctgggcatcgcccgcagccaagagctgagtctgctggctgttgaactccagacagtagacaggggctttcatcctgggtttgcttgatcaaaactgtgggtttctgggagcttttctggagatcaaacagctgcacgtcacctttcccagaggcagctgcaaaaaccaagggccgcactggggaccagcgcacagcaaacagatacttgagggagagctgcagcgaagtcaagggaggggcctgcagcatggagtacaggtggacatgcccgtcagtcccagcgctcaggaagagattcctgtggaagggggaacagctcacagagtagatgggaccgccgtggggggagaaggtaaactgtgctggggcccgcaggggcacggagctgggcatccgcgtgagggctgcctctccagctgccagggaacacttgagcgggaagccgccttccgtgcccagaatgaacagcctagggtcaaagctggagaaggccactgccgtggcgcccacctcggtctccccgcggggatgcttcttgagcttgggtgctccgtgggcagctgctgcatgaccagggcgaagcctactgtgagcttgaagctgggctaacccccgatgccactggccagaagtaccaccttccagtcaggtggcaacactcagccacctggacaccggtaggtgtgcgcaggctcggtcgccacaacacttgggacccacggacggttggattcaacagacaggattgccaaagcagggtccagatggccaggccacacaaacctcaccaaaagcctctacccttgggggcctcgttgcaacagacagggacc

SEQ ID NO: 4349 - DNA, 2591 bp, Homo sapiens
cccagtccagcctccctactcagggccgagggcaccaggaggatggtcgttgcaaaagaatatgggaggccgggtgcggcggctcacgcctgtaatcccagtacttctgggaggccaaggggggcggatgacttgaggccgtgcaacacctgccagcaccagcatttgacacggaatcgaagaaaacaggcaggacataccctgactacactagtacaagtcatcggcgtctcggggtcctgggttttagaaatcacactgtcagggagggctgatggggtcctgggttggaggctggaagtggaggaatcgaggcataggcagaaacttgaaggaagggtcagccgagctggccagaagggggctcctcgccacggtccccagggaagcactttgctcatgggccccggccctgagagaggagctcctgcctcttcccactcggagagggctgacaggagaggcttggcctggtgtttcctgatgagatagcgggcacgttccgggaagcggtgagcaggcccagcagacatcagatgtggtgcttcctgtctcctgtgaatgcgcctggcccttgaggggggtctgggatggagagtcgggggaggggaaccccactcgcccttctccttgttgttcttggcagctggacttgggcaattgtgcctccaccctctggaggggcctccccctgtgctggctgcagatcagaggggcgatggggagggatccaccggtccaggcgggggctcaccttccagacccgggcgtgggcgagaggggtgcatgggaggacgcccgatgcctcagggcccccggtcagcagcgaggcacagactctcctctgggcggtgatggccctgcacgaggtccgtgtgccgtctgcctgcacagggagaggaaaggatcacgcgaccatgggtacgttggccacctgaaggttgagtcccgcagcctagagactggagcgtggggaccaggaggagcttcttagcggaactgggctggggctcatgcagccctccaggagcccccgacgcgacgccctggctcatcccgggtgaagaggctgctgagtctgaactgatgacagtggacgggtggccgccggttcccaacgcatggttgggcctggaacccaggtgactctgggagatgtggtcacagtcacagccgtctgtgggcctttgggttcaaaacagcgcgagtcacaggagacagaagggaatctgagcttgcgattgctcattcttgtcaccctcctggctctgggacacctctgccatctcctaccaagggtaccccattcctggcgagttggaaagtggcctcatgggcagaaaacgagggcaaagggagctgcgtgctgtgagagacgtccccgcacccaccctccccaccagctcccttgggcctttcctccctcccagccccacccacagccgggtggctcccttcactgtctctcctgggtttaactcagaggctggcgagcaggggctgaccagtgtgtgtcggagactctccgagtggccagcacgggcagggagctcataggcttggccctgagaccaggtcctgtctgagaaggaggcaggtcctgtctgagaagaaggacccccacccctcctgcctgggaccctgccttaggctcactctaatgacctaatttcaatttgattgaatgcaaatctgaatttgctagaagacctgatttcatctttccgggttcagtaaacatgacattctccgtgggggtttatttgtggaactcccagtcggagctgctgccccagcccagcagggctcagcgacgtgcactggttttaggagtaaatccgaagcaacagaagcgttcgcactggctctgggtgcagcctgcatcttcagccctggggcactgatgctgggcagcttctcggcttcactcgggaagggactcaggagcgaggtggtggggaagccagcagcttggctgaggcggcagtggaggtggtccagctccgcgactgctcccacagagcagggctgccgctcggtcagtgtgcagagtgcagccgcttggggccaacttgccatcatatgtataaccacttttaatgacatgctaattaggggacgggttattcagatatagctggaggatgggcagttgcttccaggtgttgccaaggcagtgagagcaacgggaactgcccttggcgcctcttccagctttggcctgtctttggtcgggtccggggaccaggcttgcctaccacgttttctgtgtcaaaacagtcacgcagaaataaacagtgacagcactgtgatgagaaaagcgaagaaacaacttatttcaactttctgacttttgttgtggcctcagcacttttgtttgtgcttaacattgaaaacagtgaggcagtgtaaactgtgagatgtgatttttcatttggtaagtgcaaattttagttcattcatgaaaccaattttgaagatctttaaaatagaatttagtcgaccttaagaattgttaattgtttacaactaaagaccaaaaatccaagagaataaagcgttgcaccagtgaaaaaaaaaaaaaaaaaaaa

SEQ ID NO: 4350 - DNA, 371 bp, Homo sapiens
gcgtggtcgcggccgaggtacgcgggatctttctaaatcattttctgaagctgacttgctctagggtgcttcatcaccacttccatcttgcatcaccttataactgttctgtcttgttctctcccagcaatttattttaaaacaagggctagcttcaagcatgactgttaatggctcctctgtgacaaaacacaagttggaccaaggagaaagccctttggagaaactggaccctagttcagtttagatctcaaatataggctgaaatctcttaccaaagtgcgttccagataaaaatgagacttagaagacagactggtctaatatgctcactggtcatcacattcagcttattcttacgtgccagtgag

SEQ ID NO: 4351 - DNA, 4552 bp, Homo sapiens
cggctgcaggctgggagggagaagtgctacgcctttgcaggttggcgaagtggttccaggctacccggctagtctggcacggccccgtcttctgcctcctcctccgtcgcgtggcggcgggaactgttggccgcgcggcctcgggaacggcccaggtccccgcccgcaggtcccgggcagataacatagatcatcagtagaaaacttcttgaagttgttcaagaaaaatttgaaagtagcaaaatagaaaataaagaattaacagcagatacagaggacagcatggaagtgttgtcttaggaaacagaacacagcagtgaaaaaacagacaaaatccgctcagatacaactgcagctgataatgttttccggcttcaatgtctttagagttgggatctcttttgtcataatgtgcattttttacatgccaacagtaaactctttaccagaactgagtcctcagaaatattttagtacattgcaaccaggaaaagcctctttagcttatttttgtcaagctgattccccaagaacatctgtatttcttgaagaactgaatgaggctgttagacctctgcaggactatggaatttcagttgccaaggttaattgtgtcaaagaagaaatatcaagatactgtggaaaagaaaaggatttgatgaaagcatatttattcaagggcaacatattgctcagagaattccctactgacaccttgtttgatgtgaatgccattgtcgcccatgttctctttgctcttctttttagtgaagtgaaatatattaccaacctggaagaccttcagaacatagaaaatgctctgaaaggaaaagcaaatattatattctcatatgtaagagccattggaataccagagcacagagcagtcatggaagccggttttgtgtatgggactacataccaatttgtcttaaccacagaaattgcccttttggaaagtattggctctgaggatgtggaatatgcacatctctacttttttcattgtaaactagtcttggacttgacccagcaatgtagaagaacactaatggaacagccattgactacactgaacattcacctgtttattaagacaatgaaagcacctctgttgactgaagttgctgaagatcctcaacaagtttcaactgtccatctccaactgggcttaccactggtttttattgttagccaacaggctacttatgaagctgatagaagaactgcagaatgggttgcttggcgtcttctgggaaaagcaggagttctactcttgttaagggactctttggaagtgaacattcctcaagatgctaatgtggtcttcaaaagagcagaagagggagttccagtggaatttttggtattacatgatgttgatttaataatatctcatgtggaaaataatatgcacattgaggaaatacaagaagatgaagacaatgacatggaaggtccagatatagatgttcaggatgatgaagtggcagaaactgttttcagagataggaagagaaaattacctttggaacttacagtggaactaacagaagaaacatttaatgcaacagtgatggcttctgacagcatagtactcttctatgctggttggcaagcagtatccatggcatttttgcaatcctatattgatgtggcagttaaactgaaaggcacatctactatgcttcttactagaataaactgtgcagattggtctgatgtatgtactaagcaaaatgttactgaatttcctatcataaagatgtacaagaaaggcgagaacccagtatcttatgctggaatgttaggaaccaaagatctcctaaaatttatccagctcaacaggatttcatatccagtgaatataacatcgatccaagaagcagaagaatatttaagtggggaattatataaagacctcatcttgtattctagtgtgtcagtattgggactatttagtccaaccatgaaaacagcaaaagaagattttagtgaagcaggaaactacctaaaaggatatgttatcactggaatttattctgaagaagatgttttgctactgtcaaccaaatatgctgcaagtcttccagccctgctgcttgccagacacacagaaggcaaaatagagagcatcccactagctagcacacatgcacaagacatagttcaaataataacagatgcactactggaaatgtttccggaaatcactgtggaaaatcttcccagttatttcagacttcagaaaccattattgattttgttcagtgatggcactgtaaatcctcaatataaaaaagcaatattgacactggtaaagcagaaatacttggattcatttactccatgctggttaaatctaaagaatactccagtggggagaggaatcttgcgggcatattttgatcctctgcctccccttcctcttcttgttttggtgaatctgcattcaggtggccaagtatttgcatttccttcagaccaggctataattgaagaaaaccttgtattgtggctgaagaaattagaagcaggactagaaaatcatatcacaattttacctgctcaagaatggaaacctcctcttccagcttatgattttctaagtatgatagatgccgcaacatctcaacgtggcactaggaaagttcccaagtgtatgaaagaaacagatgtgcaggagaatgataaggaacaacatgaagataaatcggcagtcagaaaagaaccgattgaaactctgagaataaagcattggaatagaagtaattggtttaaagaagcagaaaaatcatttagacgtgataaagagttaggatgctcaaaagtgaactaattttatagggctgtggtttccaaaatttttttggcatgatagacttaatttatttccttaaagaataatattaaatcatttcaagtttgcagactagtgccatccaatagaattataatataagtcacatattttatttaaaattttctagtaactacattaaacaaagtaaaagtgagcagggcaaaataattttgatattacttttcacccagtagtatacccaaaatagcgaaatatagaaattattaatgagatattttacatccttttttgtaccaagtcttctaaatgcagtacatattttatacttactgcatttcttacttccgagtagccatatttcaagtgttcattgccacatgtggcctgtgactactgtattggacagttcagtactagacaaaaactagcataattaacttagttctagccatgatttctatttggattaaaattaaactctaatcacagttaactccacagtgcattcatgcagctgacagttatatttgttttattggagtcatgatattaaaatcagcgtttgtcaacctcaggggatatttagcaattgtcgggagacatttttgatgtcatgactagggcagttattgacatttagtgagtagaggccatggatcctgctaaataacctgcattggacagcgccccacaacaaagaattatcctgcccgaaatggtagtcgtgccaaggctgagtaaccttgtgttaaaagtaacctgtggcagactaggtttccagaatttcctggttctgctcacgtatcatgtttgaaaaaattttggctattaaagatatgtattagatggtcttatcctgattattacctggatacaacttgatcttttctaatattttcagaaagtgatgggataaccctagaagaggactcagaatgatatttatattttaagtgagtcttaaaacctcctcttatttctacaagttatatggctaaatttcagattgaacagggattcagcattctgccatctcctcatggaaagagaggctccctcatctgaagcgtctctgaaatctacccttgcaagcttcagacaaatcagttgatctccctgagccacacggcctcattctgtgagggagggaaagattagccaaagagttaattttcattccaaatcacttagctgttagactgatctgtttgtagcagttgtttgtctcatttttgctctgtgcattttttgagacatttgttgagaatattctatttggtgctctactgtatttttctttttaatatctacttgatatcttgttctttaaattttcttcacatatggtttgcctgatacaactgatttttataactgaaatttaaggaatctaacagctaaaactcagtaagtgcatctatttccttataacatagacccgttgctactctcagcaccctctcctcaattttttttcctgtagcatgtgatgcctgattaaactcattttcatttgcttttatttctaatatgggaacaatgagagtgaactctaaatataggttgtagtaataaaacatcattagcctaattattagaaaatgctaattaagtaccagcacatagaaacatgaaattgcttagtcattgtacctttgtcagcaattttgacagtcattaatgtttgtcataattttaaataaagtgtctgggtttcagaataccttc

SEQ ID NO: 4352 - protein, 858 aa, Homo sapiens
QQIQRTAWKCCLRKQNTAVKKQTKSAQIQLQLIMFSGFNVFRVGISFVIMCIFYMPTVNSLPELSPQKYFSTLQPGKASLAYFCQADSPRTSVFLEELNEAVRPLQDYGISVAKVNCVKEEISRYCGKEKDLMKAYLFKGNILLREFPTDTLFDVNAIVAHVLFALLFSEVKYITNLEDLQNIENALKGKANIIFSYVRAIGIPEHRAVMEAGFVYGTTYQFVLTTEIALLESIGSEDVEYAHLYFFHCKLVLDLTQQCRRTLMEQPLTTLNIHLFIKTMKAPLLTEVAEDPQQVSTVHLQLGLPLVFIVSQQATYEADRRTAEWVAWRLLGKAGVLLLLRDSLEVNIPQDANVVFKRAEEGVPVEFLVLHDVDLIISHVENNMHIEEIQEDEDNDMEGPDIDVQDDEVAETVFRDRKRKLPLELTVELTEETFNATVMASDSIVLFYAGWQAVSMAFLQSYIDVAVKLKGTSTMLLTRINCADWSDVCTKQNVTEFPIIKMYKKGENPVSYAGMLGTKDLLKFIQLNRISYPVNITSIQEAEEYLSGELYKDLILYSSVSVLGLFSPTMKTAKEDFSEAGNYLKGYVITGIYSEEDVLLLSTKYAASLPALLLARHTEGKIESIPLASTHAQDIVQIITDALLEMFPEITVENLPSYFRLQKPLLILFSDGTVNPQYKKAILTLVKQKYLDSFTPCWLNLKNTPVGRGILRAYFDPLPPLPLLVLVNLHSGGQVFAFPSDQAIIEENLVLWLKKLEAGLENHITILPAQEWKPPLPAYDFLSMIDAATSQRGTRKVPKCMKETDVQENDKEQHEDKSAVRKEPIETLRIKHWNRSNWFKEAEKSFRRDKELGCSKVN

SEQ ID NO: 4353 - DNA, 528 bp, Homo sapiens
  misc_feature (373)..(373): n is a, c, g, or t
  misc_feature (514)..(514): n is a, c, g, or t
gggaagcggccctcgcgcacactagtcgtctggttctctggctccggaagctgcgctccttcaccctcctcgttggtgtccttcaccatggcgctggctgtcttgcgggtcctggagccctttccgaccgagacacccccgttggcagtgctgctgccacccgggggcccgtggccggcggcggagctgggcctggtgctggccctgaggcctgcaggggagagcccggcagggccggcgctgctggtggcagccctggaggggccggacgcgggcaccgaagagcagggtcccgggccgccgcagctactggtgagccgcgcgctgctgcggctcctggcactgggctccggggcctgggtgcgggcgcggncggtgcggcggcccccggcgctaggttgggcactgcttggcacctcgctggggcctgggctcggaccgcgagtcgggccgctgctggtgaggcgcggagagaccctcccagttcccggaccgcgggtgctggagacgcggncggcgttgcaaggg

SEQ ID NO: 4354 - DNA, 420 bp, Homo sapiens
  misc_feature (4)..(4): n is a, c, g, or t
  misc_feature (42)..(42): n is a, c, g, or t
  misc_feature (45)..(45): n is a, c, g, or t
  misc_feature (150)..(150): n is a, c, g, or t
  misc_feature (170)..(170): n is a, c, g, or t
  misc_feature (172)..(172): n is a, c, g, or t
  misc_feature (199)..(199): n is a, c, g, or t
  misc_feature (203)..(203): n is a, c, g, or t
aatnggcaggggcttgcggatagaagggggtcaaaggaacanttnattatcacctgtgaggggaaagggggtgctgtcctccctccttcccttttcctcagcctgcaccccctgcaatcccccacctttcggggtctccccctccttgtngctaaggcccggaccgtcancncagcaacagctcagtcatgtgaccggnaatngcggcgctgacgagaggctttcttgggggcctcagagctggggaagaaaggaggaagtcctggtcagctgagtggaaatagaaggatttctgctgccatcatcttccatgggctttccaggtcacacgacctacaagtaggggaagcaggggaaagaaagaattgagccttgcattgccaattcttaaagctctttcaaggatcaaaatgtccgttt

SEQ ID NO: 4355 - DNA, 813 bp, Homo sapiens
gcgcgcggtggggcatggcgggttcgcggggtgcggggcgcacggggcgccgagcgtgcggccggagaagcggcggtctgagcccgaactggagcctgagcccgagccggagccccccctcctctgcacctctcctctcagccacagcaccggcgcgattctggcgtctccgacagcgaggagagtgtgttctcaggcctggaagattccggcagtgacagcagtgaggatgatgacgaaggcgacgaggagggagaggacggagcccttgatgacgagggccacagtgggattaaaaagaccactgaggagcaggtgcaggccagcactccttgccccgaggacagagatggcgagcgcccggattggggatgagtatgcggaggacagctctgatgaggacggacatccggcacacacggtgggcaactgtgcccttggaagtggtacgatgacttcccccacgtgggctacgaacctggattggcaggcgcatcttacaagcccctggggacccgggattgagctggacccaggttcctggaccaagatgggaccgatcctgactaacgtggcgcccccgtgcagggaacccgattgacaagggccgggaccttgggacttgacggaatgacgcagtgtggcccctggtgcgggcggctgcagagttggccactttggggaatgtggggttaagccctattaagccggcgtgtcgacctcttcacggggcggacggttgatccacccggggaccaccggcggcgacaaggcaggttataccctccctggtggaagggaaggtccccggag

SEQ ID NO: 4356 - DNA, 339 bp, Homo sapiens
tttttttttttttttttttcagggcccatgtgcactttattcactcgtgtcgtcgcctctcgggtccatgcgtcggggcgagcgtctcagccgggcgggaccgcaaaggccccgggaccacccgactgaggacgccgcccaggcctcggcagggctggggcttttgtttttaataaataaaaacggaactctaaaaaatatatatataaaaactggggagaaattaagttttacaacaattggaactcaaaattccaaaatggaaaatgtacaaactcggtcccccagcagctctggccccgagaacggacagtcccgggcccggcgccttcccgctcg

SEQ ID NO: 4357 - DNA, 2148 bp, Homo sapiens
gcttcagggtacagctcccccgcagccagaagccgggcctgcagcccctcagcaccgctccgggacaccccacccgcttcccaggcgtgacctgtcaacagcaacttcgcggtgtggtgaactctctgaggaaaaaccattttgattattactctcagacgtgcgtggcaacaagtgactgagacctagaaatccaagcgttggaggtcctgaggccagcctaagtcgcttcaaaatggaacgaaggcgtttgtggggttccattcagagccgatacatcagcatgagtgtgtggacaagcccacggagacttgtggagctggcagggcagagcctgctgaaggatgaggccctggccattgccgccctggagttgctgcccagggagctcttcccgccactcttcatggcagcctttgacgggagacacagccagaccctgaaggcaatggtgcaggcctggcccttcacctgcctccctctgggagtgctgatgaagggacaacatcttcacctggagaccttcaaagctgtgcttgatggacttgatgtgctccttgcccaggaggttcgccccaggaggtggaaacttcaagtgctggatttacggaagaactctcatcaggacttctggactgtatggtctggaaacagggccagtctgtactcatttccagagccagaagcagctcagcccatgacaaagaagcgaaaagtagatggtttgagcacagaggcagagcagcccttcattccagtagaggtgctcgtagacctgttcctcaaggaaggtgcctgtgatgaattgttctcctacctcattgagaaagtgaagcgaaagaaaaatgtactacgcctgtgctgtaagaagctgaagatttttgcaatgcccatgcaggatatcaagatgatcctgaaaatggtgcagctggactctattgaagatttggaagtgacttgtacctggaagctacccaccttggcgaaattttctccttacctgggccagatgattaatctgcgtagactcctcctctcccacatccatgcatcttcctacatttccccggagaaggaagagcagtatatcgcccagttcacctctcagttcctcagtctgcagtgcctgcaggctctctatgtggactctttatttttccttagaggccgcctggatcagttgctcaggcacgtgatgaaccccttggaaaccctctcaataactaactgccggctttcggaaggggatgtgatgcatctgtcccagagtcccagcgtcagtcagctaagtgtcctgagtctaagtggggtcatgctgaccgatgtaagtcccgagcccctccaagctctgctggagagagcctctgccaccctccaggacctggtctttgatgagtgtgggatcacggatgatcagctccttgccctcctgccttccctgagccactgctcccagcttacaaccttaagcttctacgggaattccatctccatatctgccttgcagagtctcctgcagcacctcatcgggctgagcaatctgacccacgtgctgtatcctgtccccctggagagttatgaggacatccatggtaccctccacctggagaggcttgcctatctgcatgccaggctcagggagttgctgtgtgagttggggcggcccagcatggtctggcttagtgccaacccctgtcctcactgtggggacagaaccttctatgacccggagcccatcctgtgcccctgtttcatgcctaactagctgggtgcacatatcaaatgcttcattctgcatacttggacactaaagccaggatgtgcatgcatcttgaagcaacaaagcagccacagtttcagacaaatgttcagtgtgagtgaggaaaacatgttcagtgaggaaaaaacattcagacaaatgttcagtgaggaaaaaaaggggaagttggggataggcagatgttgacttgaggagttaatgtgatctttggggagatacatcttatagagttagaaatagaatctgaatttctaaagggagattctggcttgggaagtacatgtaggagttaatccctgtgtagactgttgtaaagaaactgttgaaaataaagagaagcaatgtgaagcaaaaaaaaaaaaaaaaaa

SEQ ID NO: 4358 - protein, 509 aa, Homo sapiens
MERRRLWGSIQSRYISMSVWTSPRRLVELAGQSLLKDEALAIAALELLPRELFPPLFMAAFDGRHSQTLKAMVQAWPFTCLPLGVLMKGQHLHLETFKAVLDGLDVLLAQEVRPRRWKLQVLDLRKNSHQDFWTVWSGNRASLYSFPEPEAAQPMTKKRKVDGLSTEAEQPFIPVEVLVDLFLKEGACDELFSYLIEKVKRKKNVLRLCCKKLKIFAMPMQDIKMILKMVQLDSIEDLEVTCTWKLPTLAKFSPYLGQMINLRRLLLSHIHASSYISPEKEEQYIAQFTSQFLSLQCLQALYVDSLFFLRGRLDQLLRHVMNPLETLSITNCRLSEGDVMHLSQSPSVSQLSVLSLSGVMLTDVSPEPLQALLERASATLQDLVFDECGITDDQLLALLPSLSHCSQLTTLSFYGNSISISALQSLLQHLIGLSNLTHVLYPVPLESYEDIHGTLHLERLAYLHARLRELLCELGRPSMVWLSANPCPHCGDRTFYDPEPILCPCFMPN

SEQ ID NO: 4359 - DNA, 350 bp, Homo sapiens
  misc_feature (173)..(173): n is a, c, g, or t
  misc_feature (298)..(298): n is a, c, g, or t
aaatacggatgcagtgctgagatagtttatgagacttgtaccatttcacaaactctgaaattgggttccatattggcaaggctgccacagttgttaagaataatcctctatgtttcttcctcacaaaaccatatctcatttatatccagaccattacttcactataattacanggacaaattattagcaagaaataagaatagtattagacttgccctggaggtattcagcctgtgtgggtgttaactaccttaggaaggtacaaggctaaggaaatgtaacagttattcaacccttnccagttggctttaatttattacccatagggtaattaccaaaaaaggttcttg

SEQ ID NO: 4360 - DNA, 294 bp, Homo sapiens
gtggggtggagggcggaggctagccatcacccaggtggagactgaagcatcagcccagattccgttcttgctggttcctacatcgtcattttgtcccttggatcatacacacagagccacccacatgtgcagcctcagacaaacatacttattagcacctcaaaactcagtagaaggtagccactatgctgttatcctgagcctcatccatatattggggaaatacacatgaacaaattctcgaagaggattggtgagagtacacagcctctcccaacggtgaccggcgacttc

SEQ ID NO: 4361 - DNA, 449 bp, Homo sapiens
  misc_feature (303)..(303): n is a, c, g, or t
  misc_feature (308)..(308): n is a, c, g, or t
  misc_feature (318)..(318): n is a, c, g, or t
  misc_feature (326)..(326): n is a, c, g, or t
  misc_feature (345)..(345): n is a, c, g, or t
  misc_feature (382)..(382): n is a, c, g, or t
  misc_feature (426)..(426): n is a, c, g, or t
  misc_feature (437)..(437): n is a, c, g, or t
acagatcaagtcttttgctcatagacttttctgtggggttattaaaatgcaaaagctttattttttttaataatgccatactccattagtgtcagatgatggtatggaatttgttcccttgctttcccccactgttactgcttcagtttatagattgccagcagagttcagaaatagagcagggatttacccgttctttgcttgggacatcccattttcttttgtccagacccatgttgggcaatcatgtatggaactgtgttatacttctcagtgcttttcttttttctttttggataaggnggggntatccaaaanaggttgcngtggcaaaagttagtaggncttccttcaagggaggggaaacccaattcttttttcncaataatatccccgtgggaaatggcctccattccatccatttanttttttagggncccaagtcaggc

SEQ ID NO: 4362 - DNA, 1834 bp, Homo sapiens
agtgctttcaaaagaattggcgtccgctgttcgcctctcctcccgggagtcttctgcctactcccagaagaggagggaagcacaggtgggtttctttagctctgcgtcggatccctgagaacttcgaagccatcctggctgaggctaatctccgctgtgcttcctctgcagtatgaagactttggagactcaaccgttagctccggactgctgtccttcagaccaggacccagttccagcccatccttctccccacgcttccccgatgaataaaaatgcggactctgaactgatgccaccgcctcccgaaaggggggatccgccccggttgtccccagatcctgtggctggctcagctgtgtcccaggagctacgggagggggacccagtttctctctccactcccctggaaacagagtttggttcccctagtgagttgagtcctcgaatcgaggagcaagaactttctgaaaatacaagccttcctgcagaagaagcaaacgggagcctttctgaagaagaagcgaacgggccagagttggggtctggaaaagccatggaagatacctctggggaacccgctgcagaggacgagggagacaccgcttggaactacagcttctcccagctgcctcgatttctcagtggttcctggtcagagttcagcacccaacctgagaacttcttgaaaggctgtaagtgggctcctgacggttcctgcatcttgaccaatagtgctgataacatcttgcgaatttataacctgcccccagagctgtaccatgagggggagcaggtggaatatgcagaaatggtccctgtccttcgaatggtggaaggtgataccatctatgattactgctggtattctctgatgtcctcagcccagccagacacctcctacgtggccagcagcagccgggagaacccgattcatatctgggacgcattcactggagagctccgggcttcctttcgcgcctacaaccacctggatgagctgacggcagcccattcgctctgcttctccccggatggctcccagctcttctgtggcttcaaccggactgtgcgtgttttttccacggcccggcctggccgagactgcgaggtccgagccacatttgcaaaaaagcagggccagagcggcatcatctcctgcatagccttcagcccagcccagcccctctatgcctgtggctcctacggccgctccctgggtctgtatgcctgggatgatggctcccctctcgccttgctgggagggcaccaagggggcatcacccacctctgctttcatcccgatggcaaccgcttcttctcaggagcccgcaaggatgctgagctcctgtgctgggatctccggcagtctggttatccactgtggtccctgggtcgagaggtgaccaccaatcagcgcatctacttcgatctggacccgaccgggcagttcctagtgagtggcagcacgagcggggctgtctctgtgtgggacacggacgggcctggcaatgatgggaagccggagcccgtgttgagttttctgccccagaaggactgcaccaatggcgtgagcctgcaccctagcctgcctctcctggccactgcctccggtcagcgtgtgtttcctgagcccacagagagtggggacgaaggagaggagctgggccttcccttgctctccacgcgccacgtccaccttgaatgtcggcttcagctctggtggtgtgggggggcgccagactccagcatccctgatgatcaccagggcgagaaagggcagggaggaacggagggaggtgtgggtgagctgatataaaaaggtttttatgat

SEQ ID NO: 4363 - protein, 548 aa, Homo sapiens
MKTLETQPLAPDCCPSDQDPVPAHPSPHASPMNKNADSELMPPPPERGDPPRLSPDPVAGSAVSQELREGDPVSLSTPLETEFGSPSELSPRIEEQELSENTSLPAEEANGSLSEEEANGPELGSGKAMEDTSGEPAAEDEGDTAWNYSFSQLPRFLSGSWSEFSTQPENFLKGCKWAPDGSCILTNSADNILRIYNLPPELYHEGEQVEYAEMVPVLRMVEGDTIYDYCWYSLMSSAQPDTSYVASSSRENPIHIWDAFTGELRASFRAYNHLDELTAAHSLCFSPDGSQLFCGFNRTVRVFSTARPGRDCEVRATFAKKQGQSGIISCIAFSPAQPLYACGSYGRSLGLYAWDDGSPLALLGGHQGGITHLCFHPDGNRFFSGARKDAELLCWDLRQSGYPLWSLGREVTTNQRIYFDLDPTGQFLVSGSTSGAVSVWDTDGPGNDGKPEPVLSFLPQKDCTNGVSLHPSLPLLATASGQRVFPEPTESGDEGEELGLPLLSTRHVHLECRLQLWWCGGAPDSSIPDDHQGEKGQGGTEGGVGELI

SEQ ID NO: 4364 - DNA, 426 bp, Homo sapiens
gaaagatgaccttagatgtattctcaaagtgcaaatcgggatataaaaaaatagtaggtatgggggaaatgtagccccatcttctgtcccccaccctccaaaacggggctgatttgattccctctttctagcatttgtatccttccacctatactttaagataatcatttttcagccgacctagtcgggtcccatggctcctaatggtgagggccagcagctcgtatttgtccctgagccccacagagatgtccagtgtctccttcagcagggacctggtgtggaccagcattcccagaaagtcctcgttgagcctgctctcctgccggctgtcctgttcctggccctgcttgaacttgctctccagctcagtgagggatttgtccgagttggagtaggcatccccgatctggtgggactcccgcc

SEQ ID NO: 4365 - DNA, 461 bp, Homo sapiens
  misc_feature (413)..(413): n is a, c, g, or t
taaagcattcatctgcatgttatattacagttaatacaaggaggtacttaccattttatctttactttaaaaacaatgccttttccaaaatataaaaaaaagacctatttttaaagaactatttaaagatggctttgaaaacaacacttttatttacaacaaatagatggtagtgcaacagcactcgtggcttgtttcgataaataaaaatactattgttctggcattctttgggtacaggcccctttatatttatagatggctaccaagacttcttgaaataaaatcccttaagggcctttaatttggtattttaaacccgaatttggggaaacccaaggaagaattaatcttttttttttggggacctagaagcgctttttttttgaaaaactggaaggtttaaaaggttnttcaatttcccatttacccctggggcaaccaaaaatattttcccaaac

SEQ ID NO: 4366 - DNA, 380 bp, Homo sapiens
ggcactaggaccgctggagctgcgcagcgcgcctcggagctgcctgcgggcgcacgccgtcttccccgccagtctgcccgggaggattgggagtcccagcctgcgtcccgttagtccctttttggcccggagtgcgcggagctggcagtggcttctccatggctgtaagaagggactgcgtgtggaagtactgctggggtgttctgatggttagatgcagaactgcgatttgcaaatggacagtttgagagcctatcgatcggaatccctcgaactccaaatttctacctggacaaggactggtactatacccacagataggagacaaattggatataatttggcccaaagtggactgtaaaactgttgcccagtatgaa

SEQ ID NO: 4367 - DNA, 2601 bp, Homo sapiens
aggtgtgtgtgtctgagggtgtgtgtgtgagtgtggctggcccagtacctgccaagcccaccacttccacctgggccctacacccccacaatgtgtacccctcttatctgccctggagcctgtacagccatgccacgctacccctgagagtctagaaagctggtcactaactttgcagacggatgagccttgagcacccagaggagactggggctgtcaacgctgccccttgtcctgccggcttggatcccctgacagggtccttctaggcttcagactggcaccctgaccatggaaccctgaagtggcagtgacttctagagctcagtggcagaccccacgacccttcctcccccttcctccccctcccaccaccagctttcaagctcccagagggaggggtggggaggggatcctgatctcacagggcagggggcttccatcatgatgctcaactcagacaccatggagctggacctgccgcccacccactcagagactgagtcgggcttcagtgactgtgggggcggggcgggccctgatggtgccgggcctgggggtccgggagggggccaggcccgaggcccagagccgggagagcctggccggaaagacctgcagcatctgagccgcgaggagcgccggcgccggcgccgcgccacagccaagtaccgcacggcccacgccacgcgagaacgcatccgcgtggaagccttcaacctggccttcgccgagctgcgcaagctgctgcctacgctgccccccgacaagaagctctccaagattgagattctgcgcctggccatctgctatatctcctacctgaaccacgtgctggacgtctgaactcagcctgtctcccacctcccgggcctctctggggcccctttccaccgctcactgcttagaaaggccgcatcctccccgagcccttataccttggcatggagtcccaaaggccctgggcacaggcagagagcccaccggctggtcatgagggcctcttcctttctctgacccaggcacctcgagggctattctcctgggttccttccggggtttattgctgaggcccagctgtgcagaattgtttgctagtgtggttggtatggaatccttgctggctttactaagccagccacacttggagtctgcccccaagctctctcactgaatgctgcctcttctacccctatgtccaaattttcagccaccacagacctcagctgtgtatcctatctgttctagcttctcctgcccctggtggggatgggctgtcagaattgcaagggaggaaggctggggttagagtggggagtgggcttcttcctccaagatctcagtctctcagtgcttggcagaggggtgaggccctggggaggcaggggttggtgccctgactcctgtgaggggaatctcagtagctgggaattatggaaaaactcttcctgtttctgtccatcttgttcctgtggcttagcacatacagacctcagatcttacttggtagtgagtgccttgccctctttgagctatttggctacttccctgtccctctgactcctactgtcccaattttctccctccctgtgtgtcactagagaaaaaaaaaaaacaaaaacctagattccggattaggggatgacatcccaaacagcccggagtatttgcagaaggctcaggcaacgagtgggccacatctcacttctgcttcctcatctcagcccactctgaaaatgtgcagcaccctcactggttcctccccccaacgcaaggaggatgcccaattgttgccctctgaaaatgcacagttctcctggccctaggacttacttattacatttttttctctttccttgagctgcctttggcaagggaagagacccccaactctgcgcccctactccatgctgctgatccccacctgcgcactatagcgcagggtcagcagtggaatgaagggccttagaacctgcatagaagaaatgaactcactgcatttctgtgctccctcctccctcgcaccaaactcctagctctacaagatatttatttatttatttatttattcatctatttatttacttatttatttatttatttataaatattgctatttattgccgagttgtgcactttggggtagagtgaggggctcccagcagctctagctgggtctctcttgcttcctccctgcttacgcctttccttttcttgctccttcttcaactcctggtgtgtgtgagcatgccctttgcttgccacaccatatcctttccccagatccacctgtcctgacactctagtcctccaggatagtgctcctcccccagctccagggctcctggatgtccttcctcaactccctccacccctagacaatcctacctggtcccatctgcctcttttctctccccagcctgccctgtgacccttgcctcttcctgatactcccaagagcaggccccaggggtctgtgtcacatatctctgtgtgattccttctggttgcatccccaatttcatacaaaaagaaaaataaaagtgacctcgttctagcaccaggaaaaaaaaaaaaaaaaaaaaaaaaaaaaaaaaaaaa

SEQ ID NO: 4368 - DNA, 740 bp, Homo sapiens
  misc_feature (583)..(583): n is a, c, g, or t
ttagaagtgacttacctttaacacctgtggagttagtgcgtgcacattgctggctcagcgtaacccatcacgggaccggaggagaggagagcggggaagaggagagcagcttcaggccgtggtgtctcccacgtctgtgttcttatttgcagctcagggttgcattcccaggtagaacaggtgtcgtacactgtgaaatgttccaggttatttgtttataatgtgtgtgtcatatacagatagctccaatgacatctgaagttgtgacttcatcatctgtcatatttctgtatgatgagccccaggcccatcctgaggtctgctagccatgtgcttagtctcacctccccagcccacgctggcattaccacccagagacccttcagtgctgtgtgtttttcctttttagggttacttttgactcacagtgttaggcaagccagcttggaagttaacttttaaaaaaattcaattgaagctgtaaagtataatatatagattggaagtcaccagaaatgttttagttgtgaattccccagtgtatgttctgaaaagacaatgggagagctgtaagcatctctanatgcgaagcggtgacctggacttctggcgcatctgataactgtctttctggaaaaaaaaaaaaaaaaaaaccggggcttttcggggggaaagggtaaagggagggatatttccgccccttgaaggggatccgcgcctagggtatgagggaaaaaaac

SEQ ID NO: 4369 - DNA, 2358 bp, Homo sapiens
  misc_feature (2172)..(2172): n is a, c, g, or t
attcggggcagcaacgcgcagaaggtggtgggcgcctcgggctcggggggcgcgggcccccaacccgatccggcgggcccggggggcgtcccggcgctggcggccgccgtcctgggcgcctgcgagccccgctgcgccgcgccctgtcccctgcccgcgctcagccgctgtcggggcgcggggtcgcgggggtcgcggggcgggcggggggcggcggggtccggggacgccgccgccgccgccgagtggatccggaagggcagcttcatccacaaacccgcgcacggctggctacaccccgacgccagggtcctggggcccggggtctcctacgtcgtgcggtacatgggctgcatcgaggttctccgctctatgcgctccctggactttaacacgcgcacgcaggtgaccagggaagccatcaaccggctccatgaggccgtgcctggcgtccggggatcctggaagaaaaaggcccccaacaaggccctggcgtccgtcctgggcaagagcaaccttcgctttgccggcatgagcatctccatccacatctccactgatggcctcagcctctccgtgcctgccacgcgccaggtcatcgccaaccaccacatgccgtccatctccttcgcgtcaggcggagacacggacatgacggattacgtggcctacgtcgccaaggaccccatcaaccagagagcctgccacatcctggagtgctgtgagggcctggcacagagcatcatcagcaccgtgggccaagctttcgagctacgcttcaagcagtacctgcacagcccgcccaaggtggcgctgcccccagaaaggctggcagggccggaggagtcggcctggggggacgaggaggactctttggagcacaattactacaacagcatcccggggaaggagccgccgctgggcgggctagtggactccaggctggccctgacacagccctgcgccctcacggccctcgaccagggcccatctccttctctaagagatgcctgcagcctgccatgggacgtggggtccaccggtacagctccaccgggggacggctacgtgcaagcggacgcccggggccccccggaccacgaggagcacctgtatgtcaacacccagggtctggacgcccccgagccggaggacagccccaaaaaggatctgtttgacatgcgaccctttgaggatgccctgaagttgcatgagtgctcagtggcggcaggcgtgacagcagcccctcttcccttggaggaccagtggcccagcccccctacccgccgggcccctgtggcccccacggaggaacagctgcgtcaggagccctggtaccacggccggatgagccgccgggcggcagagaggatgcttcgagctgacggggacttccttgtgcgagacagcgtcaccaaccccgggcagtatgtcctcaccggcatgcacgccgggcagcccaagcacctgctgctcgtggaccccgagggcgtggtacggacgaaggacgtgctgtttgagagcatcagccacctgatcgaccaccacctgcagaacgggcagcccatcgtggccgccgagagtgagctgcacctgcgtggcgtggtctcacgggagccctgagccaggtgaccgttctcagccctggctcctgcctgttctcagccccagctcctgcctgtcatggccttggggctctcagccctcctcctggatcctggtcaggccgaaccaccgctgcctctccttcctccgcatgagcctctggcatggtccttcctccagctggccccgggctgggcagagcctcctcctgccggggcccctgcccaccccctcctttgcctggagtgagggtgttcataccaaagacggaaccatttcgcctttaaagaaaatatatccagaagcagccgctgcctcggagccctggcccgtgggtccccctctcgcctggctggttcggtctaacgccccggagagtcagagctcccaggaccctggggaggaggcggattccgggcctggctgggcttcctcttcccacctgaggactgggtgcacagttgtctttgaggggggacgcttaaggtgctttggggttctcaggccaggatacatgctggcgctgaagtgcaggcagccttgaggtcacctgggatctcggggtanccaggctgctccaagacagtggatatcgaggcagtcgtgaggcccctactccacctgggagcaggggaaggacgtggttgcctggcctgggctgcgcccagcagcttccccccaatcctgccctcccagctgtcgacccagatgggatgttcggatcggtttgtaattaaacctgggaatggccac

SEQ ID NO: 4370 - protein, 540 aa, Homo sapiens
IRGSNAQKVVGASGSGGAGPQPDPAGPGGVPALAAAVLGACEPRCAAPCPLPALSRCRGAGSRGSRGGRGAAGSGDAAAAAEWIRKGSFIHKPAHGWLHPDARVLGPGVSYVVRYMGCIEVLRSMRSLDFNTRTQVTREAINRLHEAVPGVRGSWKKKAPNKALASVLGKSNLRFAGMSISIHISTDGLSLSVPATRQVIANHHMPSISFASGGDTDMTDYVAYVAKDPINQRACHILECCEGLAQSIISTVGQAFELRFKQYLHSPPKVALPPERLAGPEESAWGDEEDSLEHNYYNSIPGKEPPLGGLVDSRLALTQPCALTALDQGPSPSLRDACSLPWDVGSTGTAPPGDGYVQADARGPPDHEEHLYVNTQGLDAPEPEDSPKKDLFDMRPFEDALKLHECSVAAGVTAAPLPLEDQWPSPPTRRAPVAPTEEQLRQEPWYHGRMSRRAAERMLRADGDFLVRDSVTNPGQYVLTGMHAGQPKHLLLVDPEGVVRTKDVLFESISHLIDHHLQNGQPIVAAESELHLRGVVSREP

SEQ ID NO: 4371 - DNA, 478 bp, Homo sapiens
  misc_feature (454)..(454): n is a, c, g, or t
ttttttttaaatccaaattctattatttattgagtagtagccacaatcaagtcattgggtttctatgaaccccagtccatctcatataaagtgataatgatgatagctaacatgtactagcacttaatatacaccgggtaccattctaagggcctcaaatggataacataatttattcttcacaaaaatgttctgaaatgagaagtatgagtgtccctactttacagaagaggaaactgaggcatagagaggttagggaacttgggaatggtggagccaagaattgaactcaggcagtctgcctctgggatcttagcccatgtgtggaacaatacttacctcaactatatcatagagtttctaggagttgcattagaaaatgagtataaaagcatcttttaaaccataatttattagtcttgggaatactgagcaagatgctgaatctcaagtngaagctttttttttctttcttttc

SEQ ID NO: 4372 - DNA, 442 bp, Homo sapiens
ttttttaagcttgacctaagcatacacagaaaaaattaatatttttgttgttgttctagattctattattcaggcaggctttctatattttccccttaggtatctatactttagtatagatgctgtcactgtgagagactacagaaagcagggaaaatagaagttctatagcttcatctaccaaggaagatctagtttaaaacctagtaggggacatgtcccaacaacttgaaaattagtttgacatgtggtgactttatagcatagtggtcaggagttaaacctacattccagctctgccattttctaggtagtggctttgggcaagtttcttagccactataagcctcagttttcacatccgaatattggaactatattaaaacccaactcaaaggattgttttgaggatgaaataggagaatgtatgtaaaatgtttag

SEQ ID NO: 4373 - DNA, 3079 bp, Homo sapiens
ttttagatgtatttcaagctgtgaagagtttacgacttcagagaccacatatggtgcaaaccctggaacagtatgaattctgctacaaagtggtacaagattttattgatatattttctgattatgctaatttcaaatgaagattcctgccttaaaatattttttaatttaatggtcagtatattttgtaaaaatcatgttaatttatttcatagttgacattaatatcttccctaatttctttgtatatattttgttatgccttaaaggccacctgctatacagttgttaaatcttaaatatgctttttaaaaattggaataatgtattaaggtcaaataatatcccataaaatatatatttctgctaatattagtaaatatcttaatttttcattagattcatatcatttaatttcacatattcaacacctttaaatgttgtaatcttaatatgcgaagtgtgcctctgcaagatactaacacaaagctcatgttaagaaaacagttgaggactcggaagtcagttgaaaatgcactttcctaacagtgaattcacaaccctgaacagcagcatttttggaaggcaaactgttcgtgatggtacaatgtaaatggggacttctgtaaagttctcagtttcggtccatgtggtttatctttacattttgaagatcaaagaagtctttacaacctgaatccaggtctaaaacacactagagtagctggtgactataaataatatttaaaaatgctgtgtctacaccatcaagactgtgtctacactatcttggctgaacgagaagagatgtaaatgctgggtggtcccgttgacccacggcgttgggtacaacaaaaccagccatcggagttacaccccaaagcaccatttgctgtccagctgcctgtcgtttggcccagaccaccctcagaaaaaaaccagctgcctctcccattctgccctcccgttctgccacagcggcctgggctggtccagtgctatgcctggaggctcaacacaaaacttcccatccaaacattcagatgaactgagcgtcttacacacgcagtacagaggagcacacattgggatagaaacagtagaataaccacgggcaattaaactttaaattttctgagcagcattttggtatttaaacatctcttgtaaaaagctgagacagtttgtaagaaaagaatccttaaaatctagatttataccattttttaaagtcccacctttcaatgtttaataaaacaaaaagagaaatccttaatctaaaagctaaattatttttgaatggaaatactactgagaccattgacactggataacagtaatgatcccattaccagataagattgactgatggggaaaaaaaaaaaaagaatggggtgtgaatgtaccaacactgaatcttacagcagttatctttctatggccattaggtacctagcagatgtgcacaatataaacaaaaagatatctggcctaccttactactaaaagcatttaacacatgcattttttggtactttcttttgttttctaaaagctacataaaggccttatttgacattttcactgataactgatcgcaccctcgtgttgcagtgttcgtcccctattcattaacagtgtgtgcaaatgcaaccccaggacacgttattgttctgatagatgctcacagggaatcaagcttctcgcccactccacggctctgagccccatccaagggcaagacttggtgcccagctggaaggacgaaagcacactttgtgaccgccatcctcaccagctgcatgcctgggctgcacactgctgaacgtgctcctctctccttctctgtacaatgattcagcatctcggcggaagaggaaaatggagctttttgaggctcgccaggtcccttttgttttcaccattaaaattccaaacccaaagcctttgtttgactgaaggagaagagagggaagtaagcttctgttcagcacctgaaccctagaaaaagagccagtttgctacgatgaaggtgacatttctctggtcatttgagagttcgaagtcaaagccgaggggcacaggctttggttcatgtctaggagccctctgtcagaatccttgaagccctttaatggtctaactggcatctcttgtatcaagaagtacctttaaggtagaccttttcagggtgccctcaggaaagggccctgctcatgtttttttcctgtccccttagaccaaccccaggtttccactgcaggggttctgcctgttcccaaactttttccattccaggaacaaaggagaagccactttccccaggacgcaggactctcccctccactgtccgggacagcgttcgccctttagcggggaggtcattacagcctcatggcctctaccaaggccccagatcacaggatctcctgggccttggagcacctcacgctgggggaatcaatccctgagggactcagaatcttctccgtgcaacctggaaagttcatctcttgtttccttcagtcaaagaaagtccattgtacataacaaaacagcccccaaacagcccagtgccgacaccattgttcctttcacactttcctttgttgcatgcagttgggttcaaatgccaaatagtgattagaagacgaccattctgatctgtgtgtgatctggtcactatgtgactgcctttacggtttctctccatgtgctatatgaatgaagaatgcataccagtgttttaaaaggtatttttatgtgtttttaaacacttttttaaatgagcctgacacctgtgtttcagcatttggagacatccccatgttattcttttaagtgtataattactgatacttttttgtttgtttgtttaactaagttgtgtttaatttatgtgcagtctttataatgtatgtatgttattacagttcaactatcatattttctttgattacatttataatttgatcttgctctgattataatgccagtgaatgttgctgaactctttgtatatgcaaattgcaagatttaaaccattctgatgcaaggacaaacctttactttgactacc

SEQ ID NO: 4374 - DNA, 748 bp, Homo sapiens
  misc_feature (22)..(23): n is a, c, g, or t
  misc_feature (33)..(35): n is a, c, g, or t
  misc_feature (117)..(117): n is a, c, g, or t
  misc_feature (430)..(430): n is a, c, g, or t
  misc_feature (434)..(434): n is a, c, g, or t
  misc_feature (487)..(487): n is a, c, g, or t
  misc_feature (499)..(499): n is a, c, g, or t
  misc_feature (510)..(510): n is a, c, g, or t
  misc_feature (519)..(519): n is a, c, g, or t
  misc_feature (532)..(532): n is a, c, g, or t
  misc_feature (569)..(569): n is a, c, g, or t
  misc_feature (579)..(580): n is a, c, g, or t
  misc_feature (584)..(584): n is a, c, g, or t
  misc_feature (589)..(589): n is a, c, g, or t
  misc_feature (626)..(626): n is a, c, g, or t
  misc_feature (635)..(635): n is a, c, g, or t
  misc_feature (646)..(646): n is a, c, g, or t
  misc_feature (653)..(653): n is a, c, g, or t
  misc_feature (657)..(657): n is a, c, g, or t
  misc_feature (667)..(667): n is a, c, g, or t
  misc_feature (669)..(669): n is a, c, g, or t
  misc_feature (680)..(680): n is a, c, g, or t
  misc_feature (686)..(686): n is a, c, g, or t
  misc_feature (690)..(690): n is a, c, g, or t
  misc_feature (696)..(696): n is a, c, g, or t
  misc_feature (703)..(703): n is a, c, g, or t
  misc_feature (716)..(716): n is a, c, g, or t
  misc_feature (721)..(721): n is a, c, g, or t
  misc_feature (736)..(737): n is a, c, g, or t
tctctcaaaactacataatggnnggaggagtannngaaaaagtccccgcctcccagagaaattgaaggatccagaaagaagtgcttatagcagggaatgtctcccctcacctcctgnatgaacatctctctccttcctccagtataggagggtctgcaaagctaaaggaagagttcctttgttacaagatagaaaagtggtgccactttaaagatgatttctcagtgttctccttagataccaaatacaaaggacgagggatcaagctcagcgaaagtatcaggcatttaaggtatcaggcagcaatgcggggaaaggtgaattttcttcaatcagcataggatgggtagggaagagcatttatcactttgggtcttatccttcaagccaggggaaaaagcaacagtgaggacatcagaaaccaaaagcntttntttgacttacaaaccccaaccgtttgacaagtgagaaacctttttaaagcccncttacatttcanggggggggggnaaacaaaanagcaagttccagncccgggatcccaagtatgccttcatttcaattgcatncccacccaannaatntttgnaacattcctccattcggtcatacctcaagaaaaaccnctggggtgnccttaatccangggcttnaagnaaaaaataancnttaccttttgnaagggntttntttttntttaccnctttcccaccaanttggngaaaaccttttaaannaaagggcgttg

SEQ ID NO: 4375 - DNA, 261 bp, Homo sapiens
agtaagcttacatttctgtgtaggtttgggaatatagttacttggcaaagtctttcaggaaggaagcccttccttatgttacatgtggaaagcctgccttccaagacatgtggaagtaattgatccacctgccagagaaacacaggctcagaggatgcctgggaacagggaggatgggattagtggaagcttaatggaaaaggaaagttatgatcctccaagacccttaattgatagaccataccaggttctgcaggtcag

SEQ ID NO: 4376 - DNA, 352 bp, Homo sapiens
ttttttttttttttttttttttttttttcacttgggggcagttaaatctcactttatcctcataacaagtctgggaggtaaatagggcaggcatcattattcccagcgggaagctggggctcaaaaaggttgacttggggtctaaaaactagtccaggcatctggtttgaattaaaacctgtaaaccctagtccggagcaaaaaagctgaccactggctttgaaagttattcagttcccaggttgcccctgatcttcctcattccttgggcagtcttaaggagtccggggcaagattccatgcaaaggcagccaaagccacaccgttctttgtcccagggctgccaccatgg

SEQ ID NO: 4377 - DNA, 566 bp, Homo sapiens
  misc_feature (391)..(391): n is a, c, g, or t
  misc_feature (442)..(442): n is a, c, g, or t
  misc_feature (522)..(522): n is a, c, g, or t
  misc_feature (558)..(558): n is a, c, g, or t
tgcagtttcaaaagatttagctaactttatttatagcacggtattaatgagaccaaaatcatgggatcagaacttagtgtgagccagcagattggttttatcccatgggcacttcctgtaggcttaaaatatcaatgattgctaaggtgttcagtccaaaaggtgtaaatagatcaacacaaatttattgtcactactgagaaacaaagcccaaaaaacttaactggtagttgaacaactttgacactgaagaacagtacaaggaactaagaccatcacattgtgcattaaactctactaagtcggtggttcaaggggaataacctcagactggtatcatgctagaacatgtaatgggaatcagtcagccatggattccaaatacaccatntacttccaattcagttttaacctaggtttaacatgtcagtagcccctaccnataagtgggcctagctatatttccccggaaggtggatcaagggcatggcaaatctggttcacatctcagttccagctttngtatgcacaatggggccagttgcagtaggggttccncgaatgcc

SEQ ID NO: 4378 - DNA, 665 bp, Homo sapiens
  misc_feature (619)..(619): n is a, c, g, or t
ggtggcgaactcggcacgagggctgcctgggcgggctgggaggcgcgggttgaaaagtctcgttccaagtttggagagagagagaagagcgcctcagacctcggtacccgcgagcggggaggaggcaggaaagaaggacgcggcgtctggggagcacccaggcagcaagacggggcccgggctttcgacagtggggagtgtgacgcgcttgggaaaggcaggagcgccagcggtcgggctgctcttggctaacgagaggagtccgaggcggcggcgaggggcgaacgacccgacgcaagatggcgagtaaagagatgtttgaagatactgtggaggagcgtgtcatcaatgaagaatataaaatctggaagaagaatacaccgtttctatatgacctggttatgacccatgctcttcagtggcccagtcttaccgttcagtggcttcctgaagtgactaaacctgaaggaaaagattatgcccttcattggctagtgctggggactcatacgtctgatgagcagaatcatctggtggttgctcgagtacatattcccaatgatgatgcacagtttgatgcttcccattgtgacagtgacaagggtgaatttggtggctntggttctgtaacaggaaaaattgaatgtgaaattaaaatcaatcac

SEQ ID NO: 4379 - DNA, 191 bp, Homo sapiens
  misc_feature (179)..(179): n is a, c, g, or t
caggagaggagctgccggaactgaccttgctgaccacactgttggagggccctgtgagataagacgcagccacctgaagaggagactttgtcccaagcccctgagagtgaggaggaacagaagaagaaggctctggaaaggagtatgtatgtcctgagtgaactggtagaaacagaganaattggactgtt

SEQ ID NO: 4380 - DNA, 540 bp, Homo sapiens
gcggccgcgcaggtgcctgcccttatcgcctgcgcccagctcgccctgcctagccaggtgcgccccgccccctgcctgcccggccaccttcgggagccgcttccaataggcgttcgccattggctctggcgacctccgcgcgttgggaggtgtagcgcggctctgaacgcgctgagggccgttgagtgtcgcaggcggcgagggcgcgagtgaggagcagacccaggcatcgcgcgccgagaaggccgggcgtccccacactgaaggtccggaaaggcgacttccgggggctttggcacctggcggacgctcccggagcgtcggcacctgaacgcgaggcgctccattgcgcgtgcgcgttgaggggcttcccgcacctgatcgcgagaccccaacggctggtggcgtcgcctgcgcgtctcggctgagctggccatggcgcagctgtgcgggctgatgctgagcctggcgtttctcgccctgctgggatcgctgctactctcctgggtcctggcggccgaccgagatcgcagcatccac

SEQ ID NO: 4381 - DNA, 3627 bp, Homo sapiens
atggagcggctgcgggacgtgcgggagcggctgcaggcgtgggagcgcgcgttccgacggcagcgcgggcggcgaccgagccaggacgacgtggaggcggcgccggaggagacccgcgcgctctaccgggagtaccgcactctgaagcgtaccacgggccaggccggcggcgggctccgcagctccgagtcgctccccgcggcggccgaagaggcgccagagccccgctgctgggggccccatctgaatcgggctgcgaccaagagtccacagcctacgccagggcggagccgccagggctcggtgccggactacgggcagcggctcaaggccaatctgaaaggcaccctgcaggccggaccagccctgggccgcagaccgtggcctctaggaagagcctcatctaaggcatccaccccaaagcccccaggtacagggcctgtcccctcctttgcagaaaaagtcagtgatgagcctccacagctccctgagccccagccaaggccaggccggctccagcatctgcaggcatccctgagccagcggctgggctccctagatcctggctggttacagcgatgtcacagtgaggtcccagattttctgggggcccccaaagcctgcaggcctgatctaggctcagaggaatcacaacttctgatccctggtgagtcggctgtccttggtcctggtgctggctcccagggcccagaggcttcagccttccaagaagtcagcatccgtgtggggagcccccagcccagcagcagtggaggcgagaagcggagatggaacgaggagccctgggagagccccgcacaggtccagcaggagagcagccaagctggacccccatcggagggggctggggctgtagcagttgaggaagaccctccaggggaacctgtacaggcacagccacctcagccctgcagcagcccatcgaaccccaggtaccacggactcagcccctccagtcaagctagggctgggaaggctgagggcacagcccccctgcacatcttccctcggctggcccgccatgacaggggcaattacgtacggctcaacatgaagcagaaacactacgtgcggggccgggcactccgtagcaggctcctccgcaagcaggcatggaagcagaagtggcggaagaaaggggagtgttttgggggtggtggtgccacagtcacaaccaaggagtcttgtttcctgaacgagcagttcgatcactgggcagcccagtgtccccggccagcaagtgaggaagacacagatgctgttgggcctgagccactggttccttcaccacaacctgtacctgaggtgcccagcctggaccccaccgtgctgccactctactccctggggccctcagggcagttggcagagacgccggctgaggtgttccaggccctggagcagctggggcaccaagcctttcgccctgggcaggagcgtgcagtcatgcggatcctgtctggcatctccacgctgctggtgctgcctacaggtgccggcaagtccctgtgctaccagctcccagcgctgctctacagccggcgcagcccctgcctcacgttggtcgtctctcccctgctgtcactcatggatgaccaggtgtctggcctgccaccgtgtctcaaggcggcctgcatacactcgggcatgaccaggaagcaacgggaatctgtcctgcagaagattcgggcagcccaggtacacgtgctgatgctgacacctgaggcactggtgggggcgggaggcctccctccagccgcacagctgcctccagttgcttttgcctgcattgatgaggcccactgcctctcccagtggtcccacaacttccggccctgctacctgcgcgtctgcaaggtgcttcgggagcgcatgggcgtgcactgcttcctgggcctcacagccacagccacacgccgcactgccagtgacgtggcacagcacctggctgtggctgaagagcctgacctccacgggccagccccagttcccaccaacctgcacctttccgtgtccatggacagggacacagaccaggcactgttgacgctgctgcaaggcaaacgttttcaaaacctcgattccattatcatttactgcaaccggcgcgaggacacagagcggatcgctgcgctcctccgaacctgcctgcacgcagcctgggtcccagggtctggaggtcgtgcccccaaaaccacagccgaggcctaccacgcgggcatgtgcagccgggaacggcggcgggtacagcgagccttcatgcagggccagttgcgggtggtggtggccacggtggcctttgggatggggctggaccggccagatgtgcgggctgtgctgcatctggggctgcccccaagcttcgagagctacgtgcaggccgtgggccgggccgggcgtgacgggcagcctgcccactgccacctcttcctgcagccccagggcgaagacctgcgagagctgcgcagacatgtgcacgccgacagcacggacttcctggctgtgaagaggctggtacagcgcgtgttcccagcctgcacctgcacctgcaccaggccgccctcggagcaggaaggggccgtgggtggggagaggcctgtgcccaagtacccccctcaagaggctgagcagcttagccaccaagcagccccaggacccagaagggtctgcatgggccatgagcgggcactcccaatacagcttaccgtacaggctttggacatgccggaggaggccatcgagactttgctgtgctacctggagctgcacccacaccactggctggagctgctggcgaccacctatacccattgccgtctgaactgccctgggggccctgcccagctccaggccctggcccacaggtgtccccctttggctgtgtgcttggcccagcagctgcctgaggacccagggcaaggcagcagctccgtggagtttgacatggtcaagctggtggactccatgggctgggagctggcctctgtgcggcgggctctctgccagctgcagtgggaccacgagcccaggacaggtgtgcggcgtgggacaggggtgcttgtggagttcagtgagctggccttccaccttcgcagcccgggggacctgaccgctgaggagaaggaccagatatgtgacttcctctatggccgtgtgcaggcccgggagcgccaggccctggcccgtctgcgcagaaccttccaggcctttcacagcgtagccttccccagctgcgggccctgcctggagcagcaggatgaggagcgcagcaccaggctcaaggacctgctcggccgctactttgaggaagaggaagggcaggagccgggaggcatggaggacgcacagggccccgagccagggcaggccagactccaggattgggaggaccaggtccgctgcgacatccgccagttcctgtccctgaggccagaggagaagttctccagcagggctgtggcccgcatcttccacggcatcggaagcccctgctacccggcccaggtgtacgggcaggaccgacgcttctggagaaaatacctgcacctgagcttccatgccctggtgggcctggccacggaagagctcctgcaggtggcccgctga

SEQ ID NO: 4382 - protein, 1208 aa, Homo sapiens
MERLRDVRERLQAWERAFRRQRGRRPSQDDVEAAPEETRALYREYRTLKRTTGQAGGGLRSSESLPAAAEEAPEPRCWGPHLNRAATKSPQPTPGRSRQGSVPDYGQRLKANLKGTLQAGPALGRRPWPLGRASSKASTPKPPGTGPVPSFAEKVSDEPPQLPEPQPRPGRLQHLQASLSQRLGSLDPGWLQRCHSEVPDFLGAPKACRPDLGSEESQLLIPGESAVLGPGAGSQGPEASAFQEVSIRVGSPQPSSSGGEKRRWNEEPWESPAQVQQESSQAGPPSEGAGAVAVEEDPPGEPVQAQPPQPCSSPSNPRYHGLSPSSQARAGKAEGTAPLHIFPRLARHDRGNYVRLNMKQKHYVRGRALRSRLLRKQAWKQKWRKKGECFGGGGATVTTKESCFLNEQFDHWAAQCPRPASEEDTDAVGPEPLVPSPQPVPEVPSLDPTVLPLYSLGPSGQLAETPAEVFQALEQLGHQAFRPGQERAVMRILSGISTLLVLPTGAGKSLCYQLPALLYSRRSPCLTLVVSPLLSLMDDQVSGLPPCLKAACIHSGMTRKQRESVLQKIRAAQVHVLMLTPEALVGAGGLPPAAQLPPVAFACIDEAHCLSQWSHNFRPCYLRVCKVLRERMGVHCFLGLTATATRRTASDVAQHLAVAEEPDLHGPAPVPTNLHLSVSMDRDTDQALLTLLQGKRFQNLDSIIIYCNRREDTERIAALLRTCLHAAWVPGSGGRAPKTTAEAYHAGMCSRERRRVQRAFMQGQLRVVVATVAFGMGLDRPDVRAVLHLGLPPSFESYVQAVGRAGRDGQPAHCHLFLQPQGEDLRELRRHVHADSTDFLAVKRLVQRVFPACTCTCTRPPSEQEGAVGGERPVPKYPPQEAEQLSHQAAPGPRRVCMGHERALPIQLTVQALDMPEEAIETLLCYLELHPHHWLELLATTYTHCRLNCPGGPAQLQALAHRCPPLAVCLAQQLPEDPGQGSSSVEFDMVKLVDSMGWELASVRRALCQLQWDHEPRTGVRRGTGVLVEFSELAFHLRSPGDLTAEEKDQICDFLYGRVQARERQALARLRRTFQAFHSVAFPSCGPCLEQQDEERSTRLKDLLGRYFEEEEGQEPGGMEDAQGPEPGQARLQDWEDQVRCDIRQFLSLRPEEKFSSRAVARIFHGIGSPCYPAQVYGQDRRFWRKYLHLSFHALVGLATEELLQVAR

SEQ ID NO: 4383 - DNA, 296 bp, Homo sapiens
  misc_feature (167)..(167): n is a, c, g, or t
ataccatttaaaggtgtgcggcgggtctctgttcacatggctcaactggaaacctgtttcatgaacaagcttactcaggaaccatctggtggtattccagcacattgttcttcagggggacgactctaagtcgctttgtggtggcagcagcttagaatcagtatttntggttgggaaagatggacttacgggagcttggtaatgcaggtggtgaaggagcaggttatgagagcacttacaaccaagcctagctccctgggacccagttcaagaggcaaacttgcaagaacccttga

SEQ ID NO: 4384 - DNA, 580 bp, Homo sapiens
cctaaacttcttttggaaaaaaaaaatataattaatttgtaagtctgaaaaaaaaatatttaatttaaaaaaaattgtaaacttgcaataatgaaaaagtgtacttctgaagaaaactacatgaacgtttttgttggtattcaagtcagctagtgtttataattactggatattgaattaggggaagctcggctgccctagtaacaaaaccagcaaacgtcctgatgacaacgaagtgatgacattagccattccttagggtaggaggaacagatggatcttatagacctatgacaaatatatatataaatatatatataaatatatattaaaaatttagtgactatggtaagcttttgttcatttgtttcagacttttttctcctgtaaaaaaatagtactgattaacttttttaaaagaaagattttactgtaaatatggatttttttttttttggtcttatttctgtccctttccctggtttgttatcgtaacctgtagtgccaactctgcttccagaggggtagtgcaggatgaaatgctgaccctgatgttgcttctcattcataaataagtaga

SEQ ID NO: 4385 - DNA, 342 bp, Homo sapiens
gaaaagtgacgcggaccagaggggtcttgcctgttccgagagaatggaagggggacgtggctaaacgtgagggggcgtggccaagatggccgcgtgcgggatcctcgggtaccgggagcgaacgaggaggttctggctcagtgcatccactctgggagagcgtggacctggttcctgggggcgatcgccagtcacccatcaacattcggtggagggacagtgtttatgatcccggcttaaaaccactgaccatctcttatgacccagccacctgcctccacgtctggaataatgggtactctttcctcgtggaatttgaagattctacagataaatcagatt

SEQ ID NO: 4386 - DNA, 574 bp, Homo sapiens
tttttttttttttttttgacagaatgagaaaattatgctttttattatagtcacataaaataaagtcagttacatcaagttgtccaaatgcattggtgaattaatgccgctaacgcttacaaatttttatacatatatctatgcatttataaatacatacatatgtaaaagatatatattttctactaaaataaagtacccaaatcttgatatatataggggcataatgggggagaaaagaatcataaggttttatcagttgtagactgtactttcagaatacaagagtctgttttagacacatttattcagctgtaatgaactttaatcacccattcttttctgaattctcctaagtgagttaatgtatccaaaatatcaaaataagtcatgtggcaaacttaatgaatcagaggctaatttttcttactgtacctggctcaaagtccagacttcccaatggaggcatggttaagctccagtcttaatttgcttgtcttttggactgtggtttttctgctaaggggaaaaacaaatcagatgtctctaattccacatcttctactagcattca

SEQ ID NO: 4387 - DNA, 472 bp, Homo sapiens
  misc_feature (463)..(463): n is a, c, g, or t
gttcccgcgggcggtggggacggcgccctcaccgcgagtcacttgtcagcccttgtctgaggcggaggcagccccgcgccgcgccggacccgagcatatttcattttctgtcattggactttgagccattagaaccatgagcaactacagtgtgtcactggttggcccagctccttggggtttccggctgcagggcggtaaggatttcaacatgcctctgacaatctctagtctaaaagatggcggcaaggcagcccaggcaaatgtaagaataggcgatgtggttctcagcattgatggaataaatgcacaaggaatgactcatcttgaagcccagaataagattaagggttgtacaggctctttgaatatgactctgcaaagagcatctgctgcacccaagcctgagccggttcctgttcaaaagcccacagtcaccagcgtgtgttccgagacttctcangagctagca

SEQ ID NO: 4388 - DNA, 5293 bp, Homo sapiens
caagagcggaggaccaggaaccagagagagagagagagaaaagagagaggagagacagagcgcttgggggcgaaaggagagagggagggaagggtgggtaaggaggagagagcggtctgctgcaaaccccaggaggagagcttggagcccaagccagaactcgagccctagccggagccgttcacagggaggcggctgccgggaccgtcagccctgcatgatgcatctccggctcttctgcatcctgctcgccgcggtctcaggagccgagggctggggctactacggctgcgacgaggagctggtgggtcccctgtatgcacgctccctgggcgcctcctcctactacagtctccttactgcgccgcgattcgccaggctgcacggcataagcgggtggtcaccacggattggggatccgaatccctggctccagatagacttaatgaagaagcaccggatccgggccgtggccacacagggctcctttaattcttgggactgggtcacacgttacatgctactctacggcgaccgagtggacagctggacaccgttctaccagcgagggcacaactcgaccttctttggtaacgtgaacgagtcggcggtggtgcgccatgacctgcacttccacttcactgcgcgctacatccgcatcgtgcccctggcctggaacccacgcggcaagatcggcctgaggctcggcctctatggctgcccatacaaggccgacatactctatttcgacggcgacgatgccatctcctaccgcttcccgcgaggggtcagccgaagcctgtgggacgtgttcgccttcagcttcaagaccgaggagaaggacggtcttctgctgcacgccgagggcgcccagggcgactacgtgacgctcgagctggagggggcacacctgctgctgcacatgagcctgggcagcagccctatccagccaagaccaggtcacaccaccgtgagcgcaggcggagtcctcaatgaccagcactggcactatgtgcgggtggaccgatttggccgcgatgtaaatttcaccctggacggctatgtgcagcgctttattctcaatggagacttcgagaggctgaacctggacactgagatgttcatcggaggtctggtgggcgccgcgcggaagaacctggcctatcggcataacttccgcggctgcatagaaaacgtaatcttcaaccgcgtcaacatcgcagacctggccgtgcggcgccattcccggatcaccttcgagggtaaggtggcttttcgttgcctggacccggtaccgcaccctatcaacttcggaggccctcacaacttcgttcaagtgcccggtttcccacgccgtggccgcctggcagtctcatttcgcttccgcacctgggacctcaccgggcttctccttttctcccgtctgggggacgggctgggccacgtggagctgacgctcagcgaagggcaggtcaacgtgtccatcgcgcagagcggccgaaagaagcttcagttcgctgctgggtaccgactgaatgacggcttttggcacgaggtgaattttgtggcacaggaaaaccatgcagttatcagcattgatgatgtggaaggggcagaggtcagggtctcatacccgttgctgatccggacagggacctcatatttctttgggggttgtcccaagccagccagtcgatgggactgccactccaaccagacggcattccatggctgcatggagctgctcaaggtggatggtcaactggtcaacctgactctggtggagggccggcggcttggattctatgctgaggtcctctttgatacatgtggcatcactgataggtgcagccctaacatgtgtgagcatgatggacgctgctaccagtcttgggatgacttcatttgctactgcgaactgacgggctacaagggagagacctgccacacacctttgtataaggaatcctgtgaggcttatcggctcagtgggaaaacttctggaaacttcaccattgatcctgatggcagtggccccctgaagccatttgtagtgtactgtgatatccgagagaaccgagcgtggacagttgtgcggcatgacaggctgtggacaactcgagtgacaggttccagcatggagcggccattcctgggggctatccagtactggaatgcatcctgggaggaagtcagtgcccttgccaatgcttcccagcattgtgaacagtggatcgagttctcctgctacaattcccggctgctcaacactgcaggaggctacccctacagcttttggattggccgaaatgaggagcagcacttctactggggaggctcccagcctgggatccagcgctgtgcctgtggtctggaccggagctgtgtggaccctgccttgtactgcaactgtgacgctgaccagccccagtggagaactgacaagggactgctgacctttgtggaccatctgcctgtcactcaggtagtgataggggatacgaaccgctccacttctgaggcccagttcttcctgaggcctctgcgctgctatggcgatcgaaattcctggaacaccatttccttccacaccggggctgcactacgcttccccccaatccgtgccaaccacagcctggatgtctccttctacttcaggacctctgctccctcgggggtcttcctagagaatatggggggcccttactgccagtggcgccgaccttatgtgcgggtggaactcaacacatcccgggatgtggtcttcgcctttgatgtggggaatggggatgagaacctcacagtacactcagacgactttgagttcaatgatgacgagtggcacctggtccgggctgaaatcaacgtgaagcaggcccggctccgagtggatcaccggccctgggttctgcggcctatgccactgcagacctacatctggatggagtatgaccagcccctctatgtgggatctgcagagcttaagagacgcccctttgtgggttgcttgagggccatgcgtctgaacggagtgactctgaacctggagggccgtgccaatgcctctgagggtacctcacccaactgcacaggccactgtgcccaccctcggctcccctgtttccatggaggccgctgcgtggagcgctatagctactacacgtgtgactgtgacctcacggcttttgatgggccatactgcaaccacgatattggtggtttctttgagccgggcacctggatgcgctataacctacagtcagcgctgcgctctgcagccagggagttctcccacatgctgagccggccagtgccaggctatgagcctggctacatcccgggctatgatactccgggctatgtgcctggctaccatggccccgggtaccgcctgcccgactacccccggcctggtcggcctgtgcccggttaccgtgggcctgtctacaacgttacgggagaggaggtctccttcagcttcagcaccagctccgcccctgctgtcctgctctacgtcagttcctttgttcgtgactacatggctgtgctcatcaaggatgatgggacccttcagctgcgatatcagctgggcaccagtccctacgtgtaccagctaaccactcgaccagtgaccgatggccagccccatagcatcaatatcacccgtgtttaccggaacctcttcatccaggtggactacttcccactgacagagcagaagttctcgctgttggtggacagccagttggactcacccaaggccttgtatttagggcgtgtgatggagacaggagtcattgacccggagatccagcgctacaacaccccaggtttctcaggctgcctgtctggtgttcgattcaacaacgtggctcccctcaagacccacttccgaacccctcgacccatgactgctgagctagctgaggcccttcgagttcagggagaactgtccgaatctaattgcggagctatgccacgtcttgtttcagaggtgccacctgagcttgatccctggtatctgcccccagacttcccctactaccatgatgaaggatgggttgccatacttttaggctttttggtggcctttctgctgctggggctggtgggaatgttggtgctcttctatctgcaaaatcatcgctataagggctcctaccataccaatgagcccaaggctgcccacgagtaccatcctggcagcaaacctcccctacccacttcaggccctgcccaggtccccacccctacagcagctcccaaccaagctccagcctcagccccagccccagccccaactccagccccagcccctggcccccgggatcagaacctaccccagatcctggaggagtccaggtctgaatgagtcagaagggcttctgggaccaattccagctcctgacattcccccagtcctgcctctcccccatcctatcagggacatttggctcctcttagctggctctgctcatccagaggatattcccccatcccccccccatcaagtttggtgggcagagctacagatgggacccaagggagtggccgagcctcactgcctaaaccaatgcccttctcatccctgtttccccaggctcctggctgtttatctgccccaaaggagaagcctcatggggttgacataggtcctttctgccatctctgttccagctgctgtcagggattaacaacagagtgtaggggagattaactgcctcccttccaatagacactatcagcagggacagatgtgtgggagtgcagggctgcagagggtatggggggaggaggctgctaaaccctatcccccagcctcccccctgccctgaagatcttccatttgcttccactcagctggaggctcaagagggcttgatggctgtcccctgcccccctccttttgttttgtacacagagaccaagaggcctcagtttagcaccttagtacctccgctgcttcacttgctttagccaaagccataaaaaacctgcaacgtagagaaaataatgcagataccctgactagccagccctctactcctccaaccttttccaagatatgcaatggcctttgtgcctgcccaaaggcttcgcccctccagtgcatgaggaaccctctttcctccgctcagagatgctgcttcatttacccaggaggtcatattctttatatatattttttgttgcaaagtgtctctctagagaaactctatatattattcgaatttttaaattatttgtttatatataaaagaaaagctcaattggcaaaaaaaaaaaaaaaaaa

SEQ ID NO: 4389 - protein, 1384 aa, Homo sapiens
MMHLRLFCILLAAVSGAEGWGYYGCDEELVGPLYARSLGASSYYSLLTAPRFARLHGISGWSPRIGDPNPWLQIDLMKKHRIRAVATQGSFNSWDWVTRYMLLYGDRVDSWTPFYQRGHNSTFFGNVNESAVVRHDLHFHFTARYIRIVPLAWNPRGKIGLRLGLYGCPYKADILYFDGDDAISYRFPRGVSRSLWDVFAFSFKTEEKDGLLLHAEGAQGDYVTLELEGAHLLLHMSLGSSPIQPRPGHTTVSAGGVLNDQHWHYVRVDRFGRDVNFTLDGYVQRFILNGDFERLNLDTEMFIGGLVGAARKNLAYRHNFRGCIENVIFNRVNIADLAVRRHSRITFEGKVAFRCLDPVPHPINFGGPHNFVQVPGFPRRGRLAVSFRFRTWDLTGLLLFSRLGDGLGHVELTLSEGQVNVSIAQSGRKKLQFAAGYRLNDGFWHEVNFVAQENHAVISIDDVEGAEVRVSYPLLIRTGTSYFFGGCPKPASRWDCHSNQTAFHGCMELLKVDGQLVNLTLVEGRRLGFYAEVLFDTCGITDRCSPNMCEHDGRCYQSWDDFICYCELTGYKGETCHTPLYKESCEAYRLSGKTSGNFTIDPDGSGPLKPFVVYCDIRENRAWTVVRHDRLWTTRVTGSSMERPFLGAIQYWNASWEEVSALANASQHCEQWIEFSCYNSRLLNTAGGYPYSFWIGRNEEQHFYWGGSQPGIQRCACGLDRSCVDPALYCNCDADQPQWRTDKGLLTFVDHLPVTQVVIGDTNRSTSEAQFFLRPLRCYGDRNSWNTISFHTGAALRFPPIRANHSLDVSFYFRTSAPSGVFLENMGGPYCQWRRPYVRVELNTSRDVVFAFDVGNGDENLTVHSDDFEFNDDEWHLVRAEINVKQARLRVDHRPWVLRPMPLQTYIWMEYDQPLYVGSAELKRRPFVGCLRAMRLNGVTLNLEGRANASEGTSPNCTGHCAHPRLPCFHGGRCVERYSYYTCDCDLTAFDGPYCNHDIGGFFEPGTWMRYNLQSALRSAAREFSHMLSRPVPGYEPGYIPGYDTPGYVPGYHGPGYRLPDYPRPGRPVPGYRGPVYNVTGEEVSFSFSTSSAPAVLLYVSSFVRDYMAVLIKDDGTLQLRYQLGTSPYVYQLTTRPVTDGQPHSINITRVYRNLFIQVDYFPLTEQKFSLLVDSQLDSPKALYLGRVMETGVIDPEIQRYNTPGFSGCLSGVRFNNVAPLKTHFRTPRPMTAELAEALRVQGELSESNCGAMPRLVSEVPPELDPWYLPPDFPYYHDEGWVAILLGFLVAFLLLGLVGMLVLFYLQNHRYKGSYHTNEPKAAHEYHPGSKPPLPTSGPAQVPTPTAAPNQAPASAPAPAPTPAPAPGPRDQNLPQILEESRSE

SEQ ID NO: 4390 - DNA, 704 bp, Homo sapiens
gagagcatcctttcaagatcggggtccggaggagcagcttcgtgctgcgcgaactttagcaggaggaccaatgattagcatttatgatgcagagacagaacaacttcgtataggaccgtactcctggacaccatttccacatgtggatttctggttgcaccaagatgacaagcaaatactagagaatctttccacttcgcctctggctgagccaccccactttgttgaacatattagatctaccttgatgtttttaaaaaaacacccatctccagctcacacactgttttctggaaataaagccctactctacaaaaaaaatgaagatggcttgtgggaaaagatctcttctccaggaagttaaaaaacatgaattaccaaagaaagcaccttcttggcctgacagaccattggtggggctggcacgaatccagatctggatcctacatctgttgggtcttaggcctccttccctcctcagtgtctttcaaatgactttcatcaaatgactttcaaaataaaaccttattttggcaaaggcaaaaaaaataaaataattataaaaaaactcgagggggggcccggtacccaattcgccctaatgtgagtcggtttacaattcactggccgtcgttttacaacgtcgtgactgggaaaaccctgccgttacccaacttaatcgccttgcagcacaatcccctttc

SEQ ID NO: 4391 - DNA, 427 bp, Homo sapiens
tttttttttttttttatagccaacctttttttttttttaattagagtatattatactttcaaactggatacactagaaattggcaatgcaacataagatgcaaaggaatataccagttactgtcaaaatgaccctgtacagcctcgtaatgcaaaaagctttatacaatacaaattttcagtaatgtacacaaaccttgacagtatgatcatctgaacataatatgaagagttaaaaaaaggatagaagaaagaaagtgctgagaaccctaactgcattactatatggaaaaataagctagttttcattgaagaatgcatagtgacaacaattgaagttagttggtaggtgaatttctcaaagatgttagtgttttatacggaaaggatatctatggaatacatccttccctgagtatcaaactgca

SEQ ID NO: 4392 - DNA, 469 bp, Homo sapiens
atgctttttttttttttttttttttcttacaaagcaggttactttattagcattttaaacaatgtataagtgatggaatcattctaacaacacatctattcactgcttacaattccaactaatttcagttctttgatatctaatgacaagagcgaagacctgttaaagttccttccaccagtaaaactcacagctcaaagttgtgggagtgattaactgagccacaggccttcattcacatgtttaccacattaaaataccacacagtgttttcttataaggtcaaccaactgggaagcaattaacattagcattaagatttaaactgttaggcacagggctaaatcaggcattatatgaaaacttgtggttccctagtcaagtcaaacaaatccccaaatatttcagcttgtaacagttttgtccttcctctcttgagacaattatttgagtacttgcttttggaaat

SEQ ID NO: 4393 - DNA, 290 bp, Homo sapiens
gcaatgtataagacctttatgttatcattcagtgctttgttttgttataattgagcgtctaattttctaaaatgcaggaaaccttaggaacaaccaagatgacagttttgttaccttagtacccccgcatccacaattttgttttctgtgatctggaaatacacaattcataaatttgcaggccattctaagtagcatgatgaaatcttgcaccatcctactctgttctgccctggatgtgaatcaacttattcattctgtctacattacccacacactgaccacttagt

SEQ ID NO: 4394 - DNA, 379 bp, Homo sapiens
  misc_feature (159)..(159): n is a, c, g, or t
  misc_feature (304)..(304): n is a, c, g, or t
  misc_feature (344)..(344): n is a, c, g, or t
gttagtgtttagtcattttaataatcaaaaacagagaaaattaccaaaagtgaaattcacagacaagaaatactttaattaaatattgtgtaaaatgaacatttttatacagttaaatatctgaaaaaatgtacagataaaacaatcttattgtagggnctttaacagtaaaatctaccatttagtgaagtgctcagtcttgagacagtgaagtgatgtgggcattgactacttaacctaaaacacaaaccaagtgagggcatggggaagctggcaggcgttctcagtgcgtccatgtgagctnttttgtagatcaaacccttactcgtacaaaataaaatggnggcaatttagttccaaagtggcttcttcaggcttt

SEQ ID NO: 4395 - DNA, 768 bp, Homo sapiens
ttatgcttctttcaaacctggccttgtcgcatgactgtaaaggagtaattcagaagagtaacttcttacagaacttcctctctctagcatgccaaaaggaggaaataaacatctaagtaatctgactattcttggttgaagttactcctgaatatatcatctggagaagatgggcaacaaatgattctgaggcttgatggctgtctagacttactaacagagatgagcaaatacaagcacaagagcagccctttattgcctcttcttatctttcataatgtttgcttcagtcctgcaaataaacccaagatcctggctaatgaaaaagtcattactgtgcttgctgcctgtctggaaagtgagaatcaaaatgctcagaggatggagcagctgcccttgggctctgatttacaattatcagaaggcaaaaacagctttgaaaagcccatcagtaaaaagaagagtggatgaagcatactccttagcaaagaaaactttcccaaactcagaagcaaaccctctaaatgcctattatttgaaatgtcttgaaaacctcgtgcagctccttaattcttcctgagtgccatgggatgctacaccttgaagctgacagtcatcaacaggggagctaaagttgaagccagctgtgtgtagcagctgttacctgaagacgtgctacctctctacaaagtgttgatccccttctttcccatgagagagagaatggtgatactccaacaacgtcagtggggcagctctccagaagta

SEQ ID NO: 4396 - DNA, 272 bp, Homo sapiens
tacccatttatgtaggggccccaggtaacctacacacagccagaatgaggttcccaaaggacttacattaattatggctcttgcttcctttcacaaatgagctgaggcctctacttttttttttaagctgcatacgtgaggcttaccttcttcaggactagttaaccagaggggcttcctttgtatgttacatgcctggttacatgggcctggacagcatgtcctctacctgtgacttctcattttcctgtttacactggggatttggaggg

SEQ ID NO: 4397 - DNA, 5495 bp, Homo sapiens
cggcgctgctcccaggcatctccgaccctcggtgctgtggggagccccacacttgggctcctcgcctctcgccctcgctccccgtccctcctcccctctctccgccccttcccccttttctttctcctctctttcttcccctctctcccttctttcggccgccgtctcccccgcgccctcctcggggcggagggaagccgtgaagggggagggagggctcggtgtcaatttttttttgtgtggctgcggccgtagcctgtggcgggcaagcggggagaccccggcgcagcagaaccatggatggcccgacgcggggccatggactccgcaaaaagcggcggtcgcggtcgcagcgagaccgggagaggcgctcccggggcgggctgggggccggcgcggccggcggcggcggggctggccggacccgggcgctctcactcgcctcgtcgtcgggctccgacaaggaagacaatgggaagcccccgtcctccgccccgtcccggcccagacccccgcggaggaagcggagagagtccacctcggcagaagaggacatcattgatggatttgccatgaccagctttgtcacttttgaagcgctggagaaagatgtagcacttaagcctcaggaacgtgtggagaaacgccagacgcccctgaccaagaagaaacgagaagcacttaccaatggcttgtcctttcattcaaagaagagcagactcagccacccacaccactacagctcagatcgagaaaatgaccgcaatctctgccagcaccttgggaagagaaagaaaatgccgaaggcactcagacagctcaagtcaggacagaacagctgcagggacagtgacagtgaaagtgccagtggagaatccaagggcttccaccggagcagctctcgggaaaggctcagtgatagttcagctccttccagcttgggaacaggctacttctgtgacagtgacagtgaccaggaagagaaggcatcagatgccagctctgaaaaactcttcaacactgttattgtaaacaaagatccggagttaggtgttggcacgctaccagaacatgacagccaggatgcagggccgattgtccccaagatatcgggtctagagagaagccaggagaagagccaggactgttgcaaagagccaatctttgagcctgtggtgcttaaagacccctgccctcaggtcgcacagccaataccccagccgcagacggagccccaactccgagctccttctccggaccctgacttggtgcagcgcacagaggccccacctcaacccccacctctgagtacacagccaccacagggccctcctgaggcccagctccagcctgccccgcagcctcaggtgcagaggccacccaggccacagtcccccacccagctgctccatcagaacctcccacctgtgcaggcccacccctctgctcagagcctctcccagccattgtcagcctacaacagcagtagcttaagcctcaacagtttaagcagcagcagaagcagcactccagcgaagactcagcccgccccacctcacatctcccaccacccctctgcctccccgttccccctctccctgcccaaccacagccccctgcacagcttcacacccaccctccagccccccgcacactcacatcaccccaatatgtttgcccctcccactgctctgcctcctccaccaccactgacatcaggaagtctgcaggtggccggacacccggccgggagcacttactcagagcaagacatcttgcgacaggaactgaacactcgttttttggcctctcagagtgctgaccgcggggcttccctgggccctccgccctacctgcggaccgagttccatcagcaccagcaccagcaccagcacacccaccagcacacgcaccagcacaccttcacgccgttcccccacgccatcccacccaccgccatcatgccgacgccagcacctcccatgtttgacaaataccctacaaaagttgacccattctaccggcacagtctcttccattcctatcctcctgcagtgtcgggcatcccccctatgatcccacccactggcccttttggttcactacaaggagcatttcagccgaagttgacagatcctttcagacctatgttaaggaaaccagggaagtggtgtgctatgcatgttcacatcgcctggcagatttaccaccaccaacagaaagtcaagaaacagatgcagtcagacccacataagctggactttggactgaaacctgagttcctgagccgccctccaggccccagtctttttggagccatccaccacccccatgacctggcacggccttcaactttgttctctgccgctggtgctgcacacccaactgggaccccttttgggccacctcctcatcacagcaacttcctcaaccctgctgcccacctagagccttttaatcggccgtctacattcacaggcctagcagcagttggtggcaatgccttcgggggacttggaaatccttccgttacacccaactcaatgttcggccacaaggatggccccagtgtgcagaactttagcaaccctcacgaaccctggaaccggctgcaccgaacgcctccgtcgttcccgacccctccgccctggctgaagccaggggagctggagcgcagcgcgtccgctgcagctcatgacagagatagagatgtagataaacgagactcatctgttagtaaagatgacaaagaaagggaaagcgtcgagaagagacactccagccacccttcaccagcacctgtcctcccggtgaatgccctgggacatacccgcagctccactgaacagatccgggctcatctgaacactgaggctcgggagaaggacaaacccaaagagagggagagagaccactcggaatcccgcaaggacctggccgccgacgagcacaaggcgaaagagggccacctgcccgagaaggacgggcacggccacgaggggcgcgccgcgggcgaagaggccaagcagctggcccgggtgccgtctccctacgtgcggaccccggtggtggagagtgccaggcccaacagcacctcgagccgggaggccgagccgcgcaagggtgagccggcctacgagaaccccaagaagagctccgaggtcaaggtgaaggaggagcggaaggaagaccatgacctgcctccagaggccccgcagacccaccgggcctcggagccgccgcctcccaactcctcgtccagcgtgcacccggggcccctggcctcgatgcccatgacggtgggggtgacgggcattcaccccatgaacagcatcagcagcctggacaggactcgcatgatgacccccttcatgggcatcagccccctcccgggcggagagcgcttcccgtacccttctttccactgggaccccatccgggaccccttgagggatccttaccgagaacttgacattcaccggagagacccgctgggcagggacttcctgctaaggaacgacccgctccaccggctctcgactccccggctgtacgaagccgaccgctccttcagggaccgggagcctcacgactacagccaccaccaccaccaccaccaccacccgctgtctgtggaccctcggcgggagcacgagcggggaggccacctggacgagcgggagcgcttgcacatgctcagagaagactacgagcacacgcggctccactccgtgcaccccgcctccctcgacggacacctcccccaccccagcctcatcaccccgggactccccagcatgcactatccccgcatcagccccaccgcgggcaaccagaacggactcctcaacaagacccctccgacagcagcgctgagcgcacctcccccgctcatctccacgctggggggccgcccggtctctcccagaaggacgactcctctgtccgcagagataagggagaggcccccttcccacacgctgaaggatatcgaggcccgataagccgagaacaggagcaagaacgaggaagaagaaaccctaggcagacaccaggccaggcttgagagacagaactcctgcatggctcacacagactgggggggaaagccccaccccttccccttgtaaaaaatgtatagactcagtgcacattttgaaatgttttgtatattatatgttgagatttttcagatcttttagcccagtcatatgttctcacgtctcctactttttgtttctcgtataaaactttttgatttgaaccaaaacagtgaagatgacaacacacaccaattggatgataattgtagcgggggcggtgggggggagaagtccacgccatccatcatgcaaaattctttcagatgaggtgggaaggccgtgtacatagttatgtaaaaagagattgcttcatgagctaatggttcatatatgcaaaagggtaagatgaaagctttactttgtacaaatgtaaatagataaagtaacataatacattaatacttcttaaaatgtgctatttgcaaacttacttaatatcagtgaacacagtcggctaaagctgtgttcccatatattgttatagacagctaaacccttcaactatgcaatgaatgttcgggcttttcacaaaagcccgcctaactcaaaggagccttttcaaatccatttacagcatacttaaggtcatattttccctgaacaagcgcttacgtgatatgactctgttttccttgcttgttttttttcaaacggagaaacatcctgttttgcaaattggaccccaggctggaacttagcatctgaagttgccgcttgtgggctctgggggaaagtgtagccccggagaggtaactgaggacatgagcaaccagtgccagggagggtgggatttgccagatgccaaaatcaggggacgggtggtggtgtctgtcagacacacacaggtcgccagtgacttcacacacacctcatgtgagaaccatgccttttttagtgtgtcctatttcatacctgtacacacttcctcgttttgtaatgagatttacttacacccaaacagatcctgaaagaaagcttcaagttttctcagatgatggatatgttttcactgtattcaataactgacggatgtaaggtgcacgtttcctgatgtgacgcactgtattccagctggtgatcaagtctgggaacagccgtaacaggtcaaccttgtggagccatcgcgagttagagggtgaaagatggcagaaaaaaaagtcttgtgtgtgagtgtgttttttgagtttgcatcaatcttaatgtctcttcataatacttttataatacattaagcctcttgtctacatatttggagagaatatgactttactagcagagaaatacaatatatcttgtctactggactgtaaaatatatgtatgaaataaaattagttccatttggtcttctagtatattaaagtgctatctgacgttgttatcctgtttttgc

SEQ ID NO: 4398 - protein, 1266 aa, Homo sapiens
RGREGSVSIFFCVAAAVACGGQAGRPRRSRTMDGPTRGHGLRKKRRSRSQRDRERRSRGGLGAGAAGGGGAGRTRALSLASSSGSDKEDNGKPPSSAPSRPRPPRRKRRESTSAEEDIIDGFAMTSFVTFEALEKDVALKPQERVEKRQTPLTKKKREALTNGLSFHSKKSRLSHPHHYSSDRENDRNLCQHLGKRKKMPKALRQLKSGQNSCRDSDSESASGESKGFHRSSSRERLSDSSAPSSLGTGYFCDSDSDQEEKASDASSEKLFNTVIVNKDPELGVGTLPEHDSQDAGPIVPKISGLERSQEKSQDCCKEPIFEPVVLKDPCPQVAQPIPQPQTEPQLRAPSPDPDLVQRTEAPPQPPPLSTQPPQGPPEAQLQPAPQPQVQRPPRPQSPTQLLHQNLPPVQAHPSAQSLSQPLSAYNSSSLSLNSLSSSRSSTPAKTQPAPPHISHHPSASPFPLSLPNHSPLHSFTPTLQPPAHSHHPNMFAPPTALPPPPPLTSGSLQVAGHPAGSTYSEQDILRQELNTRFLASQSADRGASLGPPPYLRTEFHQHQHQHQHTHQHTHQHTFTPFPHAIPPTAIMPTPAPPMFDKYPTKVDPFYRHSLFHSYPPAVSGIPPMIPPTGPFGSLQGAFQPKLTDPFRPMLRKPGKWCAMHVHIAWQIYHHQQKVKKQMQSDPHKLDFGLKPEFLSRPPGPSLFGAIHHPHDLARPSTLFSAAGAAHPTGTPFGPPPHHSNFLNPAAHLEPFNRPSTFTGLAAVGGNAFGGLGNPSVTPNSMFGHKDGPSVQNFSNPHEPWNRLHRTPPSFPTPPPWLKPGELERSASAAAHDRDRDVDKRDSSVSKDDKERESVEKRHSSHPSPAPVLPVNALGHTRSSTEQIRAHLNTEAREKDKPKERERDHSESRKDLAADEHKAKEGHLPEKDGHGHEGRAAGEEAKQLARVPSPYVRTPVVESARPNSTSSREAEPRKGEPAYENPKKSSEVKVKEERKEDHDLPPEAPQTHRASEPPPPNSSSSVHPGPLASMPMTVGVTGIHPMNSISSLDRTRMMTPFMGISPLPGGERFPYPSFHWDPIRDPLRDPYRELDIHRRDPLGRDFLLRNDPLHRLSTPRLYEADRSFRDREPHDYSHHHHHHHHPLSVDPRREHERGGHLDERERLHMLREDYEHTRLHSVHPASLDGHLPHPSLITPGLPSMHYPRISPTAGNQNGLLNKTPPTAALSAPPPLISTLGGRPVSPRRTTPLSAEIRERPPSHTLKDIEAR

SEQ ID NO: 4399 - DNA, 487 bp, Homo sapiens
tctgtgatatgaatgtttattttgatattccaaatcacttataggttaatatttcaatcaaaactacagttacaactatgcttaaagaatgcacagaaatagttaacacaatgcctgaaccatgagacaagaattcttgacccctaaagacaaaaggaaggggaaaatcatcttgctgttatgtgctgctctgcttcccacgagtttctcacagatttatggaccctgagatattctgattttcagaaaaaaaggtagaaattcaataaactcaataagcaggtctgcttgtagatctggaattgcatgggagaaaaacattctaacagaggcaactatagtacattttcttttttcactcatttacctaatatttttaaagctgggcacaggagatacagtgataaatgagaatgatggcagcatgcctgaaggaacttgcagacaggccaaggagctggcaaatacaatagagtatgttttaagt

SEQ ID NO: 4400 - DNA, 1236 bp, Homo sapiens
gggggccgcgagcactggcgggttctgggtcctgtgaccggtcaggcggcgtcagcgggcgcggcggagggctggccggcctcgggggagtttccgcggccgccgggggcgcggcggcagagcgcgaggccgggcagggggccagactcggagtcgaggcgcgcccgacagccgcagcgctcatggcgggcggaggagccggggaccccggcctgggggcggccgccgccccagcgcccgagacccgcgagcacctcttcaaggtgctggtgatcggcgagcttggcgtgggcaagaccagcatcatcaagcgctacgtccaccagctcttctcccagcactaccgggccaccatcggggtggacttcgccctcaaggtcctcaactgggacagcaggactctggtgcgcctgcagctgtgggacatcgcggggcaggagcgatttggcaacatgacccgagtatactacaaggaagctgttggtgcttttgtagtctttgatatatcaagaagttccacatttgaggcagtcttaaaatggaaaagtgatctggatagtaaagttcatcttccaaatggcagccctatccctgctgtcctcttggctaacaaatgtgaccagaacaaggacagtagccagagtccttcccaggtggaccaattctgcaaagaacatggctttgccggatggtttgaaacctctgcaaaggataacataaacatagaggaagctgcccggttcctagtggagaagattcttgtaaaccaccaaagctttcctaatgaagaaaacgatgtggacaaaattaagctagatcaagagaccttgagagcagagaacaaatcccagtgttgctgatatatggcttctgcttctcttgtgtgtgcctcagctctgaagaagttcctgagaatgggttacagatgtcatgttagctgggagtcttcccacatgtggcacttcaaaaggcagcaccactgggcgcctgcacttatttgaaaatggaactttgggagaagtatccctgctagtggctctgtaacttaacagatgacaattaggcttttgtcattgttgccatcatatggaagataatgtttacatccttttaaacatttttatatgacaattcctcaggatttggtaaggcttccaagttgtagcttttagtgtaagtgctggggtggtaataaaatgttacctgcaaaaaaaaaaaaaaaaaaaaaaaaaaaaa

SEQ ID NO: 4401 - protein, 225 aa, Homo sapiens
MAGGGAGDPGLGAAAAPAPETREHLFKVLVIGELGVGKTSIIKRYVHQLFSQHYRATIGVDFALKVLNWDSRTLVRLQLWDIAGQERFGNMTRVYYKEAVGAFVVFDISRSSTFEAVLKWKSDLDSKVHLPNGSPIPAVLLANKCDQNKDSSQSPSQVDQFCKEHGFAGWFETSAKDNINIEEAARFLVEKILVNHQSFPNEENDVDKIKLDQETLRAENKSQCC

SEQ ID NO: 4402 - DNA, 521 bp, Homo sapiens
  misc_feature (455)..(455): n is a, c, g, or t
tttgtttaattattcagttaacttttatttatttttaatagagatgcggtcttgccatgtttcccagcatgaccccccagttcctgggctcaagtgatcctctggcctcagcctcccaaagtgctgggattagagacatgagccaccgcacccggccaagccactcatcttttaacccatttcccgtttagagaaaaaaaaagtgcagctcactgccagcactcattccttggggcaaatgggagatgggccaaagggattcaaataacgaggaaaatcctggatggtgcacatgcttctcatttttctcttccctgaagcacatcatttaacatttcttgtagtgcaggtctgctggggatgaaactcttagtttctgtgtgtatgaaaatgtctttatgtcaccatcgcttcggaaagattttgtcaggtacagaatgtgaatttggcagttntctccttagtacattccactgcctctcacccatgctgctcctgaggagtcagccatcctcatcagc

SEQ ID NO: 4403 - DNA, 281 bp, Homo sapiens
  misc_feature (252)..(252): n is a, c, g, or t
ccctccctctgagacatccgaattgtgggcgagcagtgtgatttctctgtggctggccgtgcacactcacccccagagcacttatgttaacttggaactgtttagagagaatttttttgctttcttgggtcacatggctcagtagccattagccatagcttgattttgcaaactgggcaagggcctgggcacacctttccttccaccaggggcatgggtgtttctgggaagagtttgaagctagatccgggnatgccaaaaaagaagcttttttttttttc

SEQ ID NO: 4404 - DNA, 393 bp, Homo sapiens
ttttttaattcaacctaggggctttagtttttttttaatggaaagaactggcctagaataacctactgctacagatacagctattcttctgattgggatggggaatccgtgcccacccgtgatgaaggtcccagtggtccagtcccctgcttcctggataaagggaggctcctcaggatcggaaagctaaaggcctctaagccctgatcaagtccaaagtgaaaccgccccagtgctaaaaggacggattccctgaacctgtcaagggcataagcagcctatatttgcaggtggctcacggttttcctaggacctgaagaactgagatttgtggtcagtttaatgcattgatcattataaactgagtgtctaccaggggccctactttgctag

SEQ ID NO: 4405 - DNA, 608 bp, Homo sapiens
atttcttttttctgggagtctatagatggagcaaaaatgaaatcaatgtcagacatattatatttgatttggttcaaatgtggctgatgtccatttgcagcagagaagaactgaggggaggaaggtacacagtgttgccggcaaggggacactgaacaaaaacagtttgccattcattgtaaaagtgggcgggcaccacacagtcagtgtgagtcagttaaccaagacaagggactcaaggttcaatgagcagggataaaaccaaggtaagcgggttggggggtgggggaataagtacagaactttcaagagacaaggccagaacatttagagaactagctgcagcagaggctggctggagaacggtggtcagtgcaggtctgctggatcacttggggaacatgatgatcacatcgtaccctcaagtggtgtgacttgctcctgggcatgctcttcacagtagatttgatggaaaaaaaaaaaaaagcccttctctttcgggtggagtgtcacaatcagtgcacacgtaacattcagggaggggatgatggtccccgcaactttacaaacatgcctacaatgccaggaccacatttgtcacacatggg

SEQ ID NO: 4406 - DNA, 422 bp, Homo sapiens
tttttgcttagcaaacacagcagatgatattgcacggcataaagtgagaacagtagcgaagcttaaaataaatgaaagaaaccttaatgcagtacaggagatactcagaaacaaaccagaataatgcctaatgcattacacgtttttgttgctacacacaaaaatacagaagcagcatcggacagagagaaagagagagagacaaaatattagcaaacaaccataactgggtacaataatcatttagtctgaaatgtagatgcaacgtagaaactaccactgttttctaattgacaaagaaaatgacagcaacatttgtcttttatcaaaaaatcttctaagcccctcatggttagggttttaattaactatttaattatgtatttaccctttttttttgtctttttttcattgctaaggaa

SEQ ID NO: 4407 - DNA, 5597 bp, Homo sapiens
cgcgcttccgggttggctgtggctgtggctgcggcggcggcgcaggagcagaaaccggtgcggcgcagaagccccagaggcgggcggggcggagcggagggccagcgggccccggcgtgggtctcccgccaggccgccggatttaacccttagtggcttctgaagaaaatggcagaaacatcgccagagccttctgggcagcttgttgtacactcagacgctcacagtgacactgtgctggccagttttgaggatcagaggaagaaaggcttcctctgtgacattactttaatcgtggagaatgtacatttccgggcccacaaagccttacttgctgccagtagtgaatacttctcaatgatgtttgcagaagagggggaaatcggccaatccatttatatgctggaaggcatggttgcagacacctttggtatcctgctggaatttatctacacaggttatctccatgccagtgagaaaagtacagaacaaatcctggctactgctcagttcttaaaagtctatgacctggtaaaggcttacacagacttccaaaataatcatagctccccaaagccaacaactttgaacactgctggtgccccagtggttgttatccctaataagaaaaacgatcctccaaagcggaaacggggaagaccaaaaaaagtcaatacattgcaggaggagaaatcagaactggctgcagaggaagaaatacagttaagagtgaacaattcagttcagaatagacaaaactttgtggttaaaggagacagtggtgtactgaatgagcaaattgcagcaaaagaaaaggaagaatcggagcctacttgtgagccaagtagagaggaggaaatgccagttgaaaaagatgagaactatgatcccaagaccgaggatggccaggcaagccagagtcgatacagcaagcggaggatttggagatccgtcaaacttaaagattacaaacttgttggggatcaagaggaccatggttcagccaagaggatctgtggaaggagaaagcgccctggaggccctgaggcccgctgtaaagactgtggcaaggtctttaagtacaatcactttttagcaatccaccagaggagccacacaggggagcgacctttcaaatgtaatgagtgtggaaaaggctttgcccagaagcactcgctacaggtccacaccaggatgcacacaggcgagcggccgtacacctgcaccgtgtgcagcaaggctctgaccaccaagcactcactgctggagcacatgagcctgcactcaggacagaagtcttttacctgtgatcaatgcggaaaatatttcagccagaacagacagctaaagagccattaccgagttcatacaggccactcattaccggaatgcaaagactgccatcgcaaattcatggatgtgtctcagctaaagaaacatctgcgaacacacacaggtgagaagccatttacttgtgaaatctgtggcaaatctttcacagcaaagagttctcttcagacccacatcagaatccatcgaggagaaaagccatactcctgtggcatttgtggcaaatccttctctgactccagtgccaaaaggagacactgcattctacacactggcaagaagcctttctcctgccctgagtgtaacttacagtttgctcgcttagacaacttgaaggctcacttgaaaattcatagcaaggagaagcatgcttcagatgccagcagcatttctggcagtagtaatacagaagaggtcaggaatattcttcagctacagccatatcaactctctacctcgggagagcaggaaattcagcttctcgtaaccgattctgtacataacatcaatttcatgcccggtcctagccagggaatcagcattgtgactgcagagagttcccaaaacatgactgcagaccaggctgctaatcttaccctgctcacgcagcagccagagcaactgcagaatttaattctttcagctcaacaggagcaaacagaacacattcagagcctcaatatgattgaaagccagatggggccctcacaaacagagccagtgcacgtgatcactctgtccaaggaaacactggaacatcttcatgcccatcaagagcaaacagaggagctccatttagctacaagtacttcagatccagctcagcacctgcagctgacacaggagcctggtccgccaccacccactcaccacgtgccccagccaacgccacttggccaggagcagagctgacctgtaaacacgtttgactgcttgattgggctcttcttataagccagctctgactggattttgaacgcttgaaatcaggctctccacaccattgacttgcagatgcttctgtgagagctgtgatggctaactgatgtttataatgccctccatccaggtagcaagatgtgtgtatgtcttgtctaaggtactgatttgtattgagcatttcaatattattgaatggttttcattttaatctgcaatgtctcataaagactcgggtagtttttctttgggggcattgatctcagtttttctgtaaggtttaaatgttcacagccataggttatggtcttgccaacctccccagttatgtttttttgttttctaggacaaagggagtcattttggttgaactgggcagaatggtttgttctattttcttatttttcttaggcaacacagttgttaccacaagacaagtcagggctaaatatgacagatcacaatgtatggggaatttgcccttttaataatttccagtcccctaagacaaagtaaccctcaacgttttatctttatgcagtacagtgggcttattgtgttaacacttcagaaagattcaaactcataaactcagtattttaactcaaaattcatgtaacaagatagccaaaagcataggatttcttaaaattctgaattcgtcttttctgagaaacataaatttacatatttttcaacagaaggctatcaaaattttaattaagtttaaaatacaaaattggatcaagacattcaccctaaattctgaatttttgtcagaaaagagatttgattttcatgaaggtaaagctttcttcactattctggaacataaaactttattcagtgtaatttaagtcttatatatactctactgaattctaactgatctcctgaaaatgttgatctacgtgttgtgtctgataactttctggagatggaagcttataattcatttttattgcagactagttaaatcccacaaagtgaatatcttctcctaatctttccttttttagagacggggtctcactgtatcacccaggccagagtgtagtggcacaatcattgctcactgtagcctcgaattcctgggctcaagcaaccctcccaccttagcctccctagtagctgggactacagggatgtaccaccacacccagctaatcttcatctaatcttaaaactttgagcctcagagactttgtagccagcatgtgtctgtaattgtatgatttttaaatcatcatcaaaagattaaattatgtttgggttaggttttcaagctaagcttattgaattcttttaccactttcatgtaagctggtaggggatttttgagaaaagaaggtgggcactagtatatctaaattaacaatgctgatggggagtagggggtaatctactctaaaattaatagagcctttccatcaattgttttgttttagacatccttgatttctccctaaatcaaataagttatttggaggttagagtaatagagaattcttcaggtttgagagaagataaaaacattttggttgcatatttgctaagctatattttattatatgtaattcacaaaacttccaaaatgatatatatcttatatgtatcaaccaaactaatgttaaatcaggcctgactagagcaaagataacaattttttacaaacactgttaagccctaagtattatttcaggttctcgtttaaactgtttaattttattcttaaaacacaaagtttttaccaacttttcaaagcccaccaatccacattttctccaggaaattaaatatttaagtaagtgagtgtttactcactctggatagctaggtgattattcagaaaatacggttacatagctatttataagtcaagtttcactggctctataacagtctacctctacactaagagaactataacatgaacaacataggtcactttaaatgttctagtagcaacttttaaaaacataaaaagaagcaggtgaaaatgttaataaaagtttatttaatccaacatttgccaaatatttcaacatataaaaatatattagtgagacattttacattctctttttcatactaagctttcgaaatctggtgtgtattttacactttctgcacatctccatttggatgctaatgttcattggacatacttgatctgtatttagatttcatacaacttacagttgaaaacagattctcatatcaagtagctaagacaaaagtttttttcaagaattgaaataagtatcagtttaaaaatttatattaaatttattaaaattaaaatccagttccttgttgcatgggacacagtgcaaatgcttgataagcacatgtggctagtggctgctatattggacagcatgggccacctgtttctaacttgagcatcagtcctagctatgcctgaattatttgaccagctgtcaaagagaaacaaggaaatgatagctttgttaatctagcctctttctttgtcccacatatacattctacccctttgaataaaaaagttcaatgacgccgggcgtggaggctcatgcctgtaatcccagcactttgggaggccaaggtgggcggatcacgaggtcaggagttcgagggcagcctgaccaacatagtgaaaccccatctctactaaaaatacaaaaattagctgggcgtggtggtgtacccctgtaatcccagctactcgggaggctgagacaggagaatcacttgagcccaggaggcggaggctgcagtgagctgagatcacgccattgcactcaagcctggcgacagagcgagactccgtctcaaaaaaaaaagttaaatgacttgagtacccaaaagaaatgtcgtgaacatgaaagtacttctcatgtgtccttgagaaatgatgttgctagtgcagtgtttcacaattcattttctactaaatgtgtaccattttttaaattgttttaacagaaatatagagtgtgtttcttaggaaatagaatgttatgctttggggctcctgaaacacctcgttttgaaggtgaatctttggttttctcccagaagagggtctgccttgagatgattggagctcttaccatcaaaatcagttattcaagtgcttgcccagtgcttcttgaaactcacctctactctgtattttctacagttggttcttgtgttataaatgttgtgagcaacagattaaatgatgctgaggaatgaaaaaagattctcattataaatgcttacctaggattctcattatagatgcttatctaggttttcataaatgggaatgtaacaat

SEQ ID NO: 4408 - protein, 697 aa, Homo sapiens
MAETSPEPSGQLVVHSDAHSDTVLASFEDQRKKGFLCDITLIVENVHFRAHKALLAASSEYFSMMFAEEGEIGQSIYMLEGMVADTFGILLEFIYTGYLHASEKSTEQILATAQFLKVYDLVKAYTDFQNNHSSPKPTTLNTAGAPVVVIPNKKNDPPKRKRGRPKKVNTLQEEKSELAAEEEIQLRVNNSVQNRQNFVVKGDSGVLNEQIAAKEKEESEPTCEPSREEEMPVEKDENYDPKTEDGQASQSRYSKRRIWRSVKLKDYKLVGDQEDHGSAKRICGRRKRPGGPEARCKDCGKVFKYNHFLAIHQRSHTGERPFKCNECGKGFAQKHSLQVHTRMHTGERPYTCTVCSKALTTKHSLLEHMSLHSGQKSFTCDQCGKYFSQNRQLKSHYRVHTGHSLPECKDCHRKFMDVSQLKKHLRTHTGEKPFTCEICGKSFTAKSSLQTHIRIHRGEKPYSCGICGKSFSDSSAKRRHCILHTGKKPFSCPECNLQFARLDNLKAHLKIHSKEKHASDASSISGSSNTEEVRNILQLQPYQLSTSGEQEIQLLVTDSVHNINFMPGPSQGISIVTAESSQNMTADQAANLTLLTQQPEQLQNLILSAQQEQTEHIQSLNMIESQMGPSQTEPVHVITLSKETLEHLHAHQEQTEELHLATSTSDPAQHLQLTQEPGPPPPTHHVPQPTPLGQEQS

SEQ ID NO: 4409 - DNA, 250 bp, Homo sapiens
ttttttttttttttttgtttttaccatatattccaggggttatgtgtgtggaggggttgtttttacatttatacagtttacattgcttgacccataagtaacacttgtaagattaatagggccatagttttaaagagtacttacatagccccaccatgcatacagagccttttttaatattggaaaaaaaaatcaaaaaaagttgaattttccatcactaggcaatgtaaatttgaccatctacatttat

SEQ ID NO: 4410 - DNA, 2162 bp, Homo sapiens
ctgacacggatccagtcatacctggggctggatgggatttggaggccctggtcatttgcagagtgaatggtgaagggcgcggaaaaggtttgcttggaggaaagaccggttgcagaggcgaggcggagggaggaggggcggaggcagcaggtctttgtttgtggtaggtctctggcttccatcagggaggaggaaagaggctgtgcccttcctggctcttggctgcaccactgaggacgctccgagggacagcgtgctcacccatcctttgcacagtgctggccccaagccccacggccttccagctaggattttctgctgggctcatgcagaggcaggggacaggtgcatggaagagccgccccacccgacacaccattgtttgaaaatcactgttctctttactcacttaaaaaagtgtacagggaacacctgttcctggcataatgctccaacctcgcggaaggggccaggtgcccttcatctggctctggctgcttccgacctgggcccacgtcatcgttcacgtcctctgtgaccaccactggtcacggtgctccctggcccagcctccaacccacccagcaccctggcatctcccaggccagtctgctgcacccagcgagcttccagtcagaagccaggctgaacggccctcctgccccatcagcttcgtgtcttctttttttttaaagaactgaaatagtccccaagaggcctcatggcctgaagactcacaatcatccacctgtaatttatgataaatgtctgggagcatttaccatttgcgtccgtgagtatttatagccctgaatgggcgggggggagggggggtggaggaggccctgcagccaggagctacacacctgtccccactagtgtcccctggttgacagagccccctcagcctccccaaggctgtcactgcggctgtgacagctgaggagtgccgcctttgaaagccagtggacagtcgctccactagggggagaggccctggccctggcgcagaggaggcgttgcgaggcgggacgggggctggaggggctgagcagccttcagggcagggactgggccctgggtcactggagacgttgatattagtccatctgtctgctgccaaattgctccccaccacatgagccccaggggtttatgtcccaggaaggcgagggtgcccatctgagcggaattgggaggggacggcaccagctcatctccctcagggcctttgcctcctggtgctgccctggtggctgctcctgcaccacagcccctgatggctgctgctagtcctgagttgctgggtttacccccagcccacacttcccacctgggcctgagggtgcggccagtgccctagtcctagccactacaggagtcattctgagacctgctggaggccatggggtcttcccaggcccctcaatcagctgcttccagggtcagcagggcagggtgctgccagtaaggtcctcagggagcacagcccggccgcccaggctgggggatactggggcagagcttccaggtctgtggggcctgatctctccccaaggctctccaggccttggtgcgccctccacagtgaccttcagagaggctgcaccccctcagaagaacagtgagaaatctctccatcacacgctccctggtccttatgtccctgaggccacccttccccaccccccagtgcctggagaagcgtgagactctggaggggcgccaggaggccaggggtcctcagggctaggcctggagctcggcccaagagctgcttttgcgaagcctgtcttgaatccggattcaccagagaacaagagcctcccagcctttggcgtttctgggcctgtaaagatgtgtgtacctcccaggccactctgatgcaagggcagggaccatgccaggcctgggttgggaatggctctgtgactccagaagctccgtctaaaactccaaagatgcccaaaaggctgtgctgctatgtggaatgtgtattatttgtgagcacgatgcggcttcttcctcattttgcagagcaacctaagcgggcagatgtacaaaccgtgtgttcgaaacccctgagtccatgtgtgtgaaaatgcaggttttctcttagaaataaagtggtgacttgtgctgtaaaaaaaaaaaaaaaaaaa

SEQ ID NO: 4411 - DNA, 561 bp, Homo sapiens
  misc_feature (279)..(279): n is a, c, g, or t
  misc_feature (322)..(322): n is a, c, g, or t
  misc_feature (447)..(447): n is a, c, g, or t
  misc_feature (488)..(488): n is a, c, g, or t
  misc_feature (532)..(532): n is a, c, g, or t
  misc_feature (550)..(550): n is a, c, g, or t
cggcatgaggaaagaaaagatccctttgctatgagctcgctgtatattgataagtgtaagaattgtgttgcatgaataaccgctttgggctggatttgaagtattttgatgttgtgttttgcaaatattgaagttacaataatggcaacagaaaaggaacagatacacagctttacacttagcagaatgttacatttaaaatctgacaaggcgccaagatggtgactgtctcctctaaaccacgaaagagtaagatttgtgcaaccctcctcctcttcnacctccttcaggagaattaaatgaatcaagactttggaaagancggggaagagccgggacttgggcagtacttgaaacaggaggaatacaccagcctaaatgtacagactttgtagccgagcccactcgatcggtctgtgccttcacgtgaccaccatctgtggcctncctcgctccatccaaatttgtgtagggctgctcccttgganctatgcctaaaatataagctacaccagaggcctggaaactggtngtccaagtaacaaggccncactggttttt

SEQ ID NO: 4412 - DNA, 583 bp, Homo sapiens
  misc_feature (14)..(14): n is a, c, g, or t
cacgaggcgcaaangactttttttttttttttttttttttcactagacaaaaatctatttttaattgtataaaattatacatataaaatacatagaatgtactaagaagatgagtaaaatctttgacaccagaagtggacagatcaggaaacaatttttctcaagttatttgggatcttactggttggtatttgagaaaaataataaatccaggaggtacgagggcaattcttcccacaactcacaccccttaatccacacgtcccagagaaaggagaaacaggagtgttgatgagtgccagcttataaatgtcaaacagacacacctggtgtgtctagctgtttttgcctttactccaacccgacgtgtttcatggaatacaaacatggggcttctaccccagctctcttctgattagtaagaaaaaaaaaatgatagggcctggagaattcaaggaagcccgtttcaagcactaataaaattgtagctggattccttacctcttacccaacatgatttcaaaagcaagaaagttgcctttcatcttgcccctatcaaatccaaaagagccaattatagcct

SEQ ID NO: 4413 - DNA, 421 bp, Homo sapiens
  misc_feature (262)..(262): n is a, c, g, or t
  misc_feature (355)..(355): n is a, c, g, or t
  misc_feature (376)..(377): n is a, c, g, or t
ttttgagactgcatagggctcggcgtggagaggagaggaaaaggggtcctgcaatgtcccccagcagcctgtcattgtgtgtgaaactcctagcctgagagccccacctctggtcagcactagtgttgggagacttctgggagggattgtgactttcagctgggtaactggtgtctggctgaggccatcttgagcgcagtgaggaaggatctccagcctgagtgtgccgtgggccccccgaatacataggggagccctgcanagcagttttgaaatgagtagtacatctcacgaagaaagtctgcaagaggtcgaggtgcatgagaaagatctggccctgctgccctggcgcccncttgtgccctttctgctgtgnngggtctcattgcgtcagagtgcttagtaacatcagtggcgaggg

SEQ ID NO: 4414 - DNA, 485 bp, Homo sapiens
tttttttttttttttttttttttttttaaacaatgggaatgttactttatttcagaataagtttacaggtgaaaaatgattatttactaaagccacattattcatacagacaaaacttttatagcaaaaccttggtacatgagcattaataatttgaatactatatggatatagaagatatttaaaaaatggaaacaatgtattccaaaagctgtaagaggcacaatatatatgcttgtactgggcctgcaagcattatactataattcattaaatatgatccaagaagttgcagatttttcagcactatgtactgaaaagataaaaaggaatatcatagctactcttacgctgaagaagcatctactatcaagactacaaaataggagcagcaagccaaaccaacagataatgccttaggttttaggagaaataatacatgtatggctttttcatgttcattttcgagcttggttagcaagtct

SEQ ID NO: 4415 - DNA, 280 bp, Homo sapiens
ttttttttttttttttttttggacatgaaaccaagatttattaaaatactcttagcatatttacaattgaaagccatgaatgcaattctttgtaaattccaaaaaatataattctatcttttaaaacaaattaacagaggtatcaacagattaggataaatataatctatcacagagatagaattttttgaatagacaattgacgtttttctaatcaatatatattatgtacaaaaatacacttgatattgtgaccaagtactgtcaagggggaaaaaaa

SEQ ID NO: 4416 - DNA, 1998 bp, Homo sapiens
ggggtgggagggggagggggacctccgcacgagacccagcggcccgggttggagcgtccagccctgcaacggatcatggtgcagcaggcggagagcttggaagcggagagcaacctgccccgggaggcgctggacacggaggagggcgaattcatggcttgcagcccggtggccctggacgagagcgacccagactggtgcaagacggcgtcgggccacatcaagcggccgatgaacgcgttcatggtatggtccaagatcgaacgcaggaagatcatggagcagtctccggacatgcacaacgccgagatctccaagaggctgggcaagcgctggaaaatgctgaaggacagcgagaagatcccgttcatccgggaggcggagcggctgcggctcaagcacatggccgactaccccgactacaagtaccggccccggaaaaagcccaaaatggacccctcggccaagcccagcgccagccagagcccagagaagagcgcggccggcggcggcggcgggagcgcgggcggaggcgcgggcggtgccaagacctccaagggctccagcaagaaatgcggcaagctcaaggcccccgcggccgcgggcgccaaggcgggcgcgggcaaggcggcccagtccggggactacgggggcgcgggcgacgactacgtgctgggcagcctgcgcgtgagcggctcgggcggcggcggcgcgggcaagacggtcaagtgcgtgtttctggatgaggacgacgacgacgacgacgacgacgacgagctgcagctgcagatcaaacaggagccggacgaggaggacgaggaaccaccgcaccagcagctcctgcagccgccggggcagcagccgtcgcagctgctgagacgctacaacgtcgccaaagtgcccgccagccctacgctgagcagctcggcggagtcccccgagggagcgagcctctacgacgaggtgcgggccggcgcgacctcgggcgccgggggcggcagccgcctctactacagcttcaagaacatcaccaagcagcacccgccgccgctcgcgcagcccgcgctgtcgcccgcgtcctcgcgctcggtgtccacctcctcgtccagcagcagcggcagcagcagcggcagcagcggcgaggacgccgacgacctgatgttcgacctgagcttgaatttctctcaaagcgcgcacagcgccagcgagcagcagctggggggcggcgcggcggccgggaacctgtccctgtcgctggtggataaggatttggattcgttcagcgagggcagcctgggctcccacttcgagttccccgactactgcacgccggagctgagcgagatgatcgcgggggactggctggaggcgaacttctccgacctggtgttcacatattgaaaggcgcccgctgctcgctctttctctcggagggtgcagagctgggttccttgggaggaagttgtagtggtgatgatgatgatgatgataatgatgatgatgatggtggtgttgatggtggcggtggtagggtggaggggagagaagaagatgctgatgatattgataagatgtcgtgacgcaaagaaattggaaaacatgatgaaaattttggtggagttaaagtgaaatgagtagtttttaaacatttttcctgtcctttttttgtcccccctcccttcctttatcgtgtctcaaggtagttgcatacctagtctggagttgtgattattttcccaaaaaatgtgtttttgtaattactatttctttttcctgaaattcgtgattgcaacaaaggcagagggggcggcgcggcggaggggaggtaggacccgctccggaaggcgctgtttgaagcttgtcggtctttgaagtctggaagacgtctgcagaggacccttttggcagcacaactgttactctagggagttggtggagatatttttttttcttaagagaacttaaagaactggtgatttttttttaacaaaaaaaggg

SEQ ID NO: 4417 - protein, 441 aa, Homo sapiens
MVQQAESLEAESNLPREALDTEEGEFMACSPVALDESDPDWCKTASGHIKRPMNAFMVWSKIERRKIMEQSPDMHNAEISKRLGKRWKMLKDSEKIPFIREAERLRLKHMADYPDYKYRPRKKPKMDPSAKPSASQSPEKSAAGGGGGSAGGGAGGAKTSKGSSKKCGKLKAPAAAGAKAGAGKAAQSGDYGGAGDDYVLGSLRVSGSGGGGAGKTVKCVFLDEDDDDDDDDDELQLQIKQEPDEEDEEPPHQQLLQPPGQQPSQLLRRYNVAKVPASPTLSSSAESPEGASLYDEVRAGATSGAGGGSRLYYSFKNITKQHPPPLAQPALSPASSRSVSTSSSSSSGSSSGSSGEDADDLMFDLSLNFSQSAHSASEQQLGGGAAAGNLSLSLVDKDLDSFSEGSLGSHFEFPDYCTPELSEMIAGDWLEANFSDLVFTY

SEQ ID NO: 4418 - DNA, 620 bp, Homo sapiens
ttaattagacatagggtatatataaactcaattttatctgcatttttttaaaaattgaaataatctgattgcatgtatgaaggactcctgcctcattacccaattacataaatacaattatctataggaaggtgaaattgttgatctattatttcaaagacttgtagactagcaaagattcattctgattagaaataaggtctatagctaaagatatttttattttaaaaaattacagcccttgtaacaaaaatcatttgtaacattggatatgaagacattattagtatttaaaattattgtagtcatttgatcataaatgaagtagcttgcaaaatagacttggtctttgaccctttaaggtgtaactgactgactgttgtgtttttcaagactgattttaggcagttttatgtatcgtgtaccaatgatatgtaaaataaagcaccttttctactataaacaaaaaataaaaaaaaaaactcgagggggggcccggtacccaatttgccctatagggagtcgttttacaaatcactggccggcgttttacaacgtcgtgaatgggaaaaccctgtcggttcccaacttatttgcctggcaaaacatccccttttgcg

SEQ ID NO: 4419 - DNA, 348 bp, Homo sapiens
gcggccgcgcgaattcgctcaggtgacctcaaagcagaagctctgaattcacctctcatctgacgactgacagctgctgccaccgccagcctctgtcccttgcccaggcctgtcacacggctgcctctcagcaggggcagtagaatgaaagagggcatgtctaataacagcaccactagcatctcccaagccaggaaagctgtggagcagctaaagatggaagcctgtatggacagggtcaaggtctcccaggcagccgcggacctcctggcctactgtgaagctcacgtgcgggaagatcctctcatcattccagtgcctgcatcagaaaacccctttcgcgagaaa

SEQ ID NO: 4420 - DNA, 352 bp, Homo sapiens
ggtgttgggagtatagattatgtttattttctctataatttccagggttttccaaaattttacaacaaacatctataattttatgaacactccccatcttatttttaaaaagaaaaaagttggggggcagagaaatgcccagctcagtactgagatccatcaagtgaggccagccggtatctgtcacaccaggcagaggccccgtgctggaagccctggaggttaccagctccaagcctggtatccaaggcctcctgggcagccttagcctcctccttccctttcctcccaccagaccctgctcctgggatgtccttctcccattaccaccacaaaatcggactaatttttc

SEQ ID NO: 4421 - DNA, 441 bp, Homo sapiens
tttaactatagaaaataattctttatagggtagttttgtaacaggattttaccgtagcaaatgtggaataaagaaaaggtttaggtttaggaacacccattagggttttttcgttacttcaacataaagtaccctttaatacacgaagtacatcctttaaacagccaagagaaaggaggttgtacaatagagacgtcatgtttgctttctaaacatttgtttgactcctgacacaatggttttgctttggggtaacatgaaggttgccaaacttcaaagtaaaaaaaaagatattttctgacaaagcaaatgttcagttcagagttgcctgatgctgtcagcattccaagcaaactcaataggaagaggtgaagtcttcttcactgtataaccatcggcgtggctgcggtctactgcttcacattccattctccagggaaa

SEQ ID NO: 4422 - DNA, 131673 bp, Homo sapiens
gatcatttttattagctgggtacaccctcttcctcccccccagatttctaatcttaatggaactgagagttaagaatgattttttaatgtctcgttggatttttagactgttaatgtaccgaatccttctcattattactttattgattgctcattgaccagcccccttcaaatcgtattaaccaccctctgccggtttagattaggagagtttaaaaagcacctttcattactccccccgcccactcccgccatggagttgagactaggcagcttaatgggagctctaatggggcagctaagaggagaggggccacggtccctgcagattgcattaatagctcaaagggggccaatacagaaaattagccgtaaacgagctctggagatcttcaaatgaaagagccatttatcacgctggctaccttcactccactcgtttgctctctctactgggaacaactcatttcctcttaactaaattacttcagaaatgtcagctaagcccagatagcaaacataacaagagagggagcccataatctatggggtgacataaacacaggtgaaaaattagattggttaaattttagaaggggccttaccataactggagaaagagacatagagatagagacatgcatcatttatgcctaagtcttctagcttcataaacacagactcagagacccccaaacctagaccacttgccaatctgttactaatgaggtagaatttttttttatctgcctaaaagcccattagaaaatatattaagaaactaagccttcttctaggtgttgaaatttagaatatttagttcacaagactttctcacctcttttacaaaattcatctcttggaaacatctctcataattggggagatggtgagcaaagagactagggtgcaggggaaggggctaatgaactcaccacaactttaagtggcttatactgagttagaaaagtaaatcaacctcgtattcttattttgcctatggctctctaaagaaaaaagacataggatcttttcttcatgtaataaagcaaatatgtcaaatattaaataatgcaactgacctaccatttcatcatattcataccacaccctctgaatcaattaaagtaactgggatgctacttaaatattttaagctgcacattttttaaaaagctgtacatttggggggacataaaatgtactcttctgtttccaaaaacagaaccatcaactttagtcattattctctttttcttattcctggagacaaccttgcacataaatattcacatttcactgacaaacatatacaagctctgaaaccaaagcatcccacatctaagaaaatcttcagctctgttttgctaggcaagctaagttacaaatatttttattggactggctattaataacatttctgattggtcatctgttgggcatgttcccctgccagcccaaatgatgttgctaggatacagaaccctgagctaagtggttctagctttccatgaaaagggaggaggaactaaaacaaactgaaaaaagccaatggagaagctcctccccgaccccaccctaatcaaccagcaattaaccgaaagaggagacccaagagaaaacaggaaaagtgagctgtcagtcagcacagttgcaaatttaagcaccgagcctgggtatcctagcaaacccaaaagctggcattaaaagccaaaacaatattatttgaagatgagagagagagagagagagatgtttgaagcaaccactaaaataaatagttatgccccaaaccttactatactttaggatattcattccaaggccaaatggcatcattgcaagtacagcttcccccacccacctttcaaagctactcttcctgactttgtaaaagaagacaatttagaatacctcaccctgtttggaatccttattccacaaccctcctactatcccatttgagtctggatgaattacttcccaaagaattttttcttttaattgtttttgttgaatgtcaagtggctcaagtgaatcataaatgattgaaagctgaggattgttgacactaaatatagagacagaatttcttcgacatccatgagaaagggttacagtattaaaattgtatcgtcaaatgccagttcctgtgataattaaagattgcactgtttacacatttaaactcctaaatttgtggcatttgagtgacattcaggccttttagcagctacactaatcgccaggcattctctcagtgactgtcagagaaaagcagaaaaaattaagcagctgcaatacacccaaaatgagttattgtaattacatttaattagtttaattagttaattattttgcttacagctgtacaagagactgcaaacatttgttaatatcacatgccctttaacagtatggggtgattccacagtcacactaaatcatgaatgcatatgtaggaagatttagaaatgtgcataggctgtctcagcttctcaggatgcgcatatttagcaacaaatttggcacaatgaaaaaataaataaataaaaacaactcataaaacatagagaactgggaacaaaattatcaccaaaaaaatcaaatacaaaacgaagaaagagctatctcaataacataagctttaactcagcaaactccagttatcattgaaataattgtagcaccttcttgaaaccagtgtttaccagccaattccacacatgatgatagctcaattatttaagatgtatcaagaatggctaccaaatatgccatgagaaaaattgcaacagtctgtctcactcatctgaatttgtgtctgatgttttcattctcccttgcccaacttccatcttcccaacatgccctttcccctaatctgacagccattgtcctataattgtgaacaaacatttatgtcttgtcaaataatgaattcccccaaagtgaaaattcatcataaagacgttaatgcatgagagaactttgcttactttttggggggaattatccataccttttttaatgacagactggtccaatagattcatgccgctgttattggcatcttcaactgactgtgaatataaaaacatcactattcaaattgacaggatattaaagaattgcacacataaatcatgttattccaaactggagtttctgttatttccatttatattaattcacaaagggctgttttattattattattacctccaaatagacatagaaatgaaatttactcaaattataaatttttccaatggaagaagtggagaaagaaaactttgagagacatctgggatgcaacattggtttagttattatataaaacatagatattagacagataaacctttatattatttgctcttatgaattgtaaaaatttggcaacagctgacagattttcaccaatattagtaagagcaatttgtgttttccattctatcccagtgcatcttaaccccagagccattttacaaatacataatagtttacattatgggattttaattaaagtctgagcaatttggaatggaatgcaaacagcaacacataggaacatgtttgcaagcctctaggactgcacacccattacagcccatacacgttcctgtaaactatgagcttcttgctgcacaatgacagtctcttggaggaaccttcacaatttaccctccctcccagtcctgctgatgctgcttcccagcaaggagcacacctgttaggaaggcagtaactacagacaagcagacacacacaaaggtctagatcctcccagtcagcacctaggtaatcgcaaggaatgttcatcttctgtgccacagtttcattccagagaaggaaagtttcaactctgagcactggtagcacttctgagaggaaatagctgttggagcaagtttcttactgtcagaatacacatgaacagttctggctgtgcatcccagggcgtccaaaagcagtagattccctttctctccctaccaagaaaataaatgctaggtctttctaaaatctacaactactttcttgacccttcaaaacctaagttgggaccaaattgttacccactttatagagaagtaaaaagcaaagggcttgagagtgaggagctgttttcacagcactcacaccgactcatgctgcatcctcacagtgtgagttcatcacaagaaaaagactgtctaccccaaacaagcaaaactttagaaatgagatgatctaatcgtacagggggcatgttaatttgtttcttttcatttttaatagtcactcttttgttctcagaaaagtgagcaaaattgttattctccataggaattgttatccttgctgcaacatgccatgcacatcttaggaaatagtaaaaaggtgttttaaaaatatttcatgtaacttgttcataactcctcaggggaccctgccacacacaaacacacacgattcacacctttctatgatcatgtgtatacagtgacaatgtgtccaggcaggacagaaatattctcctgtgccttgggcagccagaccctgacttacactggcctggacccgggagccctcacaccttaccctcactcttgtacgtaaatatgtataaacgcctcatcagcgacgtggggtagttgtggtagttaatgagaaggctcttgtctgattttctatctaattacggccgcctgctgggtttttgtacaggatattcacgcagcatgctggcgcttaatcgtcacagggaggatcgtaaagatttaattaggactgcatgcggaagcgcagaaaaacaactcagactcgtaattactagacttctttagttaaaagtgataccaggggttgctttaagacactcgggtgtgtttgagtgtgtgtatgtgtttggggggagttggcttaacatccttatatgtttatattcatgggtggtagaggtgatgggaggtaagagagcaaaggtgggaagaagaaaagaggtgtacatgacaactaaacaaatcccaaactaggtgtcctttcactccctctgtctctctctctgtaggtgttttcctgagtttttaacacttgtagccccctccccaactagacacacacacacacgcgcgcgcgcgcgcgcgcgctcatgcacaatgggtgaaatgtagcatacccagaacccaaacagcgatttgctagtttaatagcccctgtgagtaaattgaaatagaaattgacagggttttatagtttcatttaaaaaaatattagaagcatttggtgaattagctctcctctttctcttctctcatggtgggggctgtggccctgagtgtggtgcatctgggtcacacaacaaaaccctcgacccataggcagggcagcaccctcagtgtctgccagctccctggctcaaggggatctggaacacacacgaggtccttgagatcggaacaagtgactttaaggtccaggcctaggcactctctggtccttttaaagactggaccagtgcaggcccttttaaagactggaccagtgcaggccacccattcgatagctgtagggagagcgttgaaatcccaacctgcttgtgtaactttagcccccgcaccccagcttcctaactcggaagtggatccttctgtgttgagcagatgattggaagccttcggattcgaggctgtggtcctggaaacataacccctggtctttgtcacctgccctgcatcagtcaacttcaccctggccttgggaggtctgtcatcaccgcggaggcagagaccgtccctgtctttgctgtttccctctagggacaggagcagggtgtgtcccttgcactataggggtcgtcccaagaaggtcccgtgggcctcccggcaggtgacgaaatgagataaagcaggggaggaacagggtgggggttgggtgagtggagagcctgcaagtggctccggtgtgctgcctgctgcttttctcctttcagctctctacctctgtggtctgtattcccgacagcaacaacttggccccgaggtgctccgttcacataaacactaaatcctttccgacgctttgacaagactattctcccaaatgtgcactgatctggccctgtttttctctcagactttgaatttcaccaaacacaaaaagacctctctcaattatttctttaaaaacatttaactaaagaaaactgctccttcttttgggggaaaaatttctgagttccttcgctagagtcacttggcctgtagggtggtggtaacagggccggcattagcatcatcaacagtaatggtgatgagttgatccactttcattatccagcactttgaaccatactcagaaaggttaatttaaaaacttttcccctcgagacacatattaccccaatgcattaaaaaaaaaactattaaatacttcctttttcatatgatattcagaaatgagcaatatctctagccaggaacagtcaagctcagttaaatcaacaaaaccatcatcactcttattactatcagtaaatccaggcacaaatcaggtaattccgtcttttttaaaaaaataaataactgaatttcttttaaaacaataaacaatcatagaccacacacagacagcatttgatgctgtcaccacattttaactgtttaaaactattttttttcagcaaggtacagaagaatgactcttgcaccctcttctctttcccattttattttcctttgcttcagaggtatgtcaaaggatgcataataaatacaactatgccaatgaaactgaagtgtcaattacatacctgtaaactatatttatcttttctgccaactatttaacttagggtgaaaaagcagacctgctcagaatcacccaaacagtttttaggaatcatttctttgatgtttctttgtttagtttaaccaagtattctcaaccaaatcaggctccattgtgtagactgcagatgggatagtgggtgggtagggggagtgttttgagccttttgttttaagaaataaacacgtgatgcctctcaactgggatgatggcagtggggagagaagagtgttaatataggcggaggccaggagagggaggtggagaatattacactacagtcacttaatgaaccaaaaagtgaaaagaatttccaaaatggtatctaccatcatggactcctgaattatggcgttctgagtttctccttcacatatattctatttctcagatgaggactgcaactatctcttggaaaaaagctctgtggcttatgagacattcaaagcaagacctggcttagatgatcagagctcattgtcatgcttagcaaaatctttgcaaattcagcagcaacctctggagcatacagaggcccctggaacttcattctgaagctctagcctctaggcagccaggtcttcacctgccaagtcagcaggacagccccactatggggtgtgtgtgttggtaaagaaggggtaccaagctggcttccacaaagcactagagaatatgcaggagatggtagctgaggcaggacaaaagcattcgcctttattctaataatcttaaggtatcaaagcaaatacatatttttcttcttcaagatttaatttctcgtggtttggatgatcataattagacctctggaaatcgccactatagagccatacatacagacacacataaacagttctatatgactgtctagtcctgttctaaacatgggaacaaactccccaaaaagagacagagctgccctctcctgacctccccccctccagaagcattccttattcgtggtcttttttgtttgtttgtttgtttgtttgtggttacctggacgtcttccattccgggatggccgaggccgtgcagcgagaggctgtcacccatgcccgcgtccaggccgtggtgcgccgaatgcagcagcacgtccggccggcggaccgagtggtagtccctccgggggtcaaggcccgagagctggggcaaggcggcccgaggctggggcaggagagagccggcttccgaacccacttcttgccgctgccgttgcccccagggatgttgctggggctggtgcagtgggttcagggagtaggggtcgttgacgtgggagtaggggtcctggctctggtggtaggggagcggctggtaggggggtgggaagtagggcggctggaagtccgacgacggggtgtgggacagcggcggggcgctcgagtagggtccttgggacaccgagcccagctgggagagccgcgagctgtggctcgggacaccatcgtgccggtcctgggagcggagagaggaaggggaagagagccagagaaggagacagagaaagagagatagaggcagagagagacagagagtacagagaggaagaaaaaaaatacaagtgacaaatggagaagcccggcttttgtacgctcttcccgggacaagggaagcaaggatctgaaacttagacccccaagttgactcagagggccacatgatttcagcaatttcaaaccccaggcttggggagaaaatgggaaaggaatcacccacttaactataacattttagccgctttttggggagtgcaaagcaggcaaaaggcaggggtacaggaacagtgtgtatggagggagattctaaatgccttaattaaaattgtaggagtcttacatatggtgtttgctcctctgggtgtttttaactacttttttctaactcttccagaggtacaaatcacaacaaataaaacttcatagtatttgctgtgctgctccccctgattaaaaaccaacttctgccttcgctggaaatgcagctggctgattaggaggagctttccacacaacctgatcattccaagagctccaaggaatccacctggtctgagttcccagtcactcctccctctccaggagaaattaaataacttaaatagtgtttcattgaaatggatctcattcgaaatcatatcctaagccaatgatgaattaagttgagttgtggttcataggagttatttctaagactgtttttctatatctaatgctgttatactcaggatgtgaaaatgaaggaactaaagttggggtggggggaaataaaagcccagacaacttattcctggtcctatctggagtgtgaactaagtgaaagaagaagggggaggtgtgtatatgagggaggtggactttgtttctccctctcttctctggaaacatcatggtaaactccccatggttctttttgcagaaatagtcacctaaatttccaaacagcaatggcaaataaaaagtttttcttttcggcctctcccctcccagctgactcatggagctcagacggagaacacacaatgcagagagaagcagctgcagcctcgtccaattatggtgctaaattaccaagccaaaggcgctcaaaggaagacagagagagacagagagtgtgagacacacacacacacagagacgcagagacagagagacagtgagaggagggagcatgcaattctggtaacacgtgaatccaaactcaccatggatgaataggtgtggactaacatctggaaaaaaaagcctggttactgctcaaaatcaaacaatgattaaaaaaaaaatcaaggagtccagcagagaagcgagctggacacaggagctgagcttgatgtgtttccaggacaagccatcaaaaaaaaaaaaaaaaaattacacccgccccccaccccaacaagattggcgatgcctgtcacacacagacagaactattcatctgtctctttgctgtctttttggcctcttttcttctgccgttcttcggggctccagatgcagtcctctttcacccgaagctgggctcagactgctcggccgccccttcctccctccgcttgcctacaccgcctcataataattgatattcatgactattaatattacacgagtactttaaagggagaatagaggacaaatggagcgtgaagcagcagcgagcgcagagctcccctactattgtaaatgacgttcattcagtggagaattactagatgtaatcagacgagggggctggcaaaggcagactggggaaaaagtttagcaggaaagaggcagaacttcaattaactgtgccggggacacgagtaaagcagcccctgctcctttggataaggcagtgagggagaacagtgctgggaggttgtatagaatggaggtgtcctcctacctggagagagacttccctaatccggaggacttggtcgccttgggtgctttgtgtgaggattacaaaaacaaaataaaaagggttgcttcatcatttggaggcgagagaaaggcaaattggtgggcctggttatttacagtgacttttgcagacttttgctaaatgtggaagattatgctcatttgttaaaggacagaagcgagatggaggcttttcattcctgtgcagccttttcctgtttagtgctcacatagtttgcgatttttacctcaatttaaaacatacgccatcaatcttcaaatacactaaacttatcctttccaggcaaagccaggggcaacagaaaacctttttggatgtttcaggaacccgttcaactggcctgactgccatttctgttaaagttcaaccttagtccagacttaaataggctccttccaccgagctgcggattctgttttttgagcagaaaatttaggcagataggaccacctgtaatattccctctctctccctgtttatttctctttctctctctccctcccctcttttctcttctctcttccctcccttccactccacccctccctcttcctctctccctccctcctttcttctctccctccttccttttccatttagctactttactttctgtaaagaacgaatgttaccctggttactttttagaacccactgaaatgcctctgcatgcatatagcttgagctgttttcaccatggccccgtgcttgctaatgtcatgcccactttgggcgctaatattctttaggacagttctagcgccttggactttaccattatcccgcctgttaaggaaagaaaaggaggccgaaccgaaacaatccccaccaggcgcgtaggcgcggctcttcgttacagtcgatacacaaccacaaagagaaaaggaaaaccccaagcatcattcagcaacaagaccaatctctctcctctctgctctctcgcgctctctcctgcttttctccctctcctctcttatctcctcctcctctctcctacatacctccacacatacacacaccccaacattaggattcgggggggggcaggaggtgtgggcgccaggcgctgcctgtgggcgctcgtccgagcccgagtcccccaggagcttgccggccgcgcctgtgagtcgcccactcttaggatcttcgaggcggctctgcgccgggctttcaggagctgtcccgatccggaggggtcgcgtgtctttctcggctctttggggagcctctgcatccctccacctttcgtctgacctagcggcccgcgcccgccacccgggagtctgcttctcttccttccttttctctccaacttttcctcttagcaatctccatggcccgcttcgcccgcctcgacttccctccttttctaaatccgcttcgcctttccgaagtttttatttccaacctcgacgtctcagcagaaccttcccttcctcccttcccctggcaaccacctggggctgtcccagaccattccgcttaaaagcgaggctccgcgggcttcccggtccccagcctggcccgccgcgcgccccgcgcctcgcccgcctcggccgcctctcccacctcgcccgcctctcccacctcgcccgcctcggccgcctcgtccgcctagtccgcctcgcccgcgagtagcggagccgtctggccgcgtcagccctcgcccgagccggaaaagggctttggcgagcgcggtccgggccccggaggcggctggcgtcctcctggctgggcgcaacttctcctgccccgaagagttgagctagcctcagtgctagagacccgtacgcattgaacgtgggcagaaatttccgtgaaagatgcccacacaggaggcggctgcgatttctgttcggacgcagtgaccctcaaggaagcaaaacacaagaaaacagaaactaataaactgctacgacttctattttgctctatccatccatatctccagccatctacttctttcccgctaattctctgtcctctacttggaaccatttgttatcaatttcagaaattttattgaaaataaaaattaaaagcccgagtctgttacaaatgaggcttgaaaacccaattctcttccacacttaaaacgagaaaagcccctgactttatcagaatctcgattttctctgagagcgtgcccacattcagtagcaccacattccccatcagagcttaaaagggtggggtggggtggggggaggcgaggaaaagggaaagaaaaataaaataaataaaaacattcctaaattaaagttgtcagatttcagccttaaagtcccttttcagagcagcgaagtcttccctagccagcttttctaaaagttaaaaaaagctgagaaaaccgaccggaaatctacgagtaaatagcttaaaaatatatatcatttggggtatcaagaagctcaaattctctatctgcaaagctctaaggtgcatctgggggtgtcgactcacctcatagatatcttcgtacttgacattctccacaagcttccagagcatgatggcagcctggtctctaggaggtgagtgcattcatgtgaggagcagatgtctggcttctcaggactccgctgtctgtaatgatccatctataattggaaatgggggatacacaccaaatccgacgctcctctcccatcgcaacttatatctgttgtctcaaacaataggctggacaagtaagcctcagcaaagagaaaaaacattattgcacacacaggagttagatgcaacccacagacatatatactataaaaatcataaacccgtatttacacccagacacccacatatagttatataagcacctctgggtcacacagtctgcagactccaaatgtgcatttaacaaagagttgttcagggtgattaatataatatatacattttataacttctatatcgaaaatgacacatcattgtagccactaactgaagtctttgcaattcataatgagaaaccaggggccatcagtcccctattttctatgtagattttaaagggggacacttaccaagatttttaaacacaaaagctccctcctattcatgtatgttccggaagagagtattttgaaaggctggatatgggggattttaaggactatctctgtgttgatggctacacaacttttttttttttaactttatctctgtcaccatagaacaaaaaagctagccaccgttgatgaccatttctaatattttctggtcattttacctaaaacctttggaaacttaaatacacctcagtttgtgctgcttgttattttaggtgttgtttgtatgcattttcaacggattccatgcaccattcctcttggctggagtctccattttatcaagtttttttcagatgttggaagcaacgtacgcacacgttcagacaaggttaattttgagccttttttgcagaggccaaggacattttatatttgcatctgttgtgtatgacttgtaagtggttttaatcatggagagtcaagaaagggccacccgaatctttgaaaaggtttaagcagaatgtcttcaaagagatagtgaaaaatattttagtgcatgtggagtttcttcttttttttgtataatttttcttaataagatgattcatatagtttttaaaaaggaaaacatcatcagcaacaagaacaatattaaccagacttagaaaatgggcaccatttaaggcgcagggattctgaattttatcatgaaatgaatactcatctgttcccctgttccccctttcccatcccctctgtttttctactccctttcagggtgcggagagcttctcatagccggaacagacgcccagaagaggatctctgcgcctgggacagaaaagaaatgccaggagggaccgaggagggatggggcaatttggggtggaagttattaagcctggtgagagtgaatctgcaaagggtgattgtctttaaatccaggactgctgtgtgcagctctgcgcgaacagggatggacgctgtttgagtacagggctccggacaaccttgttggacgtcgattcaatcaaaaccaaggagaagcttcatgaactgcagaataaacaattctgcagatttttaatttaatttttaaagataagtcaaaggaaaagaacacaaagaaggtgcttcagaaggaacttcagaaataaaccccttatttccggttgaattttttatgtttcgtctttccttttctcctcttcctcctttttgttttccttttttctttccttcatttcccttttcgttccttcctttctctctccattcctttcttcccctttaaatgttaaccttaaatcatacacaatctatacagatttttcactaggagcatcagcaaagattttcttctttgcttccagagctagttaggagatgagaagggatttttcttaatcttattgtgtggtgggacttgaaacgggttccacaccccctgacttctagaactaaaatcagtgccagatcaataatctgaaagataaatattatagacttggaagttcagattctccaggcacaagacatttaattaatggaaataattgttttctccctttcaaatcaataattctgtcattgttattacctaaagatcattacaacccaaataaaatgcatttggaaaaatctcactttttttctctaaatgcttttaacaccttttaatatctttttggtatattattgcctagtctaaaataaataaactctgagatttaacaaaacaaaacctgcaagagataattttacacataaattaaaataatataaggtattgtgttagtataactattttatagccttatatatgaataatttcaaactttttatgtgtaattttattttatgctagtattaggtattttttaaagtggaaatatcttgagatatttggttaaaatttaagttctttaggaaacctgaaaaataacaaatctggttttattaagaatgaagcataaacctaaaaatatacacatatatatagagaaataccttcaaaatacataaccataattaaaatcctagttattttttttaacgtgggcgttattcgaaaagtcctagacattgcaaggtaaaccgttcccacggaccgttccctgtcattgaacgggcaacagcgccctctgtcggaattttatagacgcaaaccctgcaagtctccttgatttctttttcggcaaaggtttctttccgttcttgaaaacctggtattgagaggaacatttttaaagttcacttcttatgatatttactaattttagaaacgatcgttccagcatctaaaaagttcaaacgcccgaagaaacgcacaataaaagctcagccgctacggagaaaatttttcctaacttgaacctacctctcttgcttttactttctattacctttcgcgttatcactcaatcacatgacgtagggaaactattcccgcaagaactcagtaaatggaaacacaaaggcaaaacaaactctggatttgaaggaaattaaacgagtaaaatatgcattttcctcgttattttatcttgccttatgtccatatttctttttcaggttacgcacatgctctcctaggtggaaccgcacttgagacatcccagatagttaacactcgtactttcctctttcatttgcatttatttcagtttaaaacagcaaagaaaagaattattcataccctctttttttttcagcctcatatagagggaatattattcagtaaatgtcggagtctataattaaaagcaaatgcacccagcatgaagccctctgctggtgattttcgaagtatgttcaggactgttttttaaaaaatgtacagaaaaatatcattattaaatcaaggtcaactaggagcactttcatgtcttctttcatctttcttctaaaaatctaattatgaattatctaaatttatttgacttccttccttccactagccctcacctttgcacctgtgggttaacactccatgaactatcttcctttgcagatgcccactgtaccaccttttctttttccattacacagtctccctgggtttcccctttccatctacccaacgcacaaaaataataaaattagaaaagtcaagaattagaattattgtgccaagtttgcaccctggcctttctcattctaggcggtggggcaggctatttaatagcctgaggttcagtgcactgaactacaaaatggaaatgattgtgaaaatttattaaaatagtatctgtgggtaaatatatgtggtactattgcttcataaacaatttaacttatcatcattgtctcaaaacacttagcggggggtcaggaaagtggaggcttctaaaaaccagggatttgcaataaactcctggttagaaagtggaggtgggaaacccaatataggtcttcagactgtgtactcaacgctttgcccacagtctcatgatgctgtcttacttctttccttctgaagttaagaagacagtatttttggatcattgagtatgtccagggttattttttatagtcctggatttataagtaggcaaaggaaagaagagaggaaggaaaaactgtcttacttcagcatcctcagatattgccccacctcttacccatcagaagcattattgtctgctgagttgaataataagacacgacatccatataacagatcttgataagttaaaaaatgataaaacatgacagctccattttttactgttgcagtctggctcctaattttcctaccatgtttctgtcttaagctttctcatgattatatttttggggaagattcagtaggtgtttttatcatcaatttggaaacaaaatactgttgaatgtctgaaactacaatttaagcacctgccttcagatttctagggctttgataccatataggtttcagtgacttggtatgaggaaacaaaataggagggactaatgtttgcacaggagtgtttttaaaaaatgaaatgtgggtggggttatctttagactgactcttcataattatcgagattgaggcaagcactaaacaggaaagagcatttcttactttaatcataatatttagttgatggtacatttgtaaatttgtaaaagatactgagttgaaatcacttgtgagaataaaaataactgtaactgtgaaaactcaccctttccctgggacttttgaggagcaatagtaatttcattatagattttagatgtcctgatccccttaagcttttctgtttaactacgggggtatgaagtggctaaggggacagttttgaaattcctatctcttggaggtaaagaggttaaggaaaggaagatgaggggctgaagcaaatgatgcaaacagccatgcaacaattgttttcaacaccaatgggcatttcacattcaaaatgtgagaggtgtgtgtctcctctgccatgactaatgcaggaggacaggtactttcatcattgtggatgttttccatattattgctttaagaaggagaaatcttgaagggtgagaatactaaacaatttggtttcaaaatgcaaccagtagaccagtacacatctgtgaggaaaaaaatttgcaaataaagactttgaaagatgtagagcagaaatataacctttaaagcatgaataaacacatacaatgtatagcatcagagctgaagtgtctcataaatacaagggacatttgggagaaattagcattatattggaactacttcctaaaattcacgatttgacattctgataaaaatagggaaggatcttcattttatgcctcttttttatttctttgacataagatgagtttttcacttaccagttatattccctttggcaagtcctctgacctttccagatctcagttttctcgttgataaaatgaggagaattcggccagaagctcatgcctgcaatcctagcacttcgggaggctgaggtgggtgtttcacctgaggtcaggagtttgagaatagcctggctaacatggtgaaaccccgtctctactaaaagtacaaaattacatgggcatggtagcgcacgcctgtaatcccagctacttgggaagctgaggcaggagaatcgcttgaatctaggaggtggtggttgcagtgagccaagatcacgccattgcactccagcctgggggataagaacaaaattccgtctcaaaaaaaaaaaaaaaaggagaatttactaggtgatatgcaagcttcttccataggaatggactttatgaaactgataaaagcatcaagtagtaattaattaatttttttattttaaatattactcttttgagacagggtctcaccctgttgtccaggctggagtgcagtagcgtgatcacatgaacactgcagcgtcaccctcctgggctcaataaatcctcccacctcagcctccccagtagctgggactacaggtgcatgccaccacacctagctaatttctatttttatttttgtagaaacggggtcttgctatgttgaccaggtttgtcttgaactcctgacctcaagcaatccttcctcagtctcccaaagcactgagattacagatgtgagccactgggaccagccaaaaaaatttaaatgaaagtgttctttctgagcatgttgcagcaagcctcatctttctggagccctctgtgagagagtttaaaataattggttccaatcttttagtaaatgataatcacaaaaattttttaggaatacgatcttagaagaaagcaaacaaagaaaggataagaaaaccgtgtcttaatttgtaggagctgctataaaaaaaatacttcccagctgtggcaggaagcaacatgaccattcattcctattaattatgctgccattaggacagaatgtaggatgctgttaaattcctaatcttatgtgttgtatttctgaccattttctctctttctcttcttcttttttgtttgtttgcaataaaaataagtttttatgtatggccaaaaagaataccttagaatgggtagtttataaacagcaccattttattgctcacagttctagaggttgggaagaccaagattagttaaccagtagattcagtgtttggtgagggcctgttccaatagatggttacctcacatggtggaaaggcaaaaggggcaaacaagctctcacgcttttttttttttttttttgatggagtcttgctctgtcacccaggctggagtgcggtcgcgcgatctcagctcactgcaaccttcacctcctgggttcaagcgattctcctcctcagccaccttgactagcaggactgaaggtgcctgccactatgcccagctaatttcttatatatatatatatatattttttttttttttttagcagagacagggtttcaccatgttcaccaggctggtctcgaactctcaaccttaggtgatccacctgcctcgctctctcaaactgctgggattacaggcatgagccaccgtacctagccctcaggcttcttttataagggcgctaatcccattcaccaggactctgccctcctgacctggtcacctcccaaaggcctcgtttcttaatgccaacacattaagagttggatttcaacatatgaattctggagggacacatacattcagaccatagatatagcttgagggaagagaatattattttaataactagtacttaataggcactttgaaaaattcaaggatgtatgtctacaagaataacatctaatgtactaaaagaatttgcagttataatcttgacaattatggttagtaatctttgataaagtatgcagagtgaaaccaatgtccaatagcaaaggctggaaaacacttcattcttcagaaagagcgatactaaggccaggctcagtggcttatgcctataattccagcactgtgggaggctgaggcaggcgaggtctggagttggaggtccggagttggagactagcttgaccaacatggtgaaaccctgtttctgctaaaaatacaaaaatacaaaaattagccaggtgaggtggtgcccacctgtaattccagctttccagctacttgggaggctgaagcatgagagttgctcaaactcaaggggtgggggttgcagtgagccaagatcattccacagcactccagcctgggcgacggagtgagtctcggtctaaaaaaaaaacaacaaaaaacggtgatactagatggatactagaaactacagatggggaatcatactattgtttccctaagaaaatgatagtttagtttgtcaaagtgcagttagtcaattctggaagggaatgaagagatctcagaactagcatggattcaggaagaacagataattccttatgttctaatttccttttgctaaaaattcactagactgaatattggagacacagtgtatctggagctcatgaagacatttcaaaggtttttcattggctccattatctgggttgagtgatgttatggtatttggagactgtctttctctctgatgaaggatatgagctttggagtaggacagatgtgtgtgaattccagatctgctacttactatcttggacattaagaaaattgcctctgcctctgcctctgcctctgcccctgcccctgcccctgcccctgcccctgcccctgcctctctctccacggtctccctctgatgccgagccgaagctggactgtactgccgccatctcggctcactgcaacctccctgcctgattctcctgcttcagcctgccgagtgcctgggattgcaggtgcgcgctgccacgcctgattggttttcgtatttttttggtggagatggggtttcgctgtgttggccgggctggtttccagctcctaactgcgagtgagctgccagcctcggcctcccgaggtgctgggattgcagacggagtctcattcactcagtgctcaatgttgcccaggctggagtgcagtggcctgatctcggctccctacaacctccacctcccagccgcctgccttggcctcccaaagtgccgagattgcagcctctgcccggccgccatcccgtctgggaagtgagtagcatctctgcctggctgcccatcgtctgggatgtgagaagcccctctgcctggctgcccagtctggtaagtgaggagcgcctcttcccggccgccatcctgtctaggaagtgaggagcgtctctgcccggcagcccatcgtctgagatgtggggagtgcctctgccccaccaccccgtctgggatgtgaggagcgcctctgcctggccgtgaccctgtttgggaggtgaggagcatctctgcctggccgccccatctgagaagtgaggagcccctctgcctggcagccaccctgtctgagaaatgaggagcccctccgcctggcagccgccccttctgggaagtgaggagcccctctgcccggccgccaccccatctgggaggtgtacccaacagctcattgagaacgggccatgatgacgatggcggtttcgtcgaatagaaaagggggaaatgtggggaaaagatagagaaatcagatggttgctgtgtctgtgtagaaagaagtagatataggagactccattttgttctgtactaagaaaaattcttctgccttgggatgctgttaatctataaccttacccccaaccccatgctctctgaaacatctgctgtgtccactcagggttaaatggattaagggcggtgcaagatgtgctttgttaaacagatgcttgaaggcagcatgcttcatcgtcatcaccactccctaatctcaagtacccagggacacaaacactgcagaaggccgcagggtcctctgcctaggaaaaccagagacccttgttcacttgtttatctgctgactttccctccactattgtcctatgaccctgccaaatccccctctgcgagaaacacccaagaatgatcaataaatactaaaaaaaaaaatctgaaaaaaaaaaagaaaattacctaacctccctgagcctcaattgctatgtatgatacatatttccttattaaacatatttcctacatgaaatatgtgcatgacaatagccattgtgtgggaatagtcatcatgattaattgagataatacatataaaatgcttttcatgacctccagtataaggaaaccactcagtatgtgttgtatctactgtttccatctcagatttgcagttatttgaataattatctcccaaagagattaattgattaataataaacaatttaagacagtagctttaatagttagtttgccacaggactttgtccttagtctcattcttgctaatataaaagacttgaagaatatttacaagacatgttagttactttctaggtgctaaacatcagggaaaatagtacactggattacagaatgaggattcgcaaatattttaacaggccaatactctggaacaaatcccaaaagctataatttagcaaagataaaaataacaaaaatatgagcaagaagtgggggcctcatagaccgacagaggaagacatgaaaatacccacagatttttgccactcagggcccttatggtttctggactgtagtaaccacatcagcatcatgcccaacaacttactgagaatgaaaaatctatagagtaagtgagatcccaggttgcattagtaaacttggtttaagcgcagaaaagttgcaatcctacagtttttttatgttggtaaaactgcatttcaggacttgtgtccaactggagtggcttgcgctatgactatcactgataaactaaaatgtctcagaaagcactcaggctaggtacagtgactataatgtcagcactttgggagtcggaggcaggaggattgcttgagcccaggagttcaagaccagtctaggcaacatagtgacacttttttttctacaaaaaataaagaaaacttagctgggcatggtggcttgtgcctgtagttccaactactcaggaggctgaggtgggaggatcacttgatcccaagaagtagaggttgcagtgagtcaaaattacaccattgcactcagtcaaaattgcaccattgcactccaacctgggtgacagaataagaccatatctcaaaacaaaaacaaaaacaagaaagcaatcagattttaaaaagttctgaaagtcatgccaagggagaaagagttgagaaaactgaatttttacactaacacagagaaaacttgggaatgtgaatgctgtctttcaatatttgatgatggtcttggggaaggagaactagactgaggaaaaaattgtcatttgtctcgttcactgctatattgccagtgtatagcaaagtggctggctcaaatgtgttcaaagcattttaggcaaaataattctcttttgctctaaagatacagaataagatcaatagggagattctactaggaggcagatataactcactgtgggaaaaaaatttctaaaaatttcaagcactagaaaaagcatctttgattatggtgaactgtcaggctccgtaggatgcaggcagagtttgtacgacctcagtctagaatggggtaatgctggggcaggaggtctatctatataacactgggcaggaggtcctttgcaacaccaagatgctgggattctactacaggtgctcagcttgatattgcattgtgagttcagcagattaatcattgtaaaggactggcattgagagatacatgtggaagattccattatttctgcatctgtaaaagtattatctgattggggaattgtacacatttctgagcccatgtttccttgtaatgcataagttatctgatatcaattagtagaaacaacatcacagtaattatactcaacagctttattggtctgtcagtctgattgttttgcttttgtcattatcacttttttccatatttaataggatttatgtgggtggctttatagaatgaagaaaagcaaatttatttatttagggtatggatgaagggccttttaggcctttatttgcaataatttttgaggaacagttgtttgatccctaaaagaaataaatgctttgcagaacatttctccaatgaacacactcaaagccaggctccctttgagggagtttcaaaaacctttaagtgatttacataagcacacaagtaaagagaagcaattctttccaagtccctccttaattgcaaaggaatgtgaaaactctttataaaactttcactagtatttacaaagaaagtatgaagagtgttcttttcctgctgtattataaaatatttttattaactccatcattacaacctaaattaaatttaaaaaatattttaagacccaactaagcatgggcagtcactttttcatgctctttcttactggctgtcttgataattttggacaatgcactgtaacctctgcctcctggattcaagcaattctcctgcctcagcctcccgagtagctgggattacaggcatgtgccaccatgcctggctaattttgtatttttagtagaggcggggtttctccatgttggtcaggctagtctcaaactcccggcctcaggtgatccgcccgccttggcctcccaaagtgttgggattacaggcgtgagccactgagaccggccagaaagttttttaaaaataaaaattgtgattagtgattggtaaattaaatacatatatatgtgtgtgtgtgtgtgtgtgtgtgtgtgtgtgtgtatggattagttcattttcatgttgctgatgaagacatatccgagactaatttataaagaaaaggaaatttaatggactcacagttccacgtgtctggggaggcctcccaatcatggcagaaggtgaaaggcacatcttacatggcagcagacaagagagaaaagagaaccaagtggaaggggaaaccccttacaaaaccatgagaacttgcgagacttattcaccaccatgagaacagtataagggaaaccaccctcatgactcaattatctcccacctgggccctctcacaacaagtgggaattatgggagctgcaattcaagatgagattttggtggggacacagccaaaccatatcaataggggtttctatttgcttcatttcaggctctgagattctgcatttcttaggagaaactcttccatattctgctagtggtgactttctcccatgaagtttcactctgagcatttctaaatcttgatttgtacacttgccaatggaagcctatctccagggtcacatcttttaccacctcttaggttttggctcttggtccaaggaaagcaaagagcattggtctatgaaccaatgtgaaggctagccttggcctcgactccacgcactacctagacttgcctggtcttttacctcagaatccagaagctagatgttgtgagtgattgttcaagcatattgaatgacagcttttctaagcctttcttctgtggaaatacagctcagggagagagcagatcagacaacaactagtaattggagatgatagaaatgatctaggatatacagctttacttggaagcaacttttctggttttcacaaatccataatggaagtctgactatggtttctccttaacctggtgttttggggcaacgggtctttcttattaatgaccttgatattgtttttgcaaatactttttatttcagttctaactagagggacggtcctagaaaatgattaacacaattttagagaatgtgatgacagtggctccaaagtgaccttgtacctaagcaactcaaaagaaaaaaaaaatgactttggctaaaaagagagaccagagttccagggccctccaagtcacatgagatctgaaaagaagcagcataccagctctagccttttatccaaatattatctagtgccttaaactattatttccaaccaacacttatttttttcttcaaaggaagaagaacaccatttattttggagtgattattatattaatataccctataccatcaacttatatttgagaataaatgcaattactcctatgtgaaatggtcacattataggcacttcaattaaattagtaatttgtggatttaactgggcagaaagacacaaaggaccaccatcattaactctgccctttactccacatttattttatgtacactgattaggattctacctgttttgacaacagcaacactgctttactttttattatggtcttttctactctcgaaattgcttccttctgtctagtagcctaacagtattaactaatagctgccacctattgagacctcaccatgtctcctgccctaaatgaagcacagtactttactttgctcacttaatttcatcttcacagggtgtatgaaaaatgcactcttacttgagtttttcagataaggaaaccaagcccaaagggattaagtaaatttcatcaatttttatagaacttttaaatgacagaaataggatttgagcctaaatttgactgcaaacctgactccttagcggtgtaaactttcaaggctcagagtcagctttactttgacttccacaggccagtggtttggacgatggcaaaaccagatcccatataagagagacagaagaaaaaagtagaataaaagaaggaggaaagagaaatcaaatagaggaaaggaaagaaagatgaatagagaaagtgtaaaattttaaagaaagagaagaaaacagacacagcatgtagtaggctgctgattctctgaatagtggtactcaacatgcaggtgggtaatcttgatcccctgagcatatctggaaatgtctggggacatttttaaattctcagttggcatggaaggtggtgctgcttctggcatttagtgggcagaggccaacaatgctgataaacattaagcaatgcatagaatagcttctacaaaaaggaattatcagtatgtcaatagtactgaggttgagaaactctggtctagggtttgcttgtccaacctcccctagcaaacaccaatcattaaaaaaggacattttggagagagaaatgagatcttcatcatctaggatataaaagaatatgaaagaagacttagtactggtaaattcttttgtttccctgcaatatctgagaaaaaattctataatgtagttttagagtggcacacttcatatttttaatacaaattgaatatgttactcaatataaattgcaatttaatgtcagtgaactctaaggaagcagaatggggttgaataatcagttctaactctcctctgtgaggacttcaaaatcccagtgttggaagagagaggaccataaggaaccattataccaggcctgtcattttacaaaggagggagtcagggctcagaaaaatgaagtgacttgcctaaggccatagatggctgggttgagacaaaaccccagttcttcaaccttctaattctcagttctttccctctatcaaacttggttctgcaatttactactaacactaaccatcagaaatgacttaagcatctttttctttaacttatcaggtctatttgttaaaagcacacaagacgcgtgcacaaaccctgacactcagacataacaacttacagattcctttcaaagttttgtaatagttaatacaatatcccctctttcttctggggaaagaaaggtaatgataagaaagtactgcatttgattaaatcagactataattttgccatgatgatagttgccaagcctttgtaactcacagtagtagtaacactttgaattcaccatttctcttaatttaatgcagttttcaaatatgtctttctcatcagtgtaacttaagcatgggaaaataaagcacaaaaattaaaatcagatacatgaatgaactatgcattaatatacaaatatttattagatgccaactgcttgtgttgagcacctcagattgtggcagtgacagctaacacttaagtgattctctgtgccaagcaatggtgtaagtgtatgtgttatgtgtattaactcatgtactgtactaaccatggtaggatctggagatgacaagaaactaaaggccaaatcctctatcttttgagaatatgtatttaattagagaagcaatgcatgtgaggctgatgcctacttgtacatagaaatgtctgatgaagcctaaaaggaaaaccaataggagataaagctactattagtaagagcatgattttaatcagagagggtttctgggagaaggtagatgtacaactaaaactgaaaggaagcagaagagagggaaaacagagaggcacaggaggattgggtgtcaggaattgtgaaagtataaagaacccttttctaactgcaactgagaaaccatattaatgatattgtaatatgtgtttgtttaactgctattttttcatagttatattctaaggcaaagttctaaaactaattaaatgactcaaggtgaattgaattcaacttgacctaccttaacatgatacctgaagcctttatctgcaagccagaagggaagcttcccagaactgggaggggatccaagcagaggatccggggttcttcctgagtgtgaaaatgaatgttatttttccctccaggctgcttctaaggagttagctcacacttccaaaaggcatgtagtagtctgtctcttcagctagccaacaatttcatttggtgggagataaaaacaacaacaacaaaccactatttattttcctgggtaactggaaaggtgtataggatgatagattaattcactcactgatatagtcaaatatttcttgttcagaggtgcaactcactcaaatattatgtatagagtgaggtgataaaaaagcagcaataggctgggcgcggtggctcacgcctgtaatcccagcactttgggaggccgaggcgggtggatcatgaggtcaggagatcgagaccatcctggctaacaaggtgaaaccccgtctctactaaaaatacaaaaaaaaaaaaaaattagccgggcgcggtggcgggcgcctgtagtcccagctactcgggaggctgaggcaggagaatggcgtgaacccgggaagcggagcttgcagtgagccgagattgcgccactgcagtccgcagtccggcctgggcgacagagcaagactccgtctcaaaaaaaaaaaaaaaaaaaagcagcaataataccacctttgttttaatatcagtttattattctaaaataatgttttagaggaattgtaataaaatcctaaagcctagatataaaaatttcatatgtggttgactacagatatgttaaaaattattctaccacttaaatttacaagaaaaaaaaaacaccattaaaaagtaggcaaaggacatgaacagacacatctcaaaagaagacatttatgcagccaacaaacatgaaaagaagctcaacatcactggtcattagagtaaggcaaatcaaaaccacaatgagataccatctcatgccatctcatggtgattattacaaagtcaagaaacaataagccaggcgcagtggctcatgcctgtaatctcagcactttgggaggccgaggtgggtggatcacctgaggtcacgagttcaagaccagcctggccaacatggtgaaaccccgtctctaataaaaatacaaaaaattaactgggcatggtggcgggcgcctgtaatcccagctactcaggaggctgaggcaggagaatcgcttgaacacaggaggtggaggttgcagtgagccgagatcctgccattgcaccccagcctgggctacaagagtgaaactccgtctcagaaaaaaaaaaagaaaaaaaaagaaacaatagatgctggaaaggttgtggagaaataggaatgtttttacactgctggtgggaatgtaaattaattcaaccattgtggaagatggtgtgacaatttctcaaagatctagaaccagaaataccatttgacccagcaattccactactggatataaatcattctattacaaagacatattcatgcatatgtttgttgcagcactattcacaatagcaaagacatggaatcaatccaaatgcccatcaatgatagactggattaaaaaaatgtggtacatatacatcatagaataccacgcagccataaaaaggaatgagatcatgtcctttgcagggacatggatggagctggaagctattatcctcagtaaattaacacaggaacagaaaaccaaacaccacatgttctcactttgaagtgggagctgaacaattagaacacatggacacagggaggggaacaacacacactggggcctggcagtgggtaggatgtgggggaagggggagcattaggaaaaatagctaatgcatttggggcttaatacctaggtgatgggttgataggtggagcaaacccccatggcccacatttacctatgtaacaaacctgcactttctgcacatgtatcctggaacctaaaataaacatgtatataatatattatatattctactgatcaatcagaacagttttggggagagggtctacatctagttgaacaaatccagcagaggcttgcttgtaattgttgctttgtagagaaaacagaaagaatggcatggttaagagactattttgggtccacggaataagaggcataatttgtacattatgctgttttgaaagaaagcctgactctatttttacttactgatatatgctggctcttggcttttacctctttgattttttttttttagtgggtctcacttgccccattcattggatcattattaaagtaatctttaaaagaacattattagaagtttttgacatttcctgtccaagggatttgaggtcagtaagaaattatattaaaaatcatactttaaaagttctgtataaagttaatctgtaattaaaatcagacattccagattaacctctgttataaaatgaaacaagataaatgaaatatggtgaatgaagataaacaataagtggtgataaataaaacatgattcttttcattacttaggtagcttgggtttcatgaggaatggggaatggctctgaaaatttaaattttggcatagtttgctattagaccatgggaacattttagctttcattctctatgcaaataatggcaatactatactttgggcattcatgggaaaagagacaagattaattttaacaaatactttaaaatctttttttatcttttgattagagtgaagaaacacaaagcaactttaggaggtggttaaaaaaataacataatgagcaatgttctctctttcaaaatctagaacattggatgggaactaagtttcccctttagctcaccagattctgggtttacgcttttatatacaaagaaagagtgagaacacaactggttagatacaaaaagtggaggaaattatggaagcctagaaatgcggatatgataatgagtgaaaaaaaatacctggcatcattttcttaataggactcacctttttcttgcaaacaatctagatcttgaagtaaataagatggtttaatttagtgcctgaaatagaaacacacatggttcatcactcaattacaataatagtgtaaggaaaaaatgtttttgcttgaatagttttagcatattacaagaaataaacatgaaattagattctgttatgcatttttggtagggatagcttggaattatgtgttgtcaactgcatcatatcaaaggcaaatgatgtaaacctgtgccattgctggtgctattaatgttgattgcttcgttaacatagtgtctgctaggtatctccattataaagtcattctttttcctctgtggggaggaagcacagaactaatacaatatcagagatacactacaaaatacctgttaataatcataaaaggaggactgagaaactattctatattgaaggagattaaaaagatgacaactgaatgcaagatataatctgatattttcttttgctgtaaaatatattattggtatatttggagaaatctaaacaagtttgtaaattataagtaatattttattaatactatgtttctgattttgaaaattagggtgtggctatataaaaatgtatttgaatttaggaaacacacactgaaatattttggggtaaagaagtgttatgtctgtgatttattctcaaatggatatataaagcaatttaggtagaatgttaatatttagagaatctgagtgaagtgtatgttaacacactcttcagcaatttataaggccaaagaaaagacccagttgtgacagctggttcttgttttgatttcttgtctaatcctgggaaaaatacttagatcttgttctttaactatcactatcaccatttttcactttgttctgttcccatttgtaatgaatttatattcagactttgaaattcagtttctttatagccttagtgaattcatttttactaggaataaaacttgctgaaagattgtcttttccagcctctgatggtcatatggtcacataaccagtgaactgtaagtgcaatgtggtgtgaggctctaggaaggctgttcaaagggagcaactcatctgagacgggtacatttagttctttgtctctttctcattcctcttgtctgcagtgtaggcatgacgatgccatgtattgaaacttaaagatggaagcttgtgttcagatagtggagctgaaggacagaaagaggcctggactactgatgagtgaagtcactacaccaaccctggactgcctgcttctgtacttcttttatataagagagaaataaactttttctcatgcaagccattttgattttggatttcctgttaaacctattctttttttttttttttttgagacggagtctcgctctgtcgcccaggctggagtgcagtggcgcgatctcggctcactgcaagctccgcctcccgggttcacgccattctcctgcctcagcctcccgagtagctgggactacaggcgcccgccactacgcccggctaattttttgtatttttagtagagacggggtttcaccgtgttagccaggatggtctcgatctcctgacctcgtgatccgcccgcctcggcctcccaaagtgctgggattacaggcgtgagccaccgcgcccggccgttaaacctattcttaactcattgacgacattactctgagagtcttaacacagtaagatagtttctccagccacctactacatttaggtatcaaaagtatattaattgtattttcccagtcttccgagtttggactgctttatggaatgaccatgattgaagaccaagctattcttctttggcctgaaagaggaaagttgaatcaaaagttttgctttacttttagggtcttcccaaataggtagagatggaggatccagtggtgtggtgatgacaggtttcttcagagcatacatacgtttctccccttcttccaagactttaggattttgctaggtctataaagggaaggcttcttatcattggaggaggctgaccatgtcaggacatgcttattcataagagaaatttatagcagaaaatcagcatctagtatacactctccaaagacaggactgtcagcatctctctttcatgcttgagccctccactggctctctgttacatcaaaacttctcttaggactttaaagccacccagatgttttttcacgccttttacttggtgcattatttcttccatttcttattaaacagtcctcatcattgtacaccagttatgtatcaattcccatcgctatacttttcttactctgcctaaccttaatattacttgggaataagttcaagttttacgtttttcttaaatcaccctctcattactcaggtgctcattgatttctctgactacaagctggagtcaacagcatacagcttggtaattaatcatcactgtatgtttcacagcacagccatctccttgagcaagattaagacttctttgaggctcatcctcagtatatctcatggatgtctcttgcatgcttttgtgtatatgatgttctgtgtctatgctgctttatcaaatttcaatccacctaaatgaggcaagtaaaaggtattttttttaattttaggtttttaattattatgggcacatactaggtgtatatatgtatgtatggggtacatgtgatttttggtataggcattcaatgatattgggtaattgggtgtctgtcacctctagcatttatttctttgtttgaggaacatttcaatctcactcccttagttattttaaaatatgcaataaattattgttgactacagttagttacccctttgcatgatcaaatactagaccttattcattcaaactatatttttgcacccattaaccatcctcattcatccccactctccctcatcccgctaccaagaaccctcatgggctaaacctaactttgaacctggactgccctgcagcagtgtgatcgtagcttactgcagccttgaactcctgggctccgttgatcctcccgactcagcctctcaagtatctgagactacaagtgcaggccaccaaacctggctaattttttatttttgttttttgtagagacaaggtcttgctatgttgcccaggctgttcttgaactcctggtctcaagtgatcttcccaccttggcttctcaaagttctgggattaaagacatgagccactgcatccagcctattttcgttttaaacaatcatttaacaggaaggaaagctgtgaggtcaaaataagtaaaatgggtaacaggaaataagttagaagataaagattagaaccaaaatcttcttttttcccagctatttctcttcctgttaagcaacacaagttagaatgtaagctcagtgaggtcacagtctaggtttgctgatgttgttgtttttgttgatatatccccagtatctagaagactgcatggcacctactaggtcctcaatacatatttattaaataactaaatgagggctttagaggctagacaataaattttgccctttattataaaagaccatagatatataagctgattttcccatatcttcaagaaagtgtcttacagttagatagaaggaataagttctagtgtaccatggcaaactatagttaacaacagtatgtacattaataattgatcgttattgatagatggtggaactcctagatggaaatattaacaggggtaggaattcggtgctttttttttctttttcttttttttctttctttctttttttttttttttgagatggagtctccctctattgcccaggctggagtgcagtggcataatcttggctcactgcaacctccacctcctgggttcaagtgattctccttcctcagcctcccaagtagctgggactacaggcacgagccccgacgcccagctagtttctttgtatttttagtagagatggggtttcaccatattggccatgctgatctcgagctcctgaccttgtgatccgcccaccttggcctcccaaagtgctaggattacaggcgtgagccctgtgccaggcttagagcttttttttttttttaagatatcacatgcagctggaatgtaccaattagtgctgtggaaactgacttgaagctaactggaattcccctcaaatgttccaacttaaagtcgtacaagcctattttaccagatggtttatgaatgaactatagaattttgtggctcataagtaatgtatagtaatgacaccttcccatttgctatttacttacacaggtagaagcagcagacacgtgaagaaagatctgaagaatattttgatcctttggaggaaccacatcaagcttttgaggcaaccaagggtgtaaatattctgtactggaggtcacattatggaatggttaaggggctaataggggctgaagacgttctgtgggttgaggagagggaaacaaaagacttcattcctaataccattgaaacttcagggaggacatcttgtattgcccaagaaaactctgtaagtcaggaatgacaactgtaatacactgtggtctctgggtctgatattgcttctaaataatgatccatgagaatatattcattttgaactattctgtgcattgtgtacatgtagattctaggcccagaattatgtagataatggggttgccccattacttaagatgtaagagtgggaggtagaaaaatctcaccctaacacccactctagttgtgcacacaatatcagtccagtagggaaaggggaagccaacttagggctccatcaaacccacctggccgtggataggcgagagaaaagaagcctgggaaagccatgggaaagaaaaggttattcagtgaagaaaagggtatttttctctcctttccaaagctccatggggactccattttctcccagctggtcacatttttatgggcctccaccttcctatcaattagccttccggtctcctgcccctccatccttcggttagcctggactctggtagtgcttgagctacctgaaggaggtgggtgtgctttttcatgcctctttctctcccctgattcattttctcagcagactggccaaagagaggtccttgaaacccactagccccacaaagtcctgaagcgaccttattctgtgtgattagctcaccccaaatgagttgttatttaggggtgaactgcctagttatttccatggagatttttgccagtgtcagaaataaattttgatattgaatttaaatatgctgcaataaataaattaagaaatgtgattaaagccaacagtccttggcacacacgtatacataaccataaatactgatctgaaattcataagcatcttctagcctatacagatcccatttttaccaagaaggcaaaaggcaaaagagaaagagaaagaaacagagagagagagaaagagagagagaggcagggatggagagagagagagagggatagagagagagaaaggaagagagaaacacacgatgggcatcggggagggagtgggagcagaaaataaaatcaaaaaatcaaactcggtcctgggaatgtgggcttaagatgtataatgtgctttcctctgtgctcaaccatagttttctgccctaaggtggtagttttcaagctttaggatgctttaatggggggtatgaatttaatacaatttctaagtctccaccttcagaaatactgattcagtttattctgtaaatcaggagtagagtctagggattttcattttactaaagacttcagaaaattcagattcaagtggtcctgtgaaactttgtagggggtggtgtgtgtgtataaaatttccttttgaataaatgtggccatgctagaaatccagggttgattacttggacaaaggaaaaataaaacatgtatgagtcatggaaggaaattgaaaatattttgtatctgtgtgctgccatgatatctaataatctaatagggaagatgtaccatagttatttttctgttgtgctttttcaagcgatgtatgtgatttgatgaggtgtaccatcatctgagttcacataaaaggcagtctagaatttctcacaaaactttccagaagtgaggctaagcagatggcaagctatatcagaagaaaacacagcatgatggaaatggcaaacccatttgaccatgagggactccgggatccggttttggtgcttctttgggtaaacctctgaagttctttgggcatcatgattcttacctctaaaatgaagagtgtgggaaagatggccttttggttcacttctagagctgaattctccagaaagactttgtggttgcctttttgagtaattcattgctgtcagaaattggatgaaggtcaggtagtctttgagtatcaagttgttaagccttaaaatactagcaacaattttattcagcaccttctgtgtaccaggatctctgctttatgcttcatatgcatttgccccaatccttccctgaattcagtttggtttctctgctatcattttatgtattaggaaaatatgattcggggaagataggcagcgcaatgtaaggtttaagaacaagagttctagagcctttagacctgggcctgaatcctgactccaccactcaataactatatgactaagtatgtaaaagttattgaacaatctccatggcttagttttctcatttgtaaaatgagaattataacagtttttccctcatggggttgctatatatggtacacgttatgcaagtgtttgctctgacagttattaaatattttgttagagctgagatttgaatccaagtctgtttgaatatgaaacccatgctagttcttagcccagtgattgaaaccacattgctgagccagtgtgtttgagtccaaataaagattcagtgagtcaagatgcatcatttagactcaaaaatgaatgtcaaaagtaactggcaaggaaggatacaacatgttcccaaactgggaccaattaagattttaagccattatatttcacataaaccttctggaaactttgaattaaatccatgattcaaataaagttatgagattaaacataacatccatactgtaagaaaattcacatacacacacacgtacaaaataacacacagtgtttatttgtcaccctcaatatgcttgtagggttggaggaaaaatttctactttaaagataagagaaccacagcacagagcagtgaaatcatttactgaacgttgcattaagtgctctcatagactttacagtccagaagggctcataaatggacacagaaatgtaataaagaattataatgttatgataaggtcttcagttacctatccatttattccttctttatttatctgacaccaattctcctgttttctaacctagatccttccctttactaagaagcttcattttattaattatctgcacattagttaggattaatccttccatattccccactcattacatgcttgtcacttgttattttaaaaatattgtcctatttttactttgcaggtttgaggaagttcaactttgttctataaatagatctaacatagttgtagagcacagagaaccaatcttgtctctgaataatattctgaatctgtagattgatagatcagtctatctattgatctatcacttatctggtacattggctggtaggtgataaataactagttgttgaatggatatgggagcaactttttccttcacttgctccagcaatcccgttgatgaatgataactcacttcctcttccagcagagggcagtagaatacactctgtagcacgaaggctttgggaaatactggtgctattttgaaagtacggtattcagatatgtttgaagatagagaataaggtgacagttttttgtgaaaaaaaattaaagaaaaagagacattatattaattcttgttataagtgaaacaaaaaaaatttcatttaatatttttcttcttcagggaattggtagttggtatgtgactcaaaactgctcatcaccagagaagcctatactttgcaattgcctttgttaattccttctgtatttaaataatatctatactatgtttcctttgtagaatgggttatagggaatataaatatgtccctgtgattactagtttatttaataaggtaaatggcttttcggttttcttctagagccgaattctgcagaaagactttgtggttgcccttttgagtaattcattgctgtcacaaactggataaatttcaggtagaccataagtaccaagttgttatggtataaaatactagtaacaattttgctagtagttactaaaatatgctatagtcagataaatctgtgtcctgtaattattagtttatttattaactattgaattaacattttaaaagtaactttaaagaaacatttttagggcagagatctttttctagagttccacctgcatagataatttttttccaaaccttgtttgcttatgccatacttggaaatatgttaggatatgcagagagttgtctcagcacttactctttgatctcaccacctgcttgatcatatttcatatgcagacactcacatgtacacatctctatcatccacaacatccacactgtcctcgttcctccttttattatagttatctctgtctgtgccaagtttcaatttggaagtcagaaagtaaaggaagtaagaaaatctaaatgttctcccagatcacaactctttgaggtatcccagtattggagactgccaggcaatgccagctatttataactcagctactttctagccatgatgaaagtaaaactggaagttgaggaaccagtgggtagagaagagtgggccacaatggaagagatagaagagttttctgagaaaagcaatatatacagtaatttttaatagttgtcctgtataagatttcaagtccatatcatctcaaatactgctttttcttgtaaaggattcagtggctatattgcatttcatttctggttcacttcaactcaaaattctctaaatagctcctcttattgtaagtatttgagtggtttgctataacaatctttatcattacagcaacaatttttgctgctgtcccaggcactgtagaaatgagaggtgaggttcctgcttttaaagactttacagtccagttgggctcataaatgaataaggaaatataataaagaattataaagtccctccatttattctttacttatttgactaatatatttattgatgacctacttcgtgtcaggtaccccaatctcatggagacaggaaataaatcactaaacaaataaatgagataatttcagatagtggtaagtgctgtgaaaaaagtaaacaaatataacgcagaggtagtagaagaagagtgtgctcttatcacagctaatcttggtttaggtggtagttttagttggtaattaagtggtaagggatgtcagagaatgcttaccaaagtatctggtatgtaaactaagacctgaaggattcataggtgtgagaggggaaggaggtgggtgaagagcattccaggcaaagagaagagtatttgcaagacctagatggcatgacttgtcctgtcaagttgctaaaaatgatccagatctgcccaggagccctcagtgagtctggtgggtgataaggctggagaggctggcaggccaaaaacaaataaagggtctctaagccttgttaaacttttcaaattttggcccatgagcattgggaaccaatattcattaaatggaattgcttaaagctctaagaaatattttcagaatatgttttaatacagggcaccattttctagtttgtaaaccctttcttttggaatgccagaaattttattttattttttggcaaaacccctgcattatgcatgcattttccaaataatgcttctaatttctttcatttatttatcaatattttggtgacacttcacatcagcactgttttgggtgataggaatatatcattgaacatagattaaatcctcccatatatgtagatttatttaaaggcatgaattagcagagaattcctcagggaatggttttgtcaagaaatgtgaaggggctgagattctacttgcaaactaacaagttagcctgccacagtttcacataagctgacagaagacacaagacttgtagttcagagaccaacagctttattactcatggtagcagaagtagccagagtgtaagcctttgtgccagttcccagttttcacagaactatgtgaagagggtcagttgacacctatacatgcagtgggttgtgttaaaagagagcaaacctgaacttatggaacacgaatattttataatgggtaataaacagaagcatgcctatcctctgctctggagggggatatcatctctacctactaaggctataagcaatcccgccctttgctcaaaagggagacactatctctatcttccgcgatggtacacaataaaaacatctttgaaaagacagttcagcacagaaatagtcagtgcaaaatacatgtagaaacacaagagacccacggagaattgtctcctaacagatttgcctttgttttagttaaagtacaagctacaaaagtattatgcggccaaaacaagactgaacattcatctgtttcttttattaaaaaccgtttgttctggacgtatcctgtagtgggtctgcataggtgagattttgtgaacagttggccttagtgcattagatctgtgcagcttgattctgtctgcagacgttttctcagattggatgataattgagggttccatatactcacttttatgagtgcttgaagtttgatacatctttcagtaaacttcaagcctgccttttctgttaatgttgaatttatatgtttatatgtaaagagaagaatcaagtataataaaatatggtcaaatacatttctccttaaacattttgtaatttttttaattttgaaaattgttaaggcttcagaagctgtcttggagaattttctggccaaacttaacagatatttaggagtggggatccttttaaatggctacctaccagggcctttaagtggctttcaattgtatatataatattttaattattatttttaattctagaagtccagttaatttgaaatttaatgttataatattttttcatataacatatttaatccataagtcataattattaaaatgagaactgctatacttatgaaacataagcaaacactcactttttggggttgtgtgtataaaagtattttcaaaatatgatagcagacaagaccaatggtttagaattttttttttttttagaaattctaaaggcaaggcataaaatctttttaaaaaatcacacttggaagattaattttgttttaagttattgatcaatccaaagcaacattcaacttcacatatcaattttaacaaatttccatatattacagtggcttaagtctaagagcagaagttaaatctcttgtcctttactttctgggtaaacaattgtattgtaaatgtagatgacttttacctcaaggatttagatgggagtagtttttctcttttttcaccccctctaaaagaaggcagggttggcattttgctgatgccaatgatgtttatatttctgagggctgggcaattgtttcttcttcacctggtcccacttgcacatatctgttttcctaaaaagattttaaaacatttatttccaagctccccaaatcgcctacctattctgcaaccagaaggaaattggaagaaaaaaggtgtgagataagagagccaaaggacagacattaagagccttccaagaatgacaggtaaattggatttcatcactttctagattaaaactcctcactcgctgcttattgtatttatgatgaaatacaggatgtagagtgaggccacatggccctggacacttccgcagcctcctctccacctgtactcctggctcacccactccttcatggcaatctcactgacctctgacagtttctacaaatcccaagctctctcccttctcaggggcctcctcaggaacagtgcatgctgttccttcattgggggatgctctttcctttccccttggactggttaattcctccctcaggtcattgtcccttcaattagagagggtttgccctgcccctccatgtctaagttaaatatctgccatatttttcttcataaaagcttttaacataatttgtacatttgttagttttgatgaaattataactgaatgagcatttactgcgaatcaggcatatgctatgtattttacagggtttatcacctttaattctcactatgtcatttgtcccacttcacttaagttttagaggggttatggaacttttccagggtacagagctaggaaagtggttgagcctaaattctaactgaaacagtccaactccaacatgttcctcactcctaattctttgcaaaactgccctcaaaatggctttctccatgctgggccctctgttaagcaatttgcatgcacacattcagttaagcctcacgacagtcctagaaggcagtactgttagtattatcatcctcattttacagataagaaaatcaaggcatgaagagtaatttgcctaacattatgcccaatttgaaagcatatatctgtgggacctcataggacagttgcaagccaaggtcacgatccaggaaacttgacaataggctctccttttaatcagtcttgtacgtgggccctagtgctgctccctccctccggttccatggatgcaggggccattttgttcagcaccacatacccagcaccgtgctcagacgagtaattccatatgtatttgttgaatcagtgaaaagagagtgttggtattttcaatcgtggctgaaaattttgtttgcgcaagcctaaatatatatatatatatatatatatatatatatatatatatatatatatatgtatatatataaattttgtttgctcaagcctagctagctagctatctacctatctagctatctatctatgcagctggggctacaggtacatgtcaccactcccggttaatttgttaacttttttgtagagatagggtgttgctatgtgttgcctaggctggtctcaaactcctggactcaagcaattctccttcctcggcctcccaaagtgttaggattacaggcatgaatcactgtgcccagcccaacatatattttatcatcaaaaattattttacaaaaccctacagatatacttgttatgttaaattataaaacagccttcaccacccactttcgtcactggtctggtgtctttggctactatatggggtatttccagcagatatatcatcagctcactcatagaagaggtgagaagtcctttattggcccctcaatttttctaagaggatgtcaacctatttccagcacagcagttttaaattggcacttgtcaattacgtatctctagatagcaaactaccccaaaacgtaaggaatgtaaacagcaaccatttataatttttgagtctctgggttggctgggctgtttggctgatcttgtttgagttctcctgtgcttggtcagacttgctcatgcatctgtggtcgtctgagaggttggctgggaactcttctcttttccacaaaatcccttctcctctggcaggctagtctggatttgtcctctaggtaatggggatgggggatgagcaatgatttttccagtctctgcttgtattgtctgttactatctcattgctaaagaatgtcacatagctaagttcagagttggtgtagaagagtaccaccagagggtgtgggtaaaggaaggtggaaaaaaaaagtgtaacttgggacaatatttacttagaaggacaatcatgaaatcagagcaacctggtatgtatcagaggttcaactgagagtaacagccttagaagccctgatgggtggatattagtttctctaaatacaaccttgcattaacccaagcctgtagaaagctgaagaactggactgttgttctgaccaaaaaggctcttgtttttactgaattgtattttgacattaatgccttttgtctaagaaacagtctttctccttgttggatctactgcactggcccttaaaaggcaaggcatgggggtcgggggatgtggaattttggctctcaggggacatttggcaatgtctggagatgtttttggttgttacagctggaggaggagtgctattgtcatccagtgggtagaggccaagtatgctgctaaacctcctacaatgcatgggacagcctcccatgggacagactccctctagtcaaaatgtcaatggttccaaggttgagaaactaatctgcagaaaggatattgttgatgggttttccagatactctttcgaaacactttttttcccaattatgtatcagaaatagttgtgctgaacaattgttttggtttagtcttcagcacaaacactgtgaatggaataaatggtcaacttttccattttgcaatggctgttgggatgctcatagtcaaatttgttacatgcctgtagaaaatagtcatatctctattttttttgtttcttttagagttgaagtcttcctatgttgcccaggctgtagtgtggtggcaattcacaggtgtgatcatagcacactacagcctcaaactcctgggctcaagcaatcctcccgcctcggcctcccaggtaactgggactacaggctcacaccactgcatctggcttttattttttattaggctcatttttggctccattttattgccctgccattaattttccttagtctttttcagctatttctaatttatggtatttcattatttttataagttcctagaagctgtcttaaatcttacgtttaaaaagatctaggggcataaatgaatacctactagcataaaatatttctagtctgtgataaagggcttgctcaaaaataagtacagaatgagaattgctatttgtagccactggaaatgaacagatgctctcagatctaagacctcaaattaatttgagtcttaaataaacaagactaatgacaacaaaagattgaataacatttaaagtttgaatgctgaacttactcagcaccttctattatgcatctaatgtattgactggcacatagtaagttcttaatatatatttgttgagtaaataaattaatgattttaatttgattccattttgataatgacaagataattttttcaaaaagttccagattcaaaaaggtctttgttgactaaatatgatgggttactgatggttagaattttagctttgatcaatttgtgaagaaatctggaatttctgaagttattattatgtgttcgaggagatacatgtctccgtaacaattaaattcatgtattcatactggatagatttagccagacaataggggagaaacttatgagcagtgtgctcttagcatagtactgcttttcctcatgatctaaggaagtcataagcaatcttctccaaaaccccttcaacagaaccattacaataatatcttgttgcagagtcattatagctttctaacctctaggataaaagaccataatttccagtggaattctgtcattcattaagaaaacaaaaacctataaaatggaagtgaaccactgtaaaatggaagctaattaattagggtaaacatttataaagccagaaaggaaatgcagcttttccttatcccctccactactcccaggaaaaaacaaacaaacaaacaaaacatcttgactgtactggtaagtaggctccaataaataatggaaacaataaacatatttatatccttttcaggatataatgatggtatttgaggatctaataatttaaacaaagaatgctttgctgtagatgagacaatagccatcagttttattttccattactattttatctaaatcttgatttttaacaatttacctgtagaacttatacattggagactgagcttgatactgactttctgtgttaatacacgagatattttatacctgtcattgtgacactgtgtatctgaaaacacttctagggtgtccaataatttatgcttgcttttatttctcccaggtaatcatacatattttctctacataccttgggctagtccttgaattatatattccattccttcattttcccatcatttatgacaaatgaatgaacatgtgacaaccatgtgccaggtagatacttgggctagtggttgagaatgcaaccataggcaagatattaatacatgattttctctttaaatcctaatgacatttaacaggaatgattccaccatttattataatattaacagctaacattgattgggccctcactatgtttcaggcattattcttgttttacatgaaatattttatttaatatttatgacaacccaatgatgtaagtgctataattgtcctcatttgatagttgtaaagactgagaattatttgctttataggagagatactaaggcaaatgattattttaaatgtctttaataaatgacatggtggggctgggtgcggtggttcacacctgtaattccagcattttgggaggccaaggcaggcagatcacctgagatcaggagtttgagaccagccaggccagtatggtaaaaccccttctctactaaaaatacaaaaaattagccagtcatggtggtgggtgcctgtaatcccagctactcaggagactgaagcaggagaatcacttgaacccgggaggtggaggttgcagtgagccgatatggtgtcactgcactccagcctgggtgacagagcgagactccatctgaaaaaaaaaaaaaaaaaaaagacataactgtgatgaatggtggtgtgggaacacaaaggagagaaaagaaacatagtttagaaaatcagagttgtctgcatagtattccatggtgtatatgtgccacattttcctaatccagtctatcattgttggacatttgggttggtttcaagtctttgctattgtgaatagtgtcacagtaaacatacgtgtgcatgtgactttatagcagcatgatttataatcctttgggtatatacccagtaatgggatggctgggtcaaatggtatttttaattctagatccctgaggaatcaccacaatgacttccacaatggttgaactagtttacagtcccaccaacagtgtaaaagtgttcctatttctcctcgtcctctccaacatctgttgtttcctgactttttaatgatcgccattctaaatggtgtgggatgacttcatgtcctttgtagggacatggatgaagctggaaaccatcattctcaacaaactatcacaaagacgaaaaaccaaacaccgcatgttctcactcataggtgggaattgaacaacgagaacacatggacacaggaaggggaacatcacacaccggggactgttgtggggtggggggaggggggagggataacattaggagaaatacctaatgttaaatgacgagttaatgagtgcagcacaccaacatggcacatgtgtacatatgtaacaaacctgcacattgtgcacaggtaccctaaaacttaaagtataataaaaaataaaaattaaaaaaaaaaaagaaaagaaaatcagagttgtctgcaaaaggcaaaattgtaaacatgaactcccaagatttcttatccgaatccctgggactgggaatataatgtgatatcacacttgtgattatattaccttagatgataaacattttgcaaataaaattatagctattaatcagttgccttcaagttaatcaaaagagagattagctgggtgggcataatcttatcatatgagtcctttcaaagccgggatttttttttccctctggctggtagaagaatagaaagtcagagagatatttgttggttggatgcactgttgctggctttgaacacaaagggtactatgtgacaaaggcctgagagtggcccctcagagctgctaacaagcccttatagccagcaaagaaataggtacttagtcttacaaccaaggaaatagattttgccaaccatctgagtgagactggaagtggatttttccctagagcctccagaaaggatcccatcctggttgctaccttgagttagccttatgagcatctaagcagagaacgcagttgagcgtagctgagcttgtgacctatagaaatgtgcactaataaatggatgttgatttgggccactaagcttgtgataatatgttatgcaacagtagaaaatgaatacagctgcattgaattggtgacttttgtgctgattgaatcataagtaggagctggatggtgatggtggaatataatgttccaagctaagagaaccatattggcaaactcttagattgtgaagagtttcaggaattccaagaagcttaatgtggctagacaatggactgtgtgtgtggggaggggatgatgtgggggaaacagggaagcaagataaagctgaaagggactggagaagagagcaaggccaagtcagaatgatatattgtcaattgtatagaagtttgactttgtcataagggcaatagcaagccatgaagaggattatttgggatgtgcaaatcatatttactttttacaatgaatctctccagtgaggagaatggaataaaaagcaggactggaggcagaaaatccagttaggaggctactgcagtaatgcaatcatgagttgctagtgcccggaactaagtgattggctatctgatagtcatattcactaggtcctgacaaattaattacttactttatttatttatttattttgagacagagtctcgctctgtcacccaggctagagggcagtggcgtgatctcggctcactgcaacctctgcctcccaggttcaagcgattcttgtgcctcagtctcccgagtagcccagattacaggcaatcaccaccacactcagctaattttttgtatttttagttgagatggagttttgccatgttgccttggctggtttcgaactcctgaactcaggcaatccccatgccttgacctcccaaagtgctgggattacaggcgtaagccaccgcacccagccaagttaatttattataatatttttatattaatttatcagaatctagtgattaactgtaagagaggatagagataaggatagttaagatggttcacaagtttctgtcttgcgcaactgtatggagttgtctttagcaaacatagaaaatttgggatgtgtaattagttgagggaggttgattaggattccatattttaatgtgtgttgagttcgaagatgctatttttcataagatgataataaccattgaaaatggacaacatggatctggagtgcggaagaatattatggatttataattcattagcattgtgccaagacaggcaagctacagtagtaaatacaccctcccagcctccctcatcccaatttcagtggcttaaaataatatatgtttaggtcaaaataatgtgtgcttcttctccatgtggccattccgggatccaggtactctctatcttgtgtctctgccatctgtaaaacagtggctgtcaactgtgagtgatttagcaatgtttggagataatttggctccttataattgtgagggatgctactgaagtctactgcatagaaaccaaaaatctactaaacatcctgcagcacacaagatagctctcataataaagaattatctggccccaaatgtgccagataattctttatcaatagtgccaaggtggagaatccttgctctgaactttatcatataactcatgtagaagaggacagaacacagagaaaagtgcatgactgatttttactggtaaatcctggaagtagcaagtatcactcccactcttcctctggagataacttaatcgcatggctgcaaacaacaagaagtttagtctaggtcagagattggcaaactatggccctcaggaataatccaatccgctgcctacttttgtaaatgatgatttatcagaacacagtcatggccgtttgtttacatattgtctatagctactttcatgctacatcagcagagttgagtagttgcaacagagaccacatggcctgcatagactaaaatatttactattgggccctttatttaaaaaaaattgccaatctctcatatgggaatatacggcaggacaaaggaaaactggactttgttagatgacaattggtctctgccatgagaaaagacatgtaattgaaattatggtagaacattatgttgcccagggagaacgctgatggtgagaaaacaaaagacaatatttaaacccacagttaggttttattgacagtaagacatcatgactcaacttggaaggaagactaaacataaatttatatcatacctctgtgcctgttttccaaatagctcttgatataaaaaaattaaggaaatgcaatattaaagaatagctttgaaaacttacaataggttctaactggcaataaccaacatggccacattaaacttttttcttctgactcttatggggatttatttagttatttcaatttttcttaagtgtcttggtcttattaaattatgatgcaaatgggaagtagctgaaatagataatttacttgtgtagtaggtgtgtctgccaatttggctatatgaaaaatgtcactttattttctataatgtgacttaatttctatttttgagccttcatttggaaatgtggcagaaattagctctcagtacactcagggtcttcctgggttacatatgtgtcccagggtttcatggggagggcttatgtagcaccagacatggaggaacatctggcctaggtcttcatctgttgatgctggcttctgtattttgtgatgctaggcctggaagtctgccaactacatttctcataaccctttgcaagctggattctaatttggttctgcaatggggcacagatgggaagtggaaggaaggaagaaaggggggaaaggatgttccagcatatttccagttcctgctatcatccttccagcagaagaggtaggttaaggctccagcttccagcttcttttgcactcccagaattaggacgctctaccctctcaaaaaatctgccagcattaatcttgaggtgggttctctcagagagaggttcaagcaacacccatgggtaggggtgtgcttgcttcaaagttcctacattcacgtaactttacttccttacttttgtttccccatttctggggatggtagctgctttttcaattacgagcatttgggtgactcagtgtctcatttttgctctttcggccttctaacacttgtttaactcattctctttgaaatccctgagtagggggaaggtctgaattcctatctagtctttgattggcatgtctcaggtttttcttgtgtgtccttatgttcaacctatgaggaatctgcatacttgccagctatctggattgctcttgggtgaacctgaaatattcaagtgctgcttcctttgttcctcttgcatccacatcatgctagtctgtccctgccatcttgaaataaactccttaggagaaatgtgagtctgtctgagtgccacctgcctagatgcacatcacatagacagctctttgcttctgtactgtgctgggctttcttcctccgctgggcttttctctgggatgaggacataattccacctctataacaagattcacaccccaacctcacccccaggacatggccctatctcagagatgcaatgctacactaagctttaaacaattatcctttggccgggcgcagtgcctcatgcctgtaatcctagcactttgggaggccgaggtgggtggatcacctgaagtcaggaattcaagagcagcctggccaacatggcaaaaccccatctctactaaaaatacaaaaattagctgggcgtggtggcacatacctgtaatcccagctactcaggaggttgaggcaggagaatcgcttgaacccaagaagcggaggttgcaataagtcgagattgtgccaccgtctctagcctgggcgacagagcaagacgccatctcaaaaaacaagcaaacaacaacaaaaaaaactccttcttctttgttctttccccaacctatggattattttctggtctccagtgtgtgtggtgttgtgggggaggtttcggagcgggtggaagtaataaggtcctgactgagatgcttttaaatctcaagtcccctctagagcctaagattttgaaactgaaaatttttatgaaagtttctttaaaacttttgttgcctccattcttctgggtcacattccttccctgaggcagtgcaggcaacatgttagctgccccaaaatgtggaaggaaggtaggaataaccagaaatacaaggtgtgtctgttagttttcaaaatagcttactgccccaaatgtttttaagtctcctagaatcctaaagccctttttcccgatctctagcttcccatttccctgatcacaactctcctcctcaatttttcactctcccatctccccccatctcctgtttcctagatcctggtctggcttgtgctgggcaccctgtgtgtattttcatcatgacacataccatattctaatggctattatcttcataggagaatatgagaagcttgacatcaataaaaatattctattccactctgtatcttcagtctctaggacgaagtctggcatagaaagggtacaataagctgaagacaaactgatctctagataaaaaatgatttgtccaaattctaagtattaaagacagtagctaatattcacatagcactaacatgccccttttctgctctaaacagtttagatacaccaagtctttgattctgacagtaattctgtgagtaggtatctattatcatcctcattttacagatgggaaaatggaggaggcacagagaggtgtggcaacttgctcagagtcaggcagtagcaagtaagagagccttgatttgaaccagatagtttggctttctagtccatactcttagacactataggtcatgacacctctcacatactgacttggtttttgtaaggagatggcacactcattgtgtaaagaattcaaatatgtatgtgtgtgtgtgtatatatatatatatatatattttaaattccactgctctaaaatgcttccaaagaggcatagaagcaagaaaatacaggaaaatgttttgtattaccttactcattattaacaagaatagtttattgacacatttatcttaaaagcactacatgacagagggctgaactcttatcactgtcacacttggatcaaggtactcataggtcccaaagggtcatattttgttctagacattgaagagaacatactctcaaaaaatgggaaaaaaaggaactgaaaagccaggaaggattatctctatttttaaggcatctaaaaagaaggcagaagaagaatcgattgggcatttttgcattgctctgatctttccagagaagaaacagagtaattgaattttcattaatttttctagagccaccactcttaagtcaaatggtaactcgacatatccatgatagtggcattaaatggattattgaaacagtcttaaaacaaacatatctttgtataaaagttttactttccattaagttttaaatataaaactgttatgctgtcattattaatttggggtaagtatgagagatttgaatacgttttctggggaagtaatagtttatctgaaaaagcatttccattatttatcataatattaaaaatcagaaagatttttttcaagctatcttcttttactttttatttatttagattttttttttttttttttttgatgaagtctctttcttgtcgccccaggctggagtgcaatggtgcgatctcggctcactgcaacctctgtctaccaggttcaattgattctcctgcctcaacctcctgagtagctgggattacaggcatctgccaccacgcccagctaatttttgtatttttagtagagacggggtttcaccatattggccaggatggtcttgaactcctgacctcatgagccacccacctcggcctcccaaagtgttgggattacaggcgtgagccaccacacccggtccaagccatcttcttttaccataaactacaataaaggtaataacttcacttttgttgaaatcctaataactaactagttttctttattgttccatatgaaatatatctatctgaaactaatgtgtcttcttggaaatgttttcttattcaaataaaaataattatttataaattacaatggaggaagcaaaccagattaaagcactgagtactgaaaaaaaatcaaaattaaaaggtcctttggcccattttggacaaagaacacacacacattcatttattcatttatttaaaaagtggtgagtacctattatatacaaggcaaaagttggtatgttaacaatgtctattagaatatgataatgattctaaatatgaccagtccatcaattcttttatatcctagtggctggttaagttaaatgatgggcgctgtccatttaaggctcttaaaacaccctgaatcctggtaaataaaatgcactgtagttatatttttgtttccaaggctagtaagtaataacatcccattgaggtgtttagaatgccaactagtcacagctaaaggtgaaaaagtaagctggtaatataagccagatctaattttttgtctgattattgttgaacatttgacatggtatataactacataaagtacctagcagatatgcatatcaaaatgccatattaaatacatatgtattgttaataataaatagaataaaagcaagttaatgtggaaatttaattgaggaagtaattgtccacattatctgtacataactttcctattacttattaaactgaaatattgatcatttttatttcatgtgtatattttacaatatgggaaatatcatgtaagattaaatcatatattttgtgagaaaatttggaactgcggcagaattttggctttattctattttatttcaaaaaaaatttaagccatgaataatagaaaaattttaaaaatggaactaaacacatgaaatcacaattcattatttcacatttctttattttaagctcttctgttatggaattccttagtagtgttttctgttaattaaatttaggctagaaaatctaatttttcattggtatggttctacttttctgtacaagattgaagatcaaggtcaaataatttttaagaattattgttaggtaaaaacagtttttgtgatctttacatgaaaactcttgagctatttcccctcaattaaaaataatactaatatttcccatggggttataatatgatagaggcttttaaaaagtaattaaatatgttaatgagaggagaatgttttcatcttaaactgtcaggagtccacacattaataaaagagttctttttttccttttacatagacaatgacctacatttttattggcctagaagtttgagaattgttaatagtagaaaggttagtacaatgtgataccaatcaggtttcttgacacattcaggtttatacggaccaaactttcattcaattagccccttgcctttgcagccaggaacctcttgttttcagtgtcttaactaaaggacaatgaagttataaaaacaagctatgaaaaaagaaagcatcttaaaagcaaaagttttctctgatcactgtttctgttctctttattgaacacagacctgaatgcttttgtgcctctaaaggtttagaatacagccatcgggcaggtagaagaagcacaaaagcagaaaaaggaaggctctcatcttaaccatacaatcattggccaccagcacttccaggggcctctcctaggtccctgttcttttctcccatctctgagaagcaggacttcccagaaagatcactgttcctattcccatgcttttccaggcaaaacaatgccattgctttccatcaggagcccaacagaggcaaagctactctttcctatatccatcctgccctgacccactaaatgcagtgggtctgttttcttgaattgctaggttggtgatgtgaagagaatggatggaagagttcatctcttatcccttgggtaatatacttttccagtatcttcttagctattggggtggggtaaaatggacctgggattaggtgggaatgtcatagatatgagagagtttcctggaatttttaaataccgccaaggcactggtagttaagcgggctaggggtgatcaaaatttttagatctgttgtcaactcacagattcataactgcccttttcagttacccaaatatttattaatagactaatttccagattgatctatttagtggaatgaggcactcttcagttaaagggagttaagtcgagaaagactggagctgtaagtactggtggtggattccagtttggttatgctttctgatccctacctacatagttgggtaagaaagtgcatcagttagatgtgaaaaagcatgtgctgcctctccaaagtccagaagtgcttaaaaactgtgatgtatataattcagacaataagttacgtgcacaaaggagtttatcataacataaaattaaaaggtgacaatttcatcacacagttacactgctgttttcctttttttttcttttttttttggttttgtccttttttgtttcatttttcatttccatttttgtttttttatggagggttggggaagggtagagatttggtccactgaagattagtcaccctcaatgatatatatattagaaaaaatatcagcagcaagactctctggaaatagattctgtttgatgtagctagtctgtcttttctgttttgccctctttcacggcagcctctgaagttttccgcaggggagctttctccgagttggcatgtccttggccagaatccgccgctccgccgttcttgtgagtagtgtgtttttccaagtagttcagcatttcactgagaactgtttggaaagtgcttagagctgcacatattgccggagtcccaaagccatgagtgatcaaactggaaatgagaagtgataggaaaaaagaggtgaatgatttgcagtatcatgtgaaatagcaaatctctccatataattcagaacattcaattaaacaggtattcattgtgttcctaaatgatgctaagcattgtggaagatacaacacagttgaaggtattgctcttgactatgtaagaaatgtaggaccagtttggaagacttgtcgttaatagagttgatatgcactaattattatttatatatatattttattatactttaagttctagggtacatgtgcacaacgtgcaggtttgttacatatgtatacatgtgccagcttggtgtgctgcacccattaactcatcatttacgttagatgtatctcctaatgctatccctcccccctccgcccaccccatgacaggccccggtgtgtgagttccccttcctgtgtccaagtgttctcattgttcaattcccacctatgagtgagaacatgcagtgtttggttttttgtccttgcgatagtttgctcagaatgatggtttccagcttcatccatgtccctagaaaggacatgaactcatcattttttatggctgcatagtattccatggtgtatatgtgccacattttcttaatccagtctatcattgatggacatttgggttggttccaagtctttgctattgtgaatagtgccgcaataaacatacgtgtgcatgtgtcgttatagcagcatgatttataatcctttgggtatatacccagtaataggatggctgggtcaagtggtatttctagttctagatccctgaggaatcgccacactgacttccacaatggttgaactagtttacagtccccccaacagtgtaaaaatattcctatttctccacatcctgtccagcacctgttgtttcctttttaatgatcgccattctaagtggtgtgagatggtatctcattgtggttttgattgatacgcactaattattaccaagtctaaatatttaacacatgacttgattctccacctcattaagaagtagctggaaaacacacctttagattctatgtgtggaaacatcttgctttcaagaatggcatatatggcatagactacacatgaagaaatcataattggctgagtgtgcctcatggctagctgtccctctgacttcattctccttttccatagtaatgcactttaatctgggcatatggccatccagctggagactacatttccaagcttcttttgcagtgagttttggacatgggacttaacctacccacaatgtaacataaagagaagtgatacatgcaattcccacttgcttaaaagggtagctatgccctatgtagataatcgcttaggtggcagggacaaaacaagttagaaggaacctattcatctccagactcctaaatgagagagaaataaaaccctgtcttatgtaagccacccaacatttaggtcccgaaaactaactaattaactaataacaaaaactaataagcaaatataaggaatgttatggtaacctcagcataggtagttcttccaaccacgacaaatgtcatctttggttgaacaaacacataactgtagatttagtcttcttgtgaacagaagctacccagattgttcacttatgttaactgtcccgaagtgacactaccagtttgcttcctacgtctcataataatatagaaaaacatccttgtcacatagtatgcccatgttataatatatatatatatacaacattgtgcatatgtgtatagtacatttaataaagccattaactgctaaagtcctagcttgtaactgttattatgacattagtagtttttgaatcagatataccacccttcataatattttagctacctatagttttctttcttaagttacataatctttaacagcaaaaataataatattttataataatacaaatgaaggatttggggtttaaggcagcctattaatatgcctcagtggaggtaatagtaagatctaccatgtggggttgttgtttttattagtctacgcaaagggctcagaaggatgcagatctaaacaaagtcttagataaatgatagagattgttggctgggtatattttctgggtagagggtaaaatttctgcatgtccctcattattccataggttgttaccatctttcttccctgagcctccatcatagttaacatatattaaaaagaaaaaaaaattcccatctctgattatgtgggaaacaacaatggccaatgcttgggcaattatctgcaccaaagtttgtggtgtaagacatcatcactgctcaactactatatccacacctctgctacaaggtcttgcattgccaaacaggaaaaataatttaagctctatttctacaatgagacaactagaggggaagccaaataatttgaaatctatctgggatcttggacaacaaatggaattgttggagtggtggaagaattaatcatggtgatacccacaaaaagaactgggtaaagccaaccattaatgtccagatatttgaccccaggcacaaactgtctcttttctcatgttttattcctgtttagagctcctttttaaattttcttctatattggcatgtcctctttgttgtgactcacctcttcatctatagcagaatatacaatattatttagtttcacagggtattattgaagttaatatctaatttttgagttctgaacatatgtcaagtcctgttctaagttttttatctgtatcacttcatataattctagttacaacactaagaactagataatattatttccattttacagacgaagaactgagtcccagagaagttaaataatttgcctgagaaattggatattctgtacttatgttcctcccaggctgagggtacatttttctctgagaaatcacattttctgtgggcagttttagctcagttcctctgacttaactttgtacttgggcagccttgatggctggtaaaatcagatgctttttactcactttcctgcctaagagcagggtttttaaaaatcaagcacaggtaggtagttatatataaatgcttttattatccactttgagaaaagagctgtttccatatttaaagattcctcttaagctggtatcacttcttgactgatgggctttcttgttccaaaatatggatctgatcattagcagtctgcattgtcatctttgccttggattgagaaccaagtgtaccaagtcctcacactggctttgacgtcaggcacttcgtgatttggaggaagttatttagccttgtaaaatgacagtagtctaacaagaacatctgctaggttctttccaactctaagcttcaatttaagagtataacatctttatggtgttattaaaatcaaggacatggacacaggttatggaagttgaaaaaccacttcagggctgggcgcagtggctcatgcctgtaatcccagcactttgggaggccaaggcaggtagaccacaaggtcaggagtttgagaccagcctgagcaactggtgaaaccctgtctctactaaaaatacaaaaaaaaaattagccgggtgtggtggtgcatgcctgtaatcccagctactcaggaggctgaggcaggagaaccgcttgaacccaggaggcagaggcaagatcgtgctattgcattccagcctgggcaacagagggagactttgtctcaaaaaaaaaaaaaaaaagccacttcgttcaacaaagaactctaaaatcaattgaaggatattcaatataaaaaaaagtcattttgactttcatgacctgaaaggtcatctttcaatatgaaaaacattatgtaaattttgttaattacctaatttaacattacctgcatattaaaaatatgcatagcacactgcacagaatgataataaatgtaaggcaaagattcttttctagcagttttcagtgaaatttatgaaccccaaataattaaagtaatctaatgtactacaataatgtaaaaagaagtgtgcaatcacagtatgttttaaaaagttctgggaacatcatgctattcttttagccccagtcatccagaaaaataggtgtgtatctcattcacagtgacatacagaaaaggagggggctgggttcagtggctcatgcctgtaatctcagagccttgagatgccaatgtggcaggatcacttaagcccaggaacctgagagtacaaagagctacgattgcaccattgcactccaggctgggcaacaaagcaagtctctatctcaaaagaaaaaaaaaaaaagggagagaaaaaagaaaaggagagaggaataatgtagaatctccaaaaaaaaaaaaaaaagaaaattagaaatagaaggtctgacttttgatcctagacaggaaaaaaaaaaaaaaaataagactaaggtcacctgcaaggtaacgaactatagtcaaatcttcaaactctttgacaatagagatgattttcaactttggaaaatatttttcagttacaggtttgatatttaagttacccttggcatttgcatataatttcaccagattactgatgagagcgcatttcacatgcaaatatcaccagggttaaatggcccatgatggtttgaaataggcagtcaaaatatagaagttacttaaattctaaattctaaaactctatcctcaatgaggccctggagacaacttgcattgtgttagataagtcatgtctatgctacatttgtaaaagaacagtgactatagaggattcacaggtcatatcagttttcttaatgtttcctaggttgccttccttcaccctatgtaatcacgtgctctattaccttatttttgcaaagtttatctcaagcttatctctttttaatacccaaacatgaccgttattcctatttctgtgtgtttgtgtgtcctccctctctcagccaattgaaattccactcaaagaaactcacaatttctttgatgatactgatgaaaaagggattagtttcctcatgcctgaaaaacaggtgtgttacttccaaaggatagaaacttgccaaagtgatgagaggacttaaataaaattcctgggagaaagaagtaacaatccccaaacaaatgtaaaactatagcacagaggggacaatgggaagaaaacaggtgaggctaaactctctgtcacaaagtgaggaagaggaatgggaataacattggtagcatcagagcaaaactgacaatccaggtatatcagatttttactacaagtggtaaatcatgttcctcaacataataaagaccatatatgacaagcctacagctaacatcatactcaatagtgaaaagctgaaaacttttcttctaagatcaggaacaagaagacggtgcccactcttaccacttttattactattttacatagtactggcagtcctagacagaactattaggcaacagaaagaaataaaaagcatccaaatcagaaaggaaaaagttcaattgtttctgtttgcagatgatatgattttagaaaatcctgaagactctgtgaaaaactgttataataaatgaattcaataaagttgcatgatacaaaaatcagttgcatttctaagcagtaccagtgaactatgtgaaaaattaagaaagaaattaagaaagcaggccgggcacggtggctcacgcctgtaatcccagcactttgggaggccgaggcgggtggatcatgaggtcaggagatcgagaccatcctggctaacaaggtgaaaccccatctctactaaaaatacaaaaaattagccaggcgcggtggcgggcacctgtagtcccagctactcgggaggctgaggcaggagaatggcgtgaacccgggaagcggagcttgcagtgagccgagattgcgccactgcagtccgcagtccggcctgggcgacagagcgagactccgtctcaaaaaaaaaaaaaaaaaaaaaaaaagaaagcaatctcatggtatcaaaaggaataaatagtatcaaaaagaataaaatacttaggaataaatttaaccacagaggattaaagatctgtatactaacaattataagacactaatgaaagaaattaaagaaggcacgaatgaatggaaagcgataacctgtgttcatggattggaagcattaatttttttaaatgtccatactaaaaccaatctatggattcagtgcaacccctaccaaaatttaaacagcattttcacacaaataggaaaaacaacactaaaattcattgggaaccatgaaagaccctaaatagccaaagcaatcttgagaaacaagaacaaagatgaaaatatcatgctactgatttcagattatattacaaagctatagtaatcaaaacagtatagtactggcataaaaacagacacatagaccaatggaacagaacgagtctagaaacaaaccctcatatatgtagtaagctaatctttgacaagatcttaatgaatacacaatgggaaaaggatggtctcttcaataaatggttctagaaaaactgagtatccacatgcaaaaaagtaaaattggatccttatcttacaccatacaccatacacagaaatgaacttgaaattgattaaaaactgaaacataataaaagaccaaaactataaagctcctagaaggaaaaatatttttggcattggtcttggctttattttttggacatgacacctaaagcacaggcaacaaaaccaaaaatagggaaatgggattaggtcaaatgaaaaacacttctgcacagtaaaggcaacaatcacaaaatgaaaaggcaacccatggaatgggagaaaatattagcaaaccatacatttggtacaaaaattagtatctaaaatatataaggagctcatgcaactcaataggaaaaaaaaaacaaataacctgatattaaaaatgggcttaggacacaaacatacagttttccaaagatgacatacaaatggatagtaagtatatgaacagatgctaaacatcactaatcagtgatacacaaattaaaactacaatgagatatcacttcacatttgttaggatggctattttcaaaaagctgagaaataagtggtggtgagggtgtagataaaagttaaccctgcacactgttggtggaaaagcaaactggcgcagccattatgcaaaacactatgaaagttcctcaaaaacttaaacattagaatgacaacatgatcctgcaatcccatttctggttatatatctaaaggaaatgaaaccagtatctgaaagagatatctaaactccatgttcattgcagcattatttctaatagtcaagatgtatataaaattatttagccataacaaagaaggcaattttgccattttgacaacatgaatgaatctggaagacattatgctaactgaaataacccagacacagaaagacaaatactgtatggtgtcatttatatgtgaaatctaaaaaagccaaaccataaaaacagagtagagggtggttgtcagaggctaagaagtgacagaaatggggcgatgttggtcaaaaggtacaaactttcagtaataagatgaataagttctggggatctactgtatagcatggtggctatagttaagaataatgcattatatatttgaaaattatatatattcaagatataattaagagagtatatcttaagtgttgtcaccacacacacccaaaatgtaactatgtgaggtgatggatgtattaacttgattgttgtgatcatttcacaatatatatcaaatcatcatatcctgcatcttaaatatattttatttgtatttgtcaattatacctcaataaagctggtaagaaaataaacaggtctgagatggaaaactattattatcaatgcatacttcacctgacattatctgccagcagttaggtattagtcacctccaggaggcgtctagcctggggaagaaggagtggggacaccagtttctgcagtgatattttttccttaaacagttttatttacgtttattttaattacaatactaattcctttatttttatttttatagattaaagggatataaatgtagtttcattgcatggatatattgcacagcagcgtatgtaataattgaattaatgaatagctaaatgtttcttggtttcatttgggaatctttgatgcccagatttgtagggttttgtttcaaagttttgttccaagaatgagaaaaaggaatagtgcagataggcctaatgtttgcagggaagagtattctgttagcatatgaaagattaaataattctttgctttcttttcagagctcaatctttaaagctggcaatagtataataaataaaattgagacctttttttaagtctagaaatcacctatttatggacaaagaaaacacaagcacatgtttcagagacaatgaagttgttaggtaatctttaatctttgagaaatcctggaagatgggacataaagtagtacaattaaacagagagacatgccttaatagttaaagcaggaggaaaaaagattttagaaactctgggttattaaattatatttaattagtctaacacatttctgtaatgggatattttcaaaatttgaatttatcaagattgaatttgcatatagtaatatttactcttttcaggcttacagttggttgaaatttaacaagcccacacagtggtgtaactaccaccattacccaaaaagcttctcgtgtgtttgccagtcaattcactctcccaagccccagctcctggcaatcactgctctcatttttgttcctataattttcacgtttccccagagtttcatataaactgaatcatgaagtctatagactttcatgactggcttctttcatttagtataataattttcagattcatttatgttgtatttatcaatatattgtttctttttattgctggtaagtattccattgaatggatttatgacaatttgttcacaatggattattaaaaagctgaagtgttagtatttaaaaagtagaagtaatcactgaaatgctgcatggatttagtaagatatgtaataaagtaagtgtatttccttttataaatgagttattagagcagtagcaatataattgagtgcaggatttcagcaatgcatctgacaaagtctccccacatactgtaagaaaagttggaggggaggaggaaggtaagctagataacagcaaagtaagggaaattcacagctggttgtacaatgacacccaaagtgtggatgtaagggcagttgtcaaccttgaaagatgtctcttgtggagtgctgcaaggctgtcattaatcccactctgctggacacattaattaacaatgtgattgaaggcatcatagatttttagcttaatggctggtattaaaataaagaggaaagtttctgcattgtataacagaaccaaagttctgaaaaaccttagtgtgatagacagcttaattgttgggccaaaatcaatgataggaaatttaggggagattaaggaaaacatgtccacttgggtaaaaagcaaattagtgtcgcaatatactaagaagaagatctgactgaagggctattcataggaaagagctttacgaaatcagtaaagtctaaactaaaaaggcaaaggtcaaaatttgaggtttggagcatagctaggcggacttagagactgcatctaccttggactatattctcattcattttctctttctttctctctctctgtctctctctgtctctaactagattacagctcattgatttcattttcctattactaatttcacactgaggagcagaaaggctctgacaactgactgtgaacaataccatcacctgctgagaaaactcagactagtgtagtttatggcacctgatgttagggaaaatgtaacttatatttaacagtcatcttcctaattttattcatggttttaaaagctcctattttgctagacctcccaattaacattctctaaagcacctttcttgcaacataaaccatctcctcaaattggctcagttcaggaaggaggtaactgtttactgaattcagaggtgaagctctacttttccgttttcctcttaagtgtcaggtttcttccctaagtgtttacatttcaatgatttgaagaataccactgggtagagtagccattcctagggagattttgcactcgtgtgtgtagtgtgtttgtgtgtatgtgtatgcatatatgtgtgaaagagagagaaagagtgtgtgtgcacctgtggacttgtaaaatggcatcttcttcttgaccagtggccttgacctgaatgttttactgatatagtctataactttttacatggaaatgtattgcaaccattcaaactgtattctcttaacagtgggtgtcaaaactatagaaactgaggctcacaaatgaaagagaagaggtagaatagaggatggaagaaaagagactgctgttggaaagaaaatacactttaatcctttcttctttttccctgtgtggttttactaataaggtggtagcaacaatccatttttaacttggacagtgtttatacttagaaattgcttgacattaatgatgaggacctatcagaaaattccatataataggaatttcacaaacttctctttgcaccttataatccctggttaagtgcatttcttgctcatggtcaaggccttacctacatttatctttaaaatctccaaagcttcagttcttacttagaatgtaagctagtataggaatctgaatgttagaggaataagagctattttactttctctaatctaagtaagtatagtttacatttcactagcttaattgtatgctagataaatgctacaaagctgtgtccatattattctaattgtccttcaaaaatgctttatctttactttaattgatttgtctaaactaatttaaattagaccagtaaagcaattttctaaaacatagactgaagcaaccttctatggaatcctctcctgaattcttcctatcttggcaagagttgcgcctggtatccagcacctttctacctactaagcaaacactgattcaatatgtgttataaaggaaatgaaagtctctttagtatttgtcactgaagattagatcactcagttgtgtctgccaaccatagataaatttttctagctttcttttggggtacaaaaagctggaggtaatagacactatcatgctacaaactagaagactgaaaatcaagagaaaatagcctgccatcatcatttaagcaatttgactaaaagctaatttcattttgtaaagtttcaactttttacctgaaaaagcaagcaagcttttttctccctcacctttttttttttggtgtgtgtgaaggttgaaatggtgtttgggttattattcctattattttgttatgttgcattatttcaatgggtgtttactatcactaatctttttatttctagaattgcatactgatgtcactcagttctgcttttagccctctgggaaggatgcaaacagtaagatttaaatggaagacaaatctccttttcctttcctctaagattattcagttaccacaggcttaggtccaagtgcagtctataatctcactacagtgttaggtggctactagataagtgccttctactcatgagaacagccagtagagagggagtctggggaacagaccctcaacaacaacagcaaagaattgtaggtcttctccgcccaaccttacttcctctcacggctctgagtattagacactttatctctaaagcagcacaacttctaaatgtaggccatggagagagacccttaccatggggcatgtaactgggtcttatcctccagaactcaatggcatctattctctgtagcctaaatgattcagaaagcagatgaaaggtgaaaccagttgatgatgcttattttctacatagattatcttatctcatggtcccaagtacttttaaaatggaatttaattaagatacacaattaaagtatctagttctctggtggtgaagaatcattgacatcaactcattaagcaaaaccttgacaacactctcaaatgttctgtggtttcttcagttggtggttctcaaccctagatgcatagaagaaatcactcacaaagcttatttcaaaaatagtaatgtatgtgtcccaccccaaagaccctgatttaattggtttgggatgaatccaaagcatcagtattttttaaacaaccctcattccatttaaatgcagagaaaaaaatcagtatgtctccttacaaccaagaaataatgcctaactattatgtctgcattcctccttgggaaaaagaggatgataaacttctgcagcatttcccacaagaccttctgcggaatcttagttttatgtaatgttaatatgtactctgagatttaaaaacagttttcatgatcaagttttagaaactgtggctaggtattacctcctttcaaaaagggttctgggagtctttggtatgccaatatgcattgtcatacttcaagataggtataataattagggtttctttaaccaaaaaaacacttggccatgaaacgctttcagagagcatctcataggactgactagtgctctatgaaactcaatttggggaagtatgtttatgactaccctgaatctctgtcagattgggagatgtgtgctcatccactgccctaaagtcacattccttctgttctcctcagccacttactttgaggtcccaaaggggaatgaatgggtccttgtgactccattttacctcagttcagctcattagcaaagcaggctaaaataaaaatcattgcacatacattagaagagactacaatcaattacatccaagtcagcttcttgaaagtgataacatttgatgcctgcaccataatttttacatatgagaatggagatttttataggggtacattaaccatcttgttacatttctccctatcagatgtattttctgtttggaatagaggaatgaaaatgctaagctttttaaaatgaattttatcgaactgttgatgttttaagatgagcaagttgagaaaacataaaaagcagatatgagatgatatagaaactcagcataagtaatgatttaaaatgaatcagtaaattcagaatggagtaaaatattattggtctaaaaagaaccttagagatcacccagcttaactgcattgactcatgaacatgcagaggtcacacgggtgcaatgcctattctaaatccacacatctagctggtaaccaagtggagactgagttagatcccctgacaattaattccaagtgcttcccaccatgccatattgtctctctgtggatttctctccagtcaatagctcaacaaagatagacaatatttaaataaaaattaaccaaactcttccacaatgtatgtgttccccaaagccaattattcacacatgtagttattacagggtcatgtttgcaacttttaattagaaacaattacctctggcttctattgttttaaccactagtctcttatgtgctaaatctaaaaatccataaaaattcatcaaaagccctgccatggatgctttaatgtatgtgtctcctgacaaagattcattgcttgagtaaactttaggcaggcttctgaaccttctcctaggcccatctttgcatttccttgtaaaaatccagttttagcaaggaagatctcccctaactcatatctgctaacccttgcttttgagattacagatttaattgaaatttcattgtttcttttctcacactaaagaatgcttggtgaagaaaactgcccgccgttgatgaccttcccagccacttttccatctcaagaaaatttaacaaaataaaaacaaaaaacaaaaactatgcacactttaggcttcttggagaaaactaaacatgctcacatttaagtagagacaaatatctgctcttcagcgtgttgccaagaatagagcaatcagaaaataccagttgagttgactgtaaggcatgtcacatgtggaaccctgaaggaaatgggaatgaataacccttgaagagaaaactagggaagacatgagaactgcctttagaaagtgggagggaaccaggatgaaagtaactctgtaaagcccacaagaagtgggacattgggaaatggaaggaaggcatttctaatagagttgtcaaagatagagagcagtctattattgagagtttccaagcttgagatggatgataacttgacagagacgttggagagaaggtctaaatattgaaggagagtaggaaatgttaggggccttccaacactgagaatcaatgaagaaaatttaatcaccagcaagcacacaaatgtctgggactgtctatacattccttatttcccaaggcagtagtaagagggtatatttctaagaaggtaggctgtcaggataatttatgagttaaataggagaattaagcacattgatcattttacttccctagtccatcgtccaattaaaacatcatggccctgagaatgaaccagtggagaatatacacaggacccaattgagatattattataatctacatttatttacatatatttattgcatacatactattcgctatgtactatggataaaaagatgaaatttccttatttccccaggaaaaattaccagtatgcttaatcttctattgtagcatcactcttgtatattataagtttatatatttatatatataattatatatattctatatatataattatatatattctatatatatagaataattatatatattctatatatatagaataattatatatattctatatatagaataattatatatattctatatatatagaataattatatatattctatatatatagaataattatatatattctatatatatagaataattatatatattctatatatatagaataattatatatattctatatatatagaataattatatatattctatatatatagaataattatatgtattctatatatatagaataattatatgtattctatatatagaataattatatatattatatatatatagaataattatatatattatatatatatagaataagtatatatattctatatatattctatatagagagaataattatatattctatatatagaataattacatgtattctatatatagaataattacatatattctctatatagatatatatatctatagagaatatagagaatatagagaatatctatatagagagatatacatattctgtatatatagaataattatatatataattattctccactttagaagttctaaagaatgggataatcctctagtcatcttttcactacctgccattaacatagtagaaacaataaataataattctactagaaataacgcaaacaacaaaacttcagcctcccaaggtacatgctgagaaaaaaagttttctcatcttttggacagggtgtcttccctggactgagccttcaagatagtctaatttcttactacactgtcaaatgtgcttttgcttgacttcagattcaaggagattatgagaacataagagaccaacaggggaaaattttaagatttcctgaaatctcaaagaggggaattcctaacatttcaaaaaagttagggctctgggtttccatctgagctgaggctactctgaccgtgaaaccccatgccaccttgttctaatgccaccactattcccaggaactgtgagtctatggggtcttctgcagatgtcaatcaaatcttttcccccttctcgtttgtgttgtggtgtctgctgtgttctctacaacaatacacactgttgatggtactcagtaaattataaataatgaataagtctgccttctgtcattttgatggaaacaagaagctttccaggctgtgaattgtgagaagggtcactgctatgcatacggcttcccagaacacactgatatgtcaactgccatggaaaactagaagtagttatttgtgctttgtctggacatattaaatctgctgaaagtaagccacagttctcaaggcaccaaatcagccaacctataaggtatacttttaagtggtctgcattaggaaggaggtttaactaaatagaatagtaacacaagttgatggtgttaattagagtattctttatgcctatctaattacactccctcttcacttctttcccagccagcattcagtaaaaatggtggaaaatcacactctgacaattgtctgctttcaaagtcagatgtgatatgtctccttcgtaattcatctttctcttgagctaatggttctatcgaaattacagttgtcactgtcagcggaaaattttaaaagggacacactcggcctggtacagttgctcacatgcctgtaatccagcactttaggaggccaaggtgggcagactgcttgagcctacaaagctgaaacaagcctgggcaacatggtgaaaccctatctctataaaaaatacaaaaacatagccaagcatggtggcacatgcctgtagtctcaagaatcacctgagtccaggaagtctagggtacgtgagacatgattgagccactgcactccaacctaggtaacagattgagaacctctctcacaaaaaataaaataaaataaaaataaaaaagacatgctgtatgctaacacatgtttacccagattattagtagaatcatcaatgtagaatatttttatttttaattttaaaacttttggtagagatggagtctctttatgttgcacagcctggtcttgaagtcttggcctcaagtgatcctttcacctcgggctcccagtagaatgtttttaatatattagtatacaatacaaaacttgatagaattctcagtaacactttaaaaaggaattggagtttttcttctcccaaagggggaaaaaaagcttatagttacggaatatcgtagaactgtggttcttaaacctacctatcagaatcaacttgagagttttaaaaataacatagatacctgagtccagccctagaactactgaatcaaatctttaaatattaaatatgtcctccaatccttgagttttttttttttttttacagtttcaagagcgattctgatataaagccaggtttaagaaatatacttgtaaagagcagagtatatttcaaggctaagcaacaagctgacttttgctatcctattgttaacatattctgttgatgcctttttaaataaatgtgcagtaaagaaattacacacatttaaattcagtctacatcaggaaccttcactttgggtttcaattggaaatgccaatcatgtatcttttgtttaaaatgataaaatttaagacatgcaatggaatgaacttggaccctcaccttgcaacataaacaaaaattaactcaaaatgaatcaaagaccaaaacaagacatacggctgtaaaactgttagaagaaaaaatacaggaaagctttactgcattgtatttaacaaagatttcctggatttgacaccaaaagcacaggcaacaaaggtaaaaaataaacaaattaaacgacatcaaaatttaaaactatgtaccaaagacacaatcaacagactaataaagaaatgtacagaatggaaaaaatttgcaaattatacatctaagaagaggttactatctagactatataaaaacctccagcttaataaaaaaaaataacctggtcaaaaagtgggcaaagaacttaaacattttttcaaagatgatgtagaaatggctaagaagcatatgaaaagatgttcaacatcactaatcattagagaagtgcaaatcaacaatgaaatatcacctcatacccattaggatggctactatttggtgaagatatggagaaatagacaccccgtacattattgtgaaaatgtaaaatggtatagctgctatggaaaatggtagaataggccctcaaaaaatgacaaataaaatttccatatcatccagcaatttgacttctgggtgtatatccaaaagaactgaaaccaggattttgaagagatattttcacacccatgttcatagcagcactagtcatgatagtcaagaagtggatgcaacccaattgccatcaatgaatgaatcgataaaatgtggcatatataggcacatacacacttacacacacacacacacatacacacacacagaaatattgtgcatccttaaaaggaagaaaattttgacacatgctatgacatggatgaacatggaagacattacactaagtgaaataagccagttacaaaaaggcaaatactgtatgattcttcttatatgagatgtctagggtagttaaattcacagaaacacaaaacagaatggtagttgacagaggctggggagaggagaagaatgggagttgtttaatgggtacagaggcagttttacaaaataaaaaagttgtggagattggttatacaacaatgagaatatgcttgacactacagaattgattagaaatggttaagatggcaaattttatgttatgtatttttaatcacagtttaagaaaaagatatagtaggaaatttgctataaagaaatctttggttatgcgatttgtatcatcctactacttttggtatgaaatcagaagattttatctacataaataattttgactacaattaaagaaaaataacaattctggcaaacatttaaaaatcataataaatgggaaatcataactttctaatattcaaaatattcaatatataaataatatcaacattttatagatgatactattgtaagtaaatatatagtgttagaaagttttaagatatggttatgcatgaaattgtgattaagaaactgaagccatatataatcttgtgagttttatacctccaatataatctcactttctttttcactaggggtgagggtggccatttaccatatatttagctgcactctgagtaacaccagcttgttcccatattctgtatggggaggtaaataagagcatataaagcccacaaagaaaatgctcagctcatgttttgaagtgagttttctctaaagagttctgtggcactaagttggcaactgactaatgtattgacaaatcagcaagttgtgcctatgctaaggaaacaaatgttttgcctatttatttcacactgtagctgatgtttgactggtgctctattttgttttgagcataaaaaggatggcttactatctgatgaaggcctcagcatctgtaattggaaataatctagcatacatgacagagtctcatttctctgtactttaatagtatgctccttctcagagtaaaattgtcatttaacacacttctttaaatccggaatcaaacctcaatgaaaattaagttctgagttgatcttttgtaaaaattataaatccttttattatgcgcacaaacaaaaatgtgaaaaatatttgtgtagatgtaatgctggagacaaatttaaacttggatcggtggtgaaggtaaatgatacgtcatttactaaatgcttcctttacattctttatctcattttagctcacctatgaccatataatgaaggggctcttatcccatttgaagctgaggaaataaaggtttggaatgagtgggtaagttaccccaaacaacccagcttacatatataagggctcacagatacaaggatttgaaaaggttttgactccaaaaccttttgctcatagcatctgggctttttattttcccccagttttattacacttctatcactagctcagttgagtgataggagagaagtcctgtgaaatatatcctacattttgtgcatttttggaagataaatcctaagttgagtcttcagagatgtgtgtctattacatcttgaggaaacttgtgacatattgtaaaatagaatattctatttaacagtctctgatgttgcagcctaaatttcaacttatttaaacacttgttattttatataatgaagtgccctcctcaacagctttacaatttttgacaggtattgaaagcattttaatatttaatgtgtattagtctttccttatcattgtttaactaaatgataataacttagaaaggatacaatatgcctatcatgtaggcattaaaattctagagttttaaaaatgtaaggcacctgagtaattacatgttctttctcacttccatatggggcacaaactaaccagataaatattttcttcattccaaaaacacatcagaaaatgaaatttaaaatatgcttccaataatacatttcttttttaaattttattattattatactttaagttttagggtacatgtgcacaatgtgcaggctagttacatatgactccaataatacatttcatgctcttgtgtggtctaacttaagaaccatttgcagtttctaattgcatcaaaatttttaacatacttctggaaaaccagtcagtgatatcctgttaatttctgtcacggcatctttccattaaacaattgtgtcaccaagataaaaaacaatttaaaagatttcagaaccctcatccaaaagtgctaagtattatttgaaataatattgttcatttttgtaaagtaatgatttcctaacaatgcataaagatataaaattttccaatctaaaatgcttcatgcattgttattctctcaatttgattttacaagcttggaattttaaaaaattcagtcaatcactgctatggttgaatatgtgtgtcccctccaccccactccaaattcatatactgaaacctaatctccaatgcaatagtattaaatagagtctttaggaggtgattagcttatgagggcagaaccctcatgaataggattagtgcccttataaaagagcccaggggatcttgtttggccctttcatcatgtgggagaaaatggagacggtgccatctctgaagcaaagagcaagcctttgtctaattaactctgccggcaccttaatctcagacttcccaggcctccaaactgtaaaaaatatatttctgttgtttataaattacccagtctaaggtattttgttatagcccatctgaaaggactaggacagtcaccatataaacatataagtggtatctctaaatagaactgtgataggaatacaagcatctgggttagtaaagaatttgagcaaactggaaaaccagtcttacctgaaatgtgttaaatgtctctggatgtcaaggtctagaattggagtgggtctggaggatcccagtggtgatctatcttggctcaagaggtcttggaattctttacagatttgtctaaaataaaagaatcaaatttaaaattgaaattttcaaattgagctttaatttcatcccatgatatttaaccaaaggcttgttctctcttttaaaagaagtctagataacatttcataaagcaacctcaaaagttccattcatagcatacagttgagtttcataatggtgactttgctctcaacggctataggataatcatacaacatttcaaacaaataacaatccatgagcactgataagaccaatgtttatttttaagatgactattcataaattaacctcaggataaggggaaccccatatgaaatgatcactatgatctttttaattgaaatgtgattttttaagacataatatctgtaaacaaatttaattaaagttacagtcttacttcagagccattattcaaacagactttggaaaatccttttttcccaatattgcattagagttcatattcttatgagctaactttatatgctaatatttgaagcagataatcaccagtaatttagttcactagcctcacaaaaaatggttatattatgttccatgtaagccaatttcttgcaaaaattaccctcaaggtaacttttctgctgcatttctttgctttaaatggttatggtttttggtcattggtttcagtttaattacagtgttacaatgtaacagtaaagactttgtgatgtacactccaaatgatataattctaaagaagcagaatacactatacaaagagatattgtttttgtttttgtattttaacaacaaaacactaaattagtccagtctctgaaaagtaaaggattgccaaagaattgcttaaaaacatccatcatctaaagtgaggtgactccataaatcaagggataatatgacagtaattaggttttttgtctgtttttacaatgggcagtcgcaaaaatgtaataatgtagccctgactttgattatcaatgtaaacaaagacaggtatagaagtgtcaaattatttcaagtgaatatgaacccggccattattctgctgcaaggcatttgtgtcatcaacaaatgactaccaaaaagtgacaaaatatcttgaagtacaaataattgatcactgagttaaaaatcagtggggacttcttaatcaggtatctaaaatttattgaattccatcaaagatcacttatgatattttaaatgaacaatgagggtctggtttaatgccagtgttcaaatattgtgtcatttcacagaaattgccttattcatgtttgcagaacacaggtgaaagtaaaaaggagtcagagataggaaaaacaaagtccttatctgcttcagtgaaataagatacttcacatccccttcctaaagggccagttggatctctgagatacagcatctgaatacatgcttttaacaactgtgtgtttctactttcattcagacagtttcttctgaactcctcacattttctgttgtgagactcagttgctttatgaaatatacctgttttcaggtgtattgcccatattttaatcaatgaatgcaacttaatctaagtgtttggtgccattttgaggagtatatcataatcttttgtgctttgtgttatttaatatagatttgttgtctttgtttatggaaatttctaactaaaattttaaatttagcctcatgctatcatttccaaattactgtatggtaggtcatcattacgatccattcttacaaagaaagattggtgttgtttttagacttttgtttttagcagtcttttagtttttctatcagattaaaataaattttaaaacattaaaataaagattgaaacattagttattgtggcataatatcagaattaattggataatggaataaacttttaagttgacaaatcaactttgttcctgtatgaataatacagcaagttataataaaattgacgaagaaattagagaaagctaaagaggtggaaaaatttaactcatgctaaataattcacacaggaggatctaccaggagtaatattatattatattatatctcccccttttatatttaattctacagcttaactcactcactttcaagcttagacttgaaaacagatgacaatcctgtagattccctgtaggcaattatcatcatcatctcattatggcacttacagaattatgattttatgactactttccttcttatttaattttttatttataaatctacaaaaagaaacaatcttacatctcaaggcaaaatgtcatattatgaattatgtaacacaagatgatcttcagtgaatcatacattctaactttatcacttacatcattgtccttaaggacgtaagtttttagctgatgtctgaaatccaaattctatgtttcacccttagatgattaacagtatggtaacactaaaagttgttaactattctgctttaccttaatgcagatcaaatgttagacatatttagttctaaattcaatcaaaaggtttaaatatgttttctattaaccaaataaacacgttttgtctgattcatttttagaattcaaaaaatgtttcagtttctattctttcgcctaaataaatgtctaaattacacaaaatatttaatcaacaaaacactggaaataaggtggcatgagaagactaatgacacttaattaataggccctttatacaattgtatacttggcaatatacttaaagacaactgaatctgtaatccatggaggtaaaaaagaaatatgtaggccaatctgacaatgtagattagcaattggatctctcattcaataaattttagatttcatatatattttttataatgttgtccaagtcttatgaataaaggtgaactgaccaggatgtaatgaatatccatataggctacttaatattaacttttaccattttaattgatgaaaatacctcatgctttaccattggtgtaaaattagaaacttctcagaacacatgttgggtccattcatatgttgcacaaaaagggtattatttccacacattccctagtttatctagttatagtgattactggttatattacgtatgtttgctatgactggagtctctgatttttatttcacatagtccaataagaagataggatgcatataagtaacaaaaataaaaaattataaagctgtattataattttcaggtgtttattcctatttactcttctgtaagataagttaattgaaatgagtggattcaattcttgcttgacatttaatggtctgcaaatgtgcagctatgagcagacagataaaataaaattacatgttctcacaatgtttaatgaaatcaaagttcaaaatatcacctaaaataatgtatgttacttagatcccaggtaaaaggaaaatactactacctggtcaaatacgctacccgaaaatagatgtctcagtataattttgacaaatatggatgcatttcttctagcatttctcccgcaaattcttctagcatttacttctattaaaacacaatctcggtgccaatttgaatgtgcttggagactgctgcacacttcaacagaatgatgggaatctccaagaaaataggaattgtatttattgcattgatgatggtagtggtgaatacttccaaaaccattcctgggggaaggaggacaagatgaagtgtttctctggattaaggagtgaaggtctttgaatatgcatgataaaaccacaaccaagtcattttgatgtaggaaaaatgaaggtgctttctcttggaaatttgtattttgggacaacagtaaaattcacatggatatgtgcattggtaaacctgcatgatcctgccagctaggatgatatgctatggaaacacctgggagatattacctaaattctagtactgtataattctcttgatctgtaacaagtctttatctttctcctacggtaatgcaaaggattcaaactaactatatgtgctttcagctccttttggagaaactgaaatatgactgaaattatttggaaaaaaaatttagtcaataagttatttggaaaaggaaatgagtacatggtaaagataaagactcccagaagacaaaatatgcaaaaggttcagatttaggtcttttctactagcaagttttcaggggcttccacttcacaaaatttattcccagattttaagtccaacttttatacctgccttataagtttctttctctatctcttgatcttcatactctctttctgctattcccttcctcttaatcttgttttgctttttctctattccttctgccaccaacttttgcttttcttctctttgggacaagatgagataatctagtactttcagaacagcaatagataaatataatcctaagtccaaacagtgccagccacagcaagtgtgtaaacttcaattaagggactcaagtgtcttggacaaacctgtgagatggcaagtatcccatatactccttaaatttgtaaaaagtcctatgttacataagaagctggtagaaaagagaatatttagttttggttttatgcattttgagccaatttaaatctcagccagtatgttgtaaaggcattaaataattacttgttatcagtttctaagaagtgatgtttttaatactctctgccctagattttctcttaaaaagttttccctaaggctgggcatagtggctgatgcctgtaatcctagccctttgggaggccaaggagtgcagattgcttgaacccaggagtttgagaccagcctgggcaacatggcaaaaatgcatctttataaaaaatacaaaaaccaggtgggtgtgctggctcatgcctgtagtctcagctactcgggaggctgaggtgggaggatcacatgaacctggggagggtgagtctgtagtgagccatgatcgcaccactgtactccagtctgggtgacagagtgagactctgtctcaaacaaacaaacaaacaaacaaacaaaatacttttccctgaataaaaaattagttcataaatgacagtttaaccagctgaaactatcagttctaaaatcttaatatagaattaaaaattatttaagattcttaatggcctatatgtatcaataacttatttcaataatgagaggataacaagaattggttactaccagaaggattttcctctaaaacttttgaacgtaacctgcagtgctatctgcggttctgctggatttttacacaataaatggtagtattcccactaattatcgacgaactttcaagtgtcaaggaatttataagtcatcttatgcaagcttccccctttcctattgtattgtcaaatttgtctacatcgttttcctcattattttaatttgcattttaattgggctttttacaatttccagaagctttgaaatacattataccttaaaaaaaaaagacaataacactatgaggcagtacaaggatgatttacttactcatacacaagagaggatggggacactcatggtgatccttggtcccagaggtctccctggtacctctcaccaacgtgtgacctcatcttctgtcacattccccaaacatttatggtgttttgagattttaccctcatttattaaggcaaaatgagtgccttagaccaaattacatagcaaccaaagacatatttgcctgggatctacatttcctaaacatgtttttctccaagggatttctgcatattctggagaagttttccaagaactttcatcagtttcaatgacagccttatcactaatcaagggcagtttgtaaaccttgcctgggcaccaaagggtagaaagtccttgtttaatatatctagctgcttgtgtgtgagaccttccttgttttagagaacgggtgccttctagactgttttcctcatttcaaagaaaatgaaaaaaaaatactgaagatgaaagcacacagaggtttccccattctgcttacttggtcgccaggatcatcttttttcttgctgtctgttctttctgttccatatgttgtctggcaagatgttctcctactgctttggctggaaactctgtttcacaagtgtagccaaaatcccgagccaagtgcaaagcctcccctgttggcagataacacaagtgagtttctcaccagtatccaaccttaataacagtagtgtcttgcattttgctcaagcctcactcctggctgtggtcagacaaatcatttttcctacttaaactattcaagaaaaaagacctttttggggggaggaggggaggtaatgaggaagaatgaggggaaattgaggaacagagaagtgacttagcaggcagggataggtggaaaattgaggggaaaaaaacagaaacacaatccagaagtgttgattcccctcatggctctggccattagaccagactgacttcctaggttttacacatgattcccaagcaaaatggccccatggacaagtcattttgtggctgctgagcctacaacctattcttagtgtgtctaaactattcagatgttttttccatgagacctattaaaatacctgcgaagggtccatataacttttcgaggaagtcggagaactttggaaaatcatgaataactttgttctttcacaaaatcctaaacccaagtaaatttttaagaaatggggtacgaatggcttcccagcaaagtaaaattaagtgatgaaaatcaatctggaaaacaatgttatttttaaagctcagtcaaggcaaatcttacctgtccactaaacttttatttaaaaaatcaagttttctaaacaaatgtagtacatatataccatggaacactatgcagccagaaacagaatgagatcatgttctttgcaaaagtagctggaggccattatcctaagtaaactaccacaggaacagaaaaccgaatactgcatgttcttacttataagtgggagcttaacaatgagaacacatggacacaaagagaggaacaacagacactgggacctacttgagggtaaaaagtaggagggtggagagaatcagaaaaaatatctattgtgtagtatgcttattacctgggtgatgaaataatctgtacaccaaacccccatgacacagtttacctatattaaaacctgcacatgcacccctgaacctaaaagttaaaaataaaatcaagtttgtactgtgtatctgttaatactaagcatctactcacctaccttattcaaggcacagtgctaggtagaagtaatggggactataaaagagtaccaaagattgcctgtctccaggaaaatgatagtcataacaataatagtagcaacaacaacaagtatcttagtagcactttgtaatttttattgcacctatatgaatattacctataatcttttcatgtttgttgttattatggtgacagtatataatacaagatattatattacaagtaccaggaaaaaatgaaatagctgataatatgaagaaaagggagggaaagtttatagatatacaaaatatacaaaagagaacagttaatatcaatgaaaatatccttagtaaagatgctagcactttgggaggcagaagcgggagaaccccttgagcccaggagttcaagaccagcctgggcaacatagaaagaccccatcatctctacaaaaatttaaaaattagtcagatgtggtggtgcatgcctgcagtccctagccactcaggagtctgaggccggaggattgcttgacaccatgaagttgagactgtagtgagccgtaattacactactgcactccagcctgcgtgacagagtaagactctgtctccaaacaaaacaaaacaaaacaaaacaaaacaaaacaaaacaaaatatactatttttttcattctcacaaggtgagacctcctgttctaggccttagcaaaaaagtctagtttaatataaaaggtattgcaataagcaaacatattagtgcggttaatgttttgtaaattctgatcatgcccctctccacacatatttcacatgagcaatggcacgtctttagttgcaattttaatatctgtgtggtggaaaacatcattgttttttcttctattttaaatagagagatgatgtaactaaatggaagggatctctatattaatctgaatagtgctagtttaatggggggtcacagtttaaggtaagaaaatatgtgaatatttggcagaagaaatggcacaaagatgtgtgtgtgtgtgtgtgtgtgtgtgtgtgtgtgtgtgtgttttaaagtcgttgttatgccatacaggacactcactattgcttgaaaaatgatagaagggagattatttgagaagtttcaaatttggaagtaaaaatgttttaaaccttgacccatcaaataatgctacagcacctgaccagaggataaactcatgtggaccttaggcttcaaaagtatcttgtaactaacaggataataccatcagtggcatcatctttgtacagcaagtcaagttacatgtattaatatagctgcacattgttattgttcacaccaaaacagatatttaaataacattttaacagagtctatctatctatcatctatctatctatctatctatctatctatctatctatctatctatctatctatctatgtgtgtctgtctatgtgtccatccacccatccatccatccatccatccaatcctttttctttactgtttgcacaatagtgggagaggtaaaacagggcaaacaggaggatggcagcacgcctcttgaattttgtgctaaaacctgattcctgcggatctgtcccattttatgcaaagctctcaccgtgtggcagttttaaaaacagtttgagtgggacagctgctatttacatttacactgacagccagatccttccttccctcagttctgtttactgctttctcctgcttgtgatataacattgttacaggatgtatagcaatgctacattaaaagaagtggcaagtgaagacactctgatatgtagttaaaatgtgtatatcatgccacagaagctttgtgtgtgagggcccaaaaatgaatgaataaatgcatccattaattaaaatacacatggtattcagaaacaatgacaaatctatagttaagtcctttacaacagatgtcttagtcaacaggtttaagaaaactagacattttacagtcagaaaagcatattaacatgactgtaaggagtttgactgatttgggaaaataaaaatccatgagctcctctgcctctgtggtggcacaaaatgtctatatgaacaatgaactgaagtgcaagaacctgtggtggaaagagcaatccaggaaagccccaggatgttttccgtttgatttccaaacagcaagtatggctgccatcacctcactcctgggagagaagtagaacacccttgttcttgttcttttttttttttttcagagctactttaagctatccctttatttcaatgtattgcagcacttggccatgcaccttttttttttaatttaatacaactgaagcaacacactaaagttgaaataccttcattttattccatatcatttcaataattacatattttagaagtaggatagaatggtatttctgtctttaggtcttaggccagcatccttagcaaactaacacaggaacagaaaatcaaataccacatgtcctcacttataagtggaggctaaatgatgagaacacatggacacatagaaaggagcaacacatacaggggtcttctggagggtggagagtgggaggagagagatcgggaaaaataaccaatgggtactagccttaatacctgggtgatgaaataactggcacaaccaccacccacaacacaaatttatctatgtaacaaacttgcatttgtacccctgaacttaaaataaaagtttaaaaaaagaagtagggtacatgggtgtgtaggtggatcaggttggtgcttggagaaaagtattccaagagcaaggctttaggctgtatgtgccacgtagtaaccccacctactaaaaaagtgaaaaccatgaaggatattcatcttttcaatagtaatacttatattaaatacttatattaaatacttatattaaatacagatatttaatacttatattaaacatatctcttaaaaagcaggcacaaataaatttcagaacatagcaagaacgtaaaagataaatttgctcgttgattttagagaattcatttttccacactccaaagcaaaaagtaaaaaattaggaagaaatattaggaaaaatttaagtgacattcattgatgttgctctgaaatagaaagttaatggcaaaatgttttttaaggaaaaactgcacattgtgccaagatcctgagttttataagaagcaggtttaaatgcattttaacaataaaaataaatatacctgactttcaatctgttatacagtcattaagaatttttctttctttaggccgggtgtggtggctcatgcctgtaatcccagcactttgggaggccaagcccagtggatcacgaggtcaggagtttaagaccagcctggccaagatggtgaaaccccatctctattaaaaatacaaaaaaaatatttagctgggtgtggtggcgggcacctgcaatcctagctactcagaaggctgaggcagagaattgcttgaactcgggaggcggaagttgcagtgagctgagactgtgccactacactccagcctgggcgacaaagtgagactacatctcaaaacaaacaaacaaacaaacaaacaaaattctttctttaaaattatggtattttttaaaaaaattactttacacaactaaaaaattaatatttaacactaatttttactaagcagtacttgtacattgttattcaatagataattctcatcaactgtcactctaacaatattgccttaaaaacaattgagtttaacttagtgttgcaaaacccaatgttattaaatgaaaataacaatttgtatgtgttaaactccagtcatatatttatgatttgaattttattttcacatatagggaaatagcacattcaattctatgggattattccaagaactatctattagaaagcaaatttgcgaattaagtaaattcttatactatcaagctttagcaaaccctggagctgaagcacaaagtaagtatatctgatgccctgacttacagatttcccagactcttcggaaaggaatgcattctacagctctatacatcatacgatctatggcctggagaggtgccttataatatagtagttttactagtttgatgttgcttttgtcaaacaccaacactttgtgtttcaaagtgaaagtttcattccccattcaatatcctgcacttagcacagcatctgattcacaataggtactcagtagacatttgttaaatgaaaaagctttcagattatgttaacagtatgttaattatgacaatagtcttgtgaagcatcccctcctagaatatagggaagaactagagcaaaagagacttgttagaaagaattaaatatatacagaaaaacctatgaaaaatagaaaaatagagtatatccctctatcagtggagccatttaataaaatagactatacttgaaggcaggctttctcaacccttgctactcccataacctagaaatttgctttaaaaaatgtttttcaccaatagcaaagacttggaaccaatccaaatgtccatcaatgatagactggattaaaaaaatgtggcacatatacaccatggaatactatgcagccataaaaaaggatgagttcatgtcctttgtagggacatggatgtagctggaaaccatcattctgagcaaactatcccaaggacagaaaaccaaacaccacatgttctcactcataggtgggaattgaacaatgagaacacttggacacagggtggggaacatcacacattggggcctgtcgtggggtgggggtaggggagagggatagcattaggagatatacctaatgtaaatgacgagttaatgggtgcagcacaccaacatggcacatgtatacatatgtaacaaacctgcatgttgtgcacatgtaccctagaacttaaagtatcatagaaaaaaaagtgtttcaccccgtatcaattaatctctggtgccagggcatctgcagtttttgaatgctcctaaagtaattctctcaaaccagagttgagaaaccactgtcctaagataaagagaaagcagtaggtgaggatgaactgcacatcttccaaaaatgtaaggattctatgacttatacaaaagggaaagcagccactagcgagttaatatgaaactataagagcctctatctggctggattcttgcatgatgagatctcccttatttggctaatatggtatgaactctatagacaaaagagaaaatgtggtagtagaagtagagatagcattgttagggaaacaaagacttcagcctattggaaaagcatatttgttaagggtgatttaatataagatgaagcttgcacttaaagttagtagggaaaaggtggattatcaatagaaaatgttaagccaacaaggtggccacctggaaaaaaacaaataaaactggatctgtagcatacatttggccatgaaacaaaagtccagatggatcatagatttaaacatagaaaaatgaaaccacatagtaattagaagataacatggtattttttatgatcttggaattaaaaaggccttgtacagtgttgcaattaaaactaaaagccatgaaataaaatgtgaaaatataattatattaatgtaaaaaagttctgcatgcaaagacctcaataaacaaagcaaataaacaaaaacccataacagccaactgaaaaatgaaagtaagtcatatgaaagacatactaacatttaataagccaattttcctaatagagactgaaaacttacaaatcaataacgaaagtacaaatattactccataaatacaaaataagtaaatagaaaagctcataaaagtccaagaatattctgaatctccttcataatagagggtttttttagtcaatcaaataagcaatgataaaaaaattgatagcctcctgtttaatttagagtacaggaaagtactataatgtcaatgcttcttaccctcattgctaataggattataaatttgcaaccactattaaggagaatctgccaataatcaatcaaaactataaatgcaaatcattttttgaccctgcaacgccattcctagacatttattgaagatatgtacttgcatatctgtggaactatttatataagtttgaggttcttcattgaaccactatttgtaatagccaaagactgaaaacacctaaatgatattcagaagaggactggttaaataaattgtaataaattcattcagtgaaataccacgactttttaaaagaacaaacaacttgtaagcactgaaaaaaaagaatgaacactaagacaaactcaaaaaattgattgcaaaatagtatctacagaatgctataatttgttttaaaaatgaataaaagagatacacacatatatccttggaaggaaaaagatcaactaataacatttgttttcttctgggaggggaactgaatgactggggaacagagtgaaaaggaagtattttactgaatacttttctgtaacttttgaatcctgaactatttgtttgtattatttatttaaacttatattaatcaatcaaaaagtaaaattactctttgccttattcttagatttaattctgaactcaaatgtttattgtagatggaacgtgggtaattccaagttttccattgttattcaataaaagttagacatcactaagaataattacagcctgcaatttgattaaaatacctacaaatttcaataaatgtaagcaatgggggccacagctctttcctataatctagcctttgggaggccaaggcggaagggtcacttgagccaggccaacctgggcaaaaaagtgagatccccatctccaccaaaaaatcaaaaattagccaagcatggtggcatgtgtctgtggtctcagctactcaggaggctgaggcaggaagaccccttgagtctaggaggtagaggctgtagtgagctgtgttcatgccactacactccagtctggacaacggagctcttaagactgtctctaaaaacaaaacaaaacaaaaaacaaaaaaaggaataaagcattagttgatccattaagttttgaaaggaagaatcatagaaaaaagaaaagaaagacactaagaagagaattcaaacgttatttttagtgagcatcactatgtgcaagagagaataatgagctagatcaaaggtggcaagggaaaaactgaggcaaattggtttggctatatttgtctttatgtggcacagtcaccatgagtaggaacaggagtttatggacacccaagcacatagtcaaacacagtgacgtatatatagtatcctattccttctgcctctacatgcaaataccatccccaccacacagaaatgaatgaaatcttaaaatgcagccctggggagtgatattagaaagcttgcaaataattttaaaagatatactctaatatggtatatatttatccataatattgtgtgatactattttaggttcattgaaaccaatttttgaatactgataaatgttaagtttttagataatagataacaataagttttatctaattaccaattactgaagcagagtctcctagatagaaattattctgtgcttagaataagacatttatgaatgatacgaaacctaatagtctaaaaactatgcaaaactgtctccaagaagacactgtgagtgccagaatgtgtgtatgtaaaagggaacagcagagcttttccaggtgagactgtctgactaaagtgaacatcaactagagctattaatacaagaggtcaacgcactacacttttcatatcaaatatacttttagaagaaagctgaaaacctttctcccaaaggtgggactaatgtgggaaagtaatgtctggagaaggccagtgaaggagctatttgggaaatgaggtccatgagttgctcaagtttcatatgacttttagtttcatatgtcaccaccaccacccaaaaaaagcccattgttggtacctgtgtaagagcaatgagaatattagctttgttctaaactctatgagaagaatgacttacaatgagcattccctaaacagatgttatccctaataattggcaaaatgattccggttttcaagcctacaagtctcatgcagtcaatgatacttctttccaaagtcacagaataatcacatcaagaaaactttcttagtagaccttatctataggaaagagttcattgacaaatcggttgttttcccttgtttcttgggaatgcaataatttaggctcaagattaaaggtagaagggaaataccaccaagtggtaggatttctttctactgccttttggaagtttggccagagtggaataaaaaggttttgtaggggaatcttgtaactaataacttaatgaactggcatcctttaaaaagtacaatggatactattgataattattccagaagagattaaaccaagatttaatgtccccctaactttgagggattaagtagaagcagaaggttcatcaggttttaaaaaccctgtactagtgaacaaagtttttgaagcttggacataagaaagttcaagaaacttgttcagggttcctagcaggaggggaggaccaatctaacgtgaaaaacaggctcaaagattggtaaccctttttctatccgtgagttttactttagttaaattcagaagtaactcagcaatgaaactgttcatgatatatgccacaaacacaaatccaaatggaaaatatgccatgatgctgcaaaccagaagatctgggttctcatccttgctgcacccaattgtataatcctgtgcataacagctattctcactttgcttttagttttctcatttgagaataatgactttattctgggcactatggtaagtgctttgcaaacattctgatttaacccttgcaacaatcttatgtgaagggtgttattttttaacaccaccttataaataaggacacttatgctcagacaagttatgtgtcttcccttacagcaagtgtagaagtgagttcagacaagtttgactccagaaaccacacattaggatacatgtactaatttttatttagtggctctatgaggggcctattgtgcaaatgtttaatctatgtgaatatagttaatcctgcaaaagaaacataggtcagatgttgtgggtagatatgggtgccagaccataaaatttttatcttttctttatatatgatagagttgtttcggagaagactctgccaagctagagattacattttctagcatatcccactgtcatcctcacaataaggtgtggtcacgtgattagttcttatagaatgagaatagtagtaactgggtaattttctggctagagtggataagaagcagtatacttccaccattatgcctttccttatctgtgagctaaatgaataggattcctaagacttaggcagagtaagctatggatggaagaattctgggtccctgggtctgcgaatgagacactgacaataaaaaagtccctgataatgaacattcacatcagactgcgatgagtgagaaattagcttctattatgttaagccaaagacattttgggaactgttataacagctggcattatcctcatcattatagatatgatggtctttatttatgaattaggaaaatgaagctcagctaggttaagtaaccagtccaaagtcaggccctacttcaaaaatgatattattctgagggtaagaggtggtgggaggagtaccaggcaaagggttaatagattttgcaagtggcacaaaacaactaatttacatgagctaagatgtccaagatagggtctgagagtatatattttgaaatgaaagacaagagcaacagttactaaggatttaaactgagaaagattgatggagatcatacacaatatttggaactggttccctttcttttgctgatacatatttataccctccattgtcccacactgtttaaacacacacacacacacacacacacacacacacatacacagaaagagagacagagagagagaatttgatcttctatcataacaaatttcagctcaaggtatttatatttacgagcttaaataatctatactttcagaaccctgagtgttggctgagaaggttacacaagcttttgcaaatgcagcaaaactgtcccaggaagcacaccactcaggcagacagaattcccttctggtaatactctgcgatgtcattcatcttggaacttcctagataagaagggagtgatatgcaggaaggacaaggtcattgactccttgtatttatttgaataaccaccaactctgcaaacatacttctgaagtaaaatatggaggaggcatccacagaagttgccaattcaagaataataaacatataacaagggtgttaaaactagaattatgatattagtcaaattccttgaatgttttctagagagaatagtttccactctagaagagaattatttccactctagaagagtataaaattattccaacatctcttcaagaagatcagttaagcaaatccaagccactgtatttttcagagactgacatctttctgatattgtagatactagaatggatgagagcaatgtaattagcaaaggaaaatggaaagaagagacttgtaataaaacagcatacaaggagttatatctaattattacctatagatttaaaccacttagatgaagacatatgagttgaaaaagaaattaaatgtggtattgctttcgtgggactcaattcaaatatttctatctcattcaaaattaaacaatctatgttatgtagaccccccaaaatccccagtctaaatatctgccttactaaaatgttcacttttcaaacaactttatcaggtggaaaaacattcagttagtctaaagttcttcatcctattagttcgtaggtacaataatatttgtaacagaaaagttgtgaattattggaatatagtataaatttgcatcaaataaccctatcttatacatccctaaaatgatttctaagaataatggctctaatatgtggatttgaaaacaaagctaggagctattcatacagtgactccatttaaaaggaatataggaaaaatgatttttaaaataattttttaaaagtaaaaaccaaaggcaagcatagaaacctagggatatgctaatgaaacctgttatgtcagtaacaagtgttgtttgtgaaaaacaaatgttcatttgctaatttgaatccccatcataaggcacttatgttcattgattggctcttcacaaagattacatcatctctgtgtggaaagccttccagggtccccacacactattccttcattggtagtctatgaaaatatcaacaatggcaaggctgtattcaaatcttccccacaaagaggcagagtcaagtactgcaaagtcgtagaagtttaaccttcatgagatttatttctaagtctgctctgtgaggaatacaatcaattagatatttttttctcctatgctcaatattatgccaaaatgtgggggtatgattgaaccccagtaatgtattgggccattaggatgtttgagaaactactcatctggtcatagctagactactctataacaatttcagcaacagtttctagagatagttgagaaaagttaagttactaactgttggtaattaaaatgcacatataagttaatatagaaaatccagaagataaaggagagatttcagtttaaaaatgatgaaagaaatattcgtattctttcccacaagaccatagaaagaccatataagaaagccaatggcctgttttagatactaaaaatctagtttttgaatttttgaaaataaaaatgtctaaaaagtttctggctcttgcaaaaatatttgattgagggagaaaacattactcaaaaacacggtcaatccaagaatttataaacaagaaatagtaagtatggtgaaattcatacaggagtaaaactgtagaaatggaacaaacattagacccatgttggatcaagttgccaaaaatgctgataaacatcaatgatttcaatgtcccaggaggtttgatgaatcagagttgggttactattattctgtatacacctaataccatctgcagagttccaggggccatgatctaattcagaacatggcatcttgctggctggaaaggagtcatcagctgttaccaccaacccaactgaaatatggggataaaaatataaaagagagtcatcaacaatgaagtcactcttcatgtcagctcagggttataatgaagcctatttcaatgtagatataatgtccttgtatgtcaaagattatgttctcctcataccccaatataacttgtaatttttaaaactgtaggtcatgactcatgactcgacagtgagttgtgaaataaatgtagtgggtttacaaggaacattaaaagaaacaaaatatggaatcaaattaaaatgtcagagaatattgtacatagtactaaaacttcaatgtgtgtgtgtgtgtgtgtgtgtgtatgaaagtgggtttgagggtcttactatgtcaagagcggaagggcgcaaaagatctctttgactctaaatctgttttctaaggtttcatcaatgtgcctggaattcaatagtgaaagatttatttctctacatcctgaagatactggggatttcaaaagcacacaattaagataagatgctcctcaaaaggataaaatcttgtttcattagccaaggctgatagctatctctgagcagaggccacaggaatagaatacaagtcgggcacttttgggataggagaggtatgcagaaagagtaggatggcaagactccagagatcatcctaggattccacatatttgacctgcacccttgaagctagtacagattgataattcccatgcaggatatcccagtgctcttggctaccataaaaatcagtaagaattgtgaacatagtttttgtgggtcttccgttagtactgaccagtactttcatagacagcttggagaaaagtctttactgggattgataattttcacaccaattagaaatttcatgagcattcatacacaatcatcccgggtggtgaaaagggttccaaggaacaattaaatcaatgatatttaaacaccactatacatcagaatcacctggggagctttaaaaactttagatgcctaagccatcaccccagaatgagtttcagttgatttgggaatgagacctaggcactttgtaagaaatcttttcaattgactcttctgtggagttgggtttgagaactactcgagtcctaccacccatatgattcttgaatcccctctattatcctgagcaactgttttgttatatttttaaacaatgataactataattttaacccacatttttacttaaaatgtgcagaaatctgtctccctttggaatcaatccattagtcatttttttttctactttgctcttccccaatgtgggtgtatgataggttaaagccatctaccatatgccagcctttagtaccagcacacgcaggcaaacacaacacaagacctagaacatggtaatagtaacacagtaaatgtcagttgtcagtgttattgttgtggttgttattattgtgactactatcagggaacacagcaaagatggctgttaagagcaaaatcaccaaagcaattctgccaagacaaatgtcaagaacacactacttctcagtgttgtacaataaatgctacgtattgaaaatctgaaaaaaagtatagatgtttggttttgtgcttcattcactacttcctacagtgccatatagacaaataatggatgtatgaagtaacacaggtgtgttcaaggtgaggcttggcaaaaggcccctgccttttatattttaaacaatagcattccacatgatgaaaaaactttcctttgacattcaaaaagttccccacaatgttaaaaaaaaagcctttcaataataactctccttaaaagaagactgaataagaatatgtaaagtttagaccttaataggagaaaaaaaggaaagaggtaagttggaaataaaacaacttctgggaatatattcatttccatttctctttctatactactggttaaccttaacctctctctgactgagctgagcttatccacccatacagccttgaaagttcaccatgtctttagagaggtctactaggattaatacaatatgctttcaggctcagtatcatgcctagacccctgtgaactcttcataaagggttatttctcctgtagatcatgttgtactgaattacaatgggttaagttagattcacttaaactctgaaataaacaataatgcaaatgacaagagcgctgccaatttcatgttgctgttatttagaggctatttggagaagtacccaaaacctccattgtcttatttcctattactaccaagattagtaaattaaatgatattttatgaattatctaaatcttaagtctaatttaatcatcattgtcaagataatttaggaaatttaccttaactgttaactgacttgcttaatggtacagacaaaaataaaacagcataatttaagaaacctgagtttcaaagacacgccaaccttccagcattattttgctaaactgaaaagtcataccttcaaccaaggaagtaaggagggtgacattagctgctttccgtcttcctgctggtaagtttaagccaagcctatccaatttctctctcaggcagcggcccccattctttgattttgctctgtacaaaaacaaacaaaaactaggttttgaaatttcacattctgatgaaaattatgagacgacttgaccacatggggaatacactatcagatggaagacatcatgactaagggttgagggtatggtatcagttagcagaaattctgtgccagaatatagctttgtcttaccttctcaaaatgcctcccaagagtgaagcattgaggcactcaggtggggagaggcgcctctttacctcagcaatggtcaccttgtatttggaagtagaactaagaagggacaaacggccagggacagagcaaaataagtctgtggggttgaccacacaggtgccaccttgggagaaaaaaagtatataacatgttagtgacagtgaaagaagctaactgcatgagaggcagttaacatcaaaagactattctggatttgggaatacatgctaacagttgtacttatatatcccccagatcatcgcagggagctgctctaaatgttctttcaaatactactcagggtcatgtcttttcaatgtttgtgaaaatgtctgtgagtgtacaattgttagaaacattggcatcctacggagtgtagactgactcaccagtgctaattttggcaacatccacactaagaaacacttcaattaatcaaaaacctgaattccaatagttaagctcacaaagactaggtattacttatacatggttgtatgtttatgtacacacacagatgcacaatgtacacaatggatggaaatgttttatccacaattactgtcttttccaaagtgtttgaaaactgccatcttttcctcatccatctgccaattaaaggcaaaacagtcactcaatcccaggcactgctaaaaaccagttactcattgaaagaaatttctaatccatacaggtgatgataggttaaatacctctattgtatgccagccctcaatatcagcacaagacccagaacatagtaatcataatacttattaaatgttagctgacaataatattgtttttataattgtcattgtaaatgtaaattgtaaatgtcattgtcattattactattagggagcaaaacaaagataattgtcagtagcaaaatcaccaaggcaatattgccatgctggggttcctggaacagaagctttctgtctccaagctccagaaagccccctgagcttcaatctcctccaggaacaacagtgtatgttccctatcctcaggcagtcgacaataactgaagaggacttgacgatccaaaggtgatcatctctgagaagcatttcccactgtccaattcctcccccactgcaagactttggagccaatgtccaccctgctagcatggtgactatacagttccgggatccaaaaccgcctaatgcattgagcaatctaaaggcagagtttttaagggtccgaggcaaattcaaagttggcttttttgatcatgtattttgtttcttcagctagggtcaatcttacaacccatatccagaaaagggacaagttctatgagagaaaagaggttttaaaaaagtagatgggagaagaaaaatgggcagaagagtgttgtctaaaatatttttactttgtaacttgttagaagcataaaatctcagacccacctccaaactttttgagtcagaatctgcattttaatgagagcctcagatgattcacatggtcattaaagtttgagaagcactgaactaggacttaccacttgcctcccaggtatctcctacccttaactagcacatatggaatattataccggtggtagaaattctggcattcagattctggtattttccctgggctgggttgcaaaagaacctgggaggacatttaaaaaggcaaagggatcccaaacctgaggagacagaaaaagttaaccttgccccactcttaaaacatttctacccctgtaccttctggaattcttcctgactgtcttttggtcacccaagttttccttgcaagtgctggagaccaagatctttctccctaagcattctaaagtccctccaaaaaacaacaaaccaacaaaaaccagaagagtaatcagtgggaatgtcagggtagccaaccatcttcaggctagaagttaggtcctgtgcactctgccaaaacctccatgacagtgtctgaaaacctgttcgcagttagaaatctgagagttcaaaatctcaatcgtcaaattaaaatccatttcttgacatcaaacttgtagccaatacaatggcaaaccatgtaaacacctgctttaggagctaaaaacaaattctcctgtacttccccctcttcatattctcaccgagttttaagccaaaatacaacaataaaaatgttcccccagattcctggacctaagactaccatttcacttttgttatcggtttcactctgtacttagagatgcaaaatgcatttcaaaaaaaaatcttaaatgacttcttaaaattttagatgaacaggaaagcaaggtaggtattaatgaatctgtggtgtagagtcatactgtgagaattttgatcctgattattttaggaattagataagtctaccccaaatatattaaacaaagagaaatcaatgtctttatgcaaaattcacatagccctcttctaaaaatggatctctactcacagtcactataaatcataagcaaattgatattctgacataaactttcctctcttgcatactagccagtatacaaatgaggacacaaggaatctcacacagttgccagttagcttcaagtttatgataagtgagagaacagagcgtttgagtatatgtatgaattattttcctggatgctaagggtagggaataccacaattttagaactttcttatctttactaatcttcagtggattagaaacctaatttagggagatgtagatgattatcatttttaaaagaagttgttagatcaggctctccccaactggaagacttttggcaaagtgaaccttatgtgttgaaagccagctgctcccagggaagccactgagtctgctatctacccacgtgctaactccctgggcccagagtctccctctcctacatctaggttgggcttctggcttatgctcaagtagacatttattaggtaagttacacaagctgcatattaagagtatgctttatgcacacacaaattgcctgaaggatttattttgtattcaggattagccatcaactctagagtcttttattttttatgtcacagcatctttaaagggaatttctgttgctttgatacctggcattgctgcaaccttggggaactctctagtcctggctaaagatttggcaacttgtagagtttacagcaacttggggaacctgatatctttcttcttggtgatttattctttagagaggtggaaaaaagtagtaggtcaatatcaccagggttttgcctttagattgaaggtgctgagggagtgatacttctttaagataatccagactacagatggtaatgatgagatctcaaagaagaatgttatgaaacgttggcccacaccaagccatttacagtagtcatccccagtgttactacttgaacttcctcatggtgcttgtgttgcatgtcagctcatattgaaattatgtgataatcattctagattcagcatcacaattaagaatgtctttgattctatagccagtgtattcatgcagaacttctccagagttcatcccttttccatatacagttcacagaagcaatactttcacaaagttcactatttttaaatttggaatttggagatagggctctctattttcagtgatgctgcaaattctgatgggtagctatggtaacagtggtaagaaatcagaaactatctgctcaaggtcctttgcctaggacatggctttcattaaaagggataactttgccatagctacaggaagaagtcagccagagacttctggctcaggtgtgacaaaactagcacaaaatacatggatgcagatcctccagctgccatatcttgttagatcttattcggtttgaagaagcatggggtggctttaccttggctgccttggcataacaggggacatctggccagtgtctgcagacagtgtggggcagtggaaagagtaccgggctacaagtaagaatttgaccaactatcgactcacgcaactttgggcgaatgactctgggtctagtctgtccatctaaacaatgaagatgctcacacttgctctacttatctccccaccttgtaaggaggtgcaatgggaaatggatgcacgcacgctcggcaacctgattataggccacccaaccccgccacttttttttaaaaaaacaactaccccgttgcagggtgtgaactgcggggtaggacaagacaggtccccccgccgacacacacacacacacaccccgccaccgtctgtgctgcaactggatgggaaagacaagcgccggagcctgggtgagctttttctcttctcatcccaggctactggggcagaggaaacagcggcggctgtctccaaggagccgcgggtccctggagcctctaaatctgcctctgagccatactcacggcctccgcgcctcccccgtctcagaacgcacccagctgtggcgagaggtcccgcgcgctctccaggtgcgatcaatacttcctagcgggcttccgggcgctgggccggtgcgcgcatcctctccaaagccacagcgccgccccactcgtcgtagcgtcggtgttgacataattagaccaaatcttgagagcaaaataaatgatctgttcgccttacagccaaacagatgtttacaattcaaatgaaagaaatacaaacggcagggatttttcttctccccttcttcatctccagtgatcgctcttttttttctgacacattaaaaatgtgtaagcgattacaagagtttcctgtccctgtttgttctgcggttgcatttctgcgaggtgcgcctgtgagttgggtggggagaattattctctgctgcttcctctctagcctctcacccttcctaaccctcctcccccatgttacccctccccccatgttacctctccccccacggcagcagatattaattgtaatcaaacagcaaaggatgcggacttaattggaatcaagtaggcctttgatgatgtgtaaggagcgaattgtttggggggagggtataacattacaggtatagctggattaccagggccgaatgagcttctccttttgtagattccaggcagaacaaaagagaggtgtgcgtgaagagactcgctggtttaatgtggcggtaggtgtgtaatggtgtatattagggtgtgtgtatggcgggggttggggggagattaatccccattccccagtgcaaaaagtgttttggtttctgctgattttcaaagcagttaaagaaattagagaaaaggctgtaggctgtgggaaagctacctctttccctctacaacccccaacgcccacaaagatttccaacaaatcatgcttctggatgctttggtacaagagttttagatttcatataaaggagattgaatttcaaacctgcagaatctgcactggggactaaggaggcaggcgaggcttgaggtgtatctctggctctatcttcacccataatggatgaaccatagagatgagttttggctagcgagagtagtgattccaggtaatccatctggaatccgaagagtactgacaaaggaagaagagcaaggcttcccacgctcctccaattgtactccttcaggagctgctgaaagaatccacggctttctccatcccggattccaaggctctgggccttcctgaaacccagagaagcagaggaaatcgcttcctcctgccaagcagcctgctgccggccttgaggccggctaaagggaaaagcgatcaggtccttctactctgttatgggcagactgagcaattgaagctaaggttccatttcaaggaattttttttttaaagaaattaaatcagatctgacaatgtttgtaccgcggcgtaaatgcctttgccttggcgtgccagtcacctctaagcgctctgacaaactcaaactctcttaaaacgtgcagagttcagatcatattaattcctccaaaatgttttgattcaaagtagtttgtattttgtgtagccacgggcaatcaggaaagcgctcctgcctgcccatggccgggtccgctccctcttcgcgtggcccagaggctaccgcagtgtttaagcttctgaaattagcctggggctgcaaggcagaatgatcacaaagcgaaacaagggcgcttcccctcttcacttttttcattttttcctctcccatcccccgcccccccctttttagttgccatctcgatttcacaaaacagaccagggccaaaatgtcactttccacccatgtaaggaaaagctaggtcttctcatctagcccacttctgaggtccacagcccactacccacttgtacccccaccctgcgattccaatatggatccatttattatgagcttcatcatcaccatcgtcatcaacattgttcacttattattaaatactcagagcaggaaatgaaagggaccggtgtctggcaaaggggaggcggccataagggagcctcagaagattcaggggggaaaaaaagagtgagattttctttctttttttaatgattaaaaacacagacgactcctgtaaatagaagcctcatttcttcaagagatgccttttgaaacccgatatctgaatattcaacgaaggcaaagctccactctgtacgtacaacattaatatgatctctgcagaatttgctactcagtaatattaacatatcaaagcctacgcccgaggcgaaagaagctatcgatacgcgagcacagggtaaagtaaagattattggttctgatggttggagagccggagctgcgggcaaaatcgcgtacaccattaaccgagagtcagcacgcagggagctgcgcctccgaggcagtggcaaatattttatctaggtggtaattacctagctgctgccccctctttcacgcattctttggctatcgggccttcattacaggctaaaataatgtaattgccacttaacaaaatgagtcagggcgacgctattttgttctttacaagttgaagtcaccaaatgtgaagaacaactgagaatgcccaagccctccacgccactgcaaaccaggacaatgtccctgattaactcatgtaaagtacatagtcacccatatttcttcaagaacatcatttggggtctttggaagtggaatctatttttttccctcccatagtacattctagaaaccattagaaatgtaaattaatccgggaacttagcagaaaagagaaaatggtgaaaaattgtgctttgcaataaatcatgtttcatgtggtgggtcaagcatgagctggaaaagaaacagacattcttagcttttagacagtatcgggttatatgaagtatagcagtatagcagcacttgagttaatgtcttcctgatttttggtgaacacaagtagtctgagctgttgatattaggggtcctgtgtactaccatgacaattgagaaaataggcttctttagggttttgtaaaaggaagttctgagatgaggggctgggcaggctgcagcaaaatatacgccctcttttgggaatacacttccctgctatccacttgtaaattgacatgaacattgattgtttcagaataaacagacacgtatagacacacaccctcctctccaaggctcaactaggttaactggcctttctctaagacacgtggaaatggaataaactcagcagctaaaatctgaattcctatgaagaggggtttagtcaaacaagacagacgtaaaccccaaattacattccctttctctctggagcttcactagtctcatatgacatcaatatttggtttcaagtagcagattcgacgatgatttttagttgaaacgaatagggaccgaattctacaggaataataaagcatcacctaaggaagataatttctgtggctctgataaggtagctaacattttggagatacctaagagctttggcctttcttgggaattgagtgagggggtgagagggtgtcccttaaatctctccccagaaattcaattgattccaaagcctcttcctctctaactccctcctcggcctcaagtaattccaccctctgtcaggtatcttacgctcagatgcagtttccaagcatttcagaaggtgatcttggtcaagtgtgaaagcgaatgcaaaattgcagtagcaagaggccggctgtgggagaagcgggctcccgtccctaattagtggcgctgtccttcagcaccaccgaagtctctaagcgccctgagtgttcttgcctcaccttatttttacccgtcccaacagacccctgatcagcacatctcacctggtcccctgttcactgtgtaaatcttttttgcctcctccaacacagtgcattcaatattcatcagtcttgggcctattttattccatttcaataggtctgagtaccagcgtggctggcaagcttaatattcctcatttaaaaaatctttgtggagttataccacgtatatgtgtgtgtgtgtgtgtgtgtgtgtgtgtgtgtgtgtgtgtgtgtgtgtgtgttttaatctccatagggtgaaacaagaagtgttgagcagctcttttaaatttaatgtaaactaccagcatccactaaaacaataaccaagttccaaaaggaaagcaccctttgttttctttcctcctcagtttaaatggagtttacattggacattgggatgtaaaatctgcagtttaaacatgaaagaagcaactgatttctaccagcacatctctctatctggaaaagcaaatctttcaagaagctttcaaagggatggagaagggctgaaggacacttatttggtcccatcagaagagactcagtttttagtgttctgttactgcagacaactgtggccctgaagcaggaattagtcttggtgaatagaccacatcttattaattcgtatgaagttaggataacagctggtccctcttgccttgtgtgctgctcgggttactcagcttgctagaaaaataaacttcagaggctttgggtacagttaagtaggggaagctagcaaaatctgcactgccttaaggctctgagaatgtcatagttcaaaaccttttgtcaaaatggaacatctgagatgcagccccctttagtgcccgagctgaaagcaacagctctctcctctcctcttgccttcccccaccttccaattccatgggtaactctggattcagatgtttccctcaacagatgggaacaagaaagctttatccagtacagttaacaccacctcctcctcccaccttcccttaaagaaagaaatgtcctggacacttagaaaaataagggcagctacaatattggtgtttcattagcctcccctgaagcctcaatgatctagcctttcacagaatccctaaaagcctgaagctaacaccatcatctcaaacacccaggctgtggctagcacatttagggcttaaaaagaccagaaattctgctggaggatgtggtattagtgctgggggaagagggtgtgagaaacttctttctttctttctttctttctttctttctttctttctttctttctttctttctctctgtctttttcttttgtctttccttctgcctctaactttgattctgtcactgttctgtgaggagcaacaaatatctcctatcacaagtcttatgggcatagcctgggttcaaaccttgatgaaagaaaggaggctttttaatgtggatatgccagtgttggactagaataattgactaagcataattgttttcttaatcatcagaaaaggaatctgagcacaaccagatcttctaaacaaagtaagagataggagaagaatgtctagggttaacatgttgttacttgttacttacctcttcttatcactccaccttggccattgagaacaagcccacactgggcctccacagagcccttaataaaagaaacagaaataaaattacttaaatggatactcatatgcatgaccacgtaggtaaagtcttttagactagcccatccctgaactctgtttcagtagacatttgaaagcaagcattgagctgaagcaagcttgccagcaaacacaattttttaaaaaattgcaagaaaaaccacaatctaaaagttgtataaatcttaaggtatgcattttacatcaccatacaatattacacttcaaagtgcctgggagtctttcatcttggcataagagaatgagaagccctttgagtccccatcaaggcacacagcgtatatacagacagtgtacactcagcactttctgagtagagcaaattacacctagagtgtcaagtctgggactgtgggtttcttgaggacacagaggagctacttcatatgcaggatacaagatgtcttatggaggttctgttttaccccaaatgtaggaacatcctgtaatcctacccaaaatgggccgtatgaaggaaaaatcttcaggttcactcactgtaggccttcaaagtcctaatggattgaggaatccctagagctggaaagatggaaagagtttgctgatttttgattaggaaaaataaaaatttctccctgtctgtcgttttcttttttcccaaatcaaaatgtgttaaaggctcattttcctttacaaacaaacgaggtattggacatgaaagaggccttgaagggtgttaacctacccaacagcccgtgaagagttaagtaaatgcggagagagtcggtgcataataaaaacccactttacaaaacaacctttacaaccctggctccctttcgcctccccattttcaccatattgaggcaggcctgtaagaccccccttttcaacctactcacaagctctttcttattttaaatgttctgccttaaagtgattatcaaatcaatatgaaaaaaaaaaaacttggagactgagcataaattaaagcggtgatgggaaaaggtgtgacagtttcctttgttggccatagcaaatctttttaggggactcaaagatggaactgaagccacaagactgtttgcatctgttaggcagacttagaccgccctccaaaccattggactttcacttaaaattctgtgcagggaaaagtatatttacatttgttgcatttgaaatgaggcatatgctgatgaatgttttaaaaaggaagaaataaaaggagagagacgggtttctcccacacactccctccccatttcttgttttaaaagtagctatgactctttctttttcattctgccaacttggagcaagaacagtggaagaaaataacttgtcagatttacaaacttgctacatagcattcatagattaaatagataaagatggatatatattatgatatatacatacatggatatatctatgtaaaggtataaacgtatatcacacacagtactatatttcttctagtatcttggactgtgtcccttagtatgagtaattttgcttcagtatgagtaataaaagagaaaaaggacattcgtatatggaaaaagagataggctgaagaaaagctttcaaaatatctgaaatgtagatgataaatggtctcaaagctctccaaagcagtgaatcactttccctcccactctctggcgcacggttacaatgtttattttcttagaagaaacgaatcttggtttcttcacttaacaaactttttcccctcataagtaaaacatgttgtttggtcggatgacattgcataaatgaccagttgaatggcactaagtcgaaaattggataaactacggtgtccttttgcacgggattcgctctttgtctagtgcttgcaaatgttctaatccgctcttttgaaaaatgctcggctttgtgcctagcacagaaaaaaaatttgtacagatacaaaaaaatcagcagcagacgcggctattaaaaggagtaaataggttttagttgagctaagcactgaatggcagatttttttccctcttgagacataaggggatccttgtgaaaaatgtaaaaatgccctgagcgtataaaattattttgtgaatataaatgtagaaagtcaaggtttatggaaccaaatcttttttcttgtgcaccggtcttactgctatggctctttgttgggactgtaagggctttcactttaatttaaaaataatctcttgctcaaaggtaaatgaggaggaaagattttttgtgcgcaacaagggatctcttacgtctccaacttatgttcttagaatatttccctatttgtcctggagagtgtgaagaaggtggccagctttgtgcagacacaaaaagtaggaactcacaggtagaactgcacttttagctaaaaggagctaaaactatgggtcttttgaattattttctgggtatttgtgggctcatttgtttgaaatatgcctatggcaacataattgcataattataaattctatctttggtaaagaatgtgcaaacacgtgttaagaaataaagtagaagagagatcatctgattgagtgatggcctccacagtgtctgaatacctgccttctttccttccttcttctttttctcccttccttccttccttttctccttccttccttccttctttattttttccctctttcattaccgttactgcctcatttttatctttttaaggaggtgcattttacgtaaaatgtaatggctggaagagcaaaaataaacttgtaaattacctaactgggctgcggttttgagtgcacgtcaggcggagagaattaaactcaaccctacaccctggcaaagtgcactgtgcggattatttccttggggtagaactttgagactttcatttgcgattctttactttccacagatatctagtgtatttggtgaaacttttgttcaagcttagggtcccaacaatttccttagaacaagcctgtttgtagtaagatctccacaagctcagtctgagacaaacacctgggacgcctcggaagaccctgtaaagtgcggagattgagggtacgattggtcatcaatttattggatcttactctgagtccggttggcccaaccccagactcctcgatctcctccacctcatcccctcagggtcacaaatgttgattcacaaaagacttctgtgaggacaaaccaaagatggagggccgcagccgcccggactcccgcacttccaggtgaaatgcttggatccaatgagaggaagagaacgggcacactcctcctctaattgttttgataactttccataagtggtgtgtgtgtgtgtgtgtgtgtgtgtgtgtgagagagagagagagagagagagagagaggagaagagagagagaaagagagacgctttacagtcggagcattaatggggcggcagggggagggcgaagaggggagggagcagacaaattcgctgcatgcttatttacctgcaagtcgtctgctcccgcggcggccagccccaggctgggccctggcaggagtctttgatctgggtgcattccatactgagagccatggctcatgagggacaggtcatggcggcggtaggcatcgaggcagcccagctcccgcctctgctcgtccaggcaggacgacttgagcgcccgcgcattgtgcaggttaataaagtcggtgggctccccgtggtggatctgctggtagtactgttgcgagtggtggagagagttcagagagtaggcgtcgggggtgacggccgggtggctgtgctgaaactcgtaatggaaggactggtggtggagcggggtgtactggtggttagtggagaagtagggggacgcaaactcggtgccggtggtggagtaagttaaaggagaggaggaggaataggcgacagtggaattggctactgactccagacagccaagctgcatcaaacggtagctgtttgatccgtcgtgacgtatctggaaggaagagggggaaaagggagagcagaaaaacttgaggtttgtcattttgcaaccaaggcgccgctctcccggagccaggagctttctctggcactccaaggaaagcgagcgcgtaggactcgggccgagccgaagccgggtctcagcgtcttcaccagagagcctttgcaaacaggcgaactgggggtgggcggcctcgtcctcacagtcgagagagcggaaaaaaaatcccccaccctatataggtgcgggtgacaccacacacgcacacacacgcacagacacacacacacagacacacacacagcccctgcccaacttgtgcagggagcttggcgttgggatccaggtttgcaactgactccggggccgcgggtagcagaggaacgagtccacccgaaaagagcgctggcccggggcgccttgccactctaactagaccccagcatcgaaattctgcgcctgtctatgccgagatgttcggcccgggctgctcaaaatcattgtccatatattttaaaaaatccagtctgtgcaaatcgttcaacttgctcccttccttagtcattcgagggagggaatccgactccctcttttctgcttccctttccttgaataagcccattccaaaaggggtgcgttttccccatcccccttgtgcatctactgcttccccaccagtcccttttctttgcttttctgagaatctttctttccgtctctatctctttctcttcactccccccttttattattaagattatgttttcccgctcattatggcaaatgtttcttaacgtggcagagagttgccctccctggcgacagatgtcataacgaactttctcccctttccttccttaacttcccccgaaagacagattataattaaacgtaacggtccaatatagattagagacaggggaggctgccaccgccgccgccaccgccgccaccgccgccgccgccacacacacgcgcgctcaaaaaaaaaaaaaaaaaaaagtaataatacctcggcatcgtggactagtcccggaaaggtagttgacatgttgggtttctccgaaagcttacgatgcaatttccccctccaaaaaaagaatcgggaaaaaaaaatccaaacttcttgtattttccaatttttaaaggaaaaaaaaaatgttctataggtagatatctaaattgtaatggttttgcccggatcagatagctccttgcctcgtacccacttaaaaacctgtaggaacaaaattttccctctgcacaaaagcagctccctggaacagattttgtacttgctgagtatttctttggctgatgtcgtaggtcccttggtaatatagaagttttgaaaattaagcatcagcactgagaactgggaggacaataggcagaagagatttatcccaggagacaaggaataaatattgtatcttcgcctaataaggaactggaggttctttcaacatttttatccattttttccaacctttatcatgcttttctataccgactgaggtggggacttatctctgtggagagtatttgcacacattttattgtgaagctagagctctagctccaatatatgtatattagagatagaaatatatattaattaaagcttccttttatatggggaagtgttcattcctattggttccactccctggatgctgaaagctgctttttccaacaaccacccgaatcaattttgcccagattggggtgtctgccttcgcccaagtggaaacaatgctggtctttccatatttacattgaatttgggttctttccccttttttgaaaggcaaaatcaagcggtggcttacacttttcagcagctttaaaaataaataatggtgatggacagtcccaagtttccatcatcaggaaatggtgtaactggcaatgcatttaggaaaaatgcaagggaataaagatgtaagacaagattctacatttaggtaaactgttgtctttcactccccaaaccaaaccatatcccccctcttttgtgtttttcttcttcccttttggaaacactgctggtggtggtggggtgtagaccgttcagcagtagcattaggtttttgaacactattacccccaaaataacccttaaatgcttggaagttatattttataaatagagggcaggaaggaagcagtgcacacatatttccatctcttcagtggatttcttgactttcaaacagtttttgagctttccttccttcaaaattcagcttcctccaccaagttgtttagtgcctggagggggtggtggtagctataaacctgaaatactgaggctttgctcctcagtgtctacattataagaaagaactggctggccccacagactcatctcatagatagaaggggtaattcagtcttaattgccatttcatttggtttgcttttaagtgtttaagctgagaaggtgtcttaataataagcctcaggcaaacaggcatgtggctttttttttttttaggttggggtttgggagggtttattaggatctgctcatgcaggctaactggggctgtcactcagagctctttgctttatacaaatggacaaaggcacacgacaagaattgaaatgcattgtctgaaatggagatacacgattcttcagccccacatggggtcagcagccaacacttgttccctatttcaaggtgtgccagtgctgcccccctcccacccctccttgaaattccatattttggcctaatgaagtaaggagactgagagaccaatgatgacaaaaaggaagaatatccaacttaatctttaagtaaaaggggtaaaatgagtgctgttggctctaggggttgaatcccaaaaatgtttgcagtggagtctttgtttaccaggtctgagtggggcctccatagcttacccacggagaaaataactaatcatctctgggagatggagactgcccccacgaccttaactcaggcacccctgcccctgggaaagtgcagaccattccctggaagaatatgtaggacttgcaggttatcttggggaatgcccaggtgcgcttttcctggtggatgatattggcttcccagttagtcccggtcaaatggaagaggatagcccttctcagacatgttgcaatctcctttccaacacccctactgtcagatacaccttcattgaaggtgacggtaccttctcttcccagtttaggtccaggcagcagacacaaaaccctctccccggggaacaacaatgaggaagctcaggaagatgtggccgcctgctctgcctgctggcccagagtgtttgttccacatgtttgtccctgtctggaataagagccacacatagcccccctcacccctgccaccgcactcagaagatatagctttatgatactctcggtaatgagctctggccttgaactgagtacaccccatggaatgacctccagtagcctggaccctgtgaacatcaggacatcaccaactaactggcaatcatcgcattccaccccctaaccccactttcatggttcactttcctgagtgacttttaggtatccaaacaaagagtgtccagggtttaacttacatgcttgttgaactcttgtggacatgaggggaaactaaagatcctgaagagtgagaaaagaccctttcatttgtacttaaggaaaatgaagcaggaaggataaaatggctctcttttagttttgagatttcccttgccagggcccttgactaccttagaaagcatccctcttaaccctatgtcttggcttcccacaccagcatctgaactgcagggaaacttcatttggccaactgctccctcccacttcattccaacttaaaaaaataaaaaagctgttttcccctgaaagaaacaaagttgaggaaatcatccatgccatatgcacatattggtcagcgctcccttccatctgctctggggttgctcagcgcgccccttttctaaagaaactcattgaggcaggtgtgtggtgtgtttggtgcctgtgtgtgtgtgtgtgtgtgtgatgtgatgtgtgtgtgtgtagcgttcatttctgtcagacacccccccatccaattaatagtcttgagcaattaataagtgtcgtctgacttgacccaaagactgggctttttagcaaagttgattcctctttctctgttttacttcttttccagagagtgattggtcactcattttccagcgggtggcataattgaattaactggccacagcactctggtgactattgcctggggccccctccaacagggaacccgtggtgtgcattccagcctcagtcagaggccaggccggcgtcagtcactcaaaatagccggcaagagcatggtggacacgctgctggccttgcaccccaaaagctgaaaaggttgttcctcagcacttagttctcctgttcttccttctggttccatgctccacatgccaggaaggaatgtcttatggcagtcactttaggaatctgcaaagaaatctttatatatatatatatcattattgtcttggttagaatccagagctggaagagttttggggtagttgcaaattccttcctgggcttctaggccagcgttatacaaatcactccaatctcaacatccaatctcaaacatctttacagttttcacccaatctcaaacatcttcactgaaagagtttgccactccactgtgtgtttgaggttggtgaacaattacaaacgaactcatgcctatccctagctttaataaacatgtatttcttcaggtttctttctttttttctctttcttttggtacttagggtttcctttgctattgcaaattgattttgtttttttattgcttgaatacacttctcccacaaaattgcctatataatactgagcaaagtggaataattattggaattattttgggcattttgaaacaaaaatattttcttggatgtatttagacacatgaatcaaccagaatatcttctttgctctctcccttttgccctccctccccttttttttctttctctctttcttcttccttcatttcttctctttttctttccctgttttttttcttttattccctccctccttgcttccctcctttccttcctttttaacaaaagatagatagagatgggattgaatctcttatacttatgccttttaggcaaacatgtgtgtacattgtctaagaatgaaatttagcatgttctgctccagtgggaggtgcagctgtataaccagacatgaatttacacaataggaaacaatttccatggtcacaaagaccctgtctttgaaagaacagtggggcactaaggatcccatataggtgaatgatgttcattccacaaagcaaaacaagatatgtaggtatgaaaatcagcacctctccttactgcttccagcttctgccctttcactccttttttggatgaacatgaagagcagaggtgccttcagagaatccatagtaaccaaaggactcctgcgacttatctagtggtgttttattccatctgccctcgggcccccttccaccattttgagaatccccaaccgtctcagtgcctccacttggtaggcttccgagaggcactcagcctggggtcttctagagacaaccacagagggaaccttcagggcccttttacagcagggtctaagtttcacagtcacttcggattctaatggttcagaaacgtcttctagtccaaggacctcctgtggtgtgattcttccaagctcctaacctctcctagtcactcagtcactgctcttggggaatgcccaagagctctggtgagtgggtgggggcaatacttcaggtggtggaaaagaagagtatgctgggttcaccatgccgtaaaccaacccctagtttattcatttattcttcactagtcgagatgaagacagaaaagtgctccaaacaccagggcaattctgggcagagacagcaatcgaaaacttgatccagttgtatggatcggaatattcggagagaaaaggcatggtaacgggcattcatgtgcagacgcgcgaggtttcccctcccagtgattgcttcctttccttctggcctgtgctgatgccgactctgggtctctttcgaaaggtccctcccttttccagttatcaaatctgataattcttaataaatgatcaagtaatcaaatttgacaactcttctacttctcggtattctacacccatcctactttctatgacagaagtgccacgttgcgtaaaacgttacctaattgcaaacaagaaaaggaggctttttttttttttttttttgagacacggtctctgttgcccaggctggagtatggtggcgcgatctcggttcactgcaacctccgcctcccgggttcaagcgattctcctgcttcagcctcccaagtagctgggactacaggcgcgttccaccacgtccggctaaatttttagtagacaccgtgttagccaggatggtctcgaactcctggcctcgtgatcggcccgcctcggcctcccaaagtgctgggatgtaattacaggcgtaagccaccgcgccgggccaggcaggccattttttaaaataactttaggatgtttaggggaaattaacatttctgacagactctgcagtcattttagtttaagggttgtcattgatttttttaaactcctttttctttctcttcttcttcttcttcctcttcctcttcttcttcttcttcttcttcttcttcttcttcttcttcttcttcttcttcttcttcttcttcttcgtcttcttttcttcttcttcttcttcttcttcttcttcttcttcttcttctccttcttcttctttttcttcttctttttttttttttttcaaaacctcctccttcacgaccctaccccgccccctgggctgtttgtcaaaagcctaacacggatctgtattccgccttagccttgcagccgacaggcaacacggattccatagtcgtacagagaaaatgcatttgcaagcaattaaaaagcctcgcgaacgtattagtggaaaattaagtgggagaactccctcttctgaagtcttctgtttgataacaatggaacttggagccgaggccctcatctgagacggcaggctccctgcccttctgcaacagctgccaagctgtgctcaggcagggcgcaaactcacccgccctctgcgcgaagctctggcgcatgcagagcctgcctcgccagccctaccgcgtcaggggacgttcactcccaggcagcagaaccggagaccgggagggcacgatgccctggaggcctcctggctggttgcacgccttcaggcaggaagccagttcttctggctaaggcctttctcccatgggaaaattgcctctttcggccaagaaatgtttgagttccgaaagaggctgcactttgtcctctttttcttctttcagttgtttaaccttgtagcaatgtaaggggctttgcaagtccgtctgccagccttctgattgcatatggagacttagtttaccaacgctttaaaaagtattgattcatttgatcctgagaacactccccttttctgccattcaggacatatataattattatcctctttgtataaacgaaaaaataacagcaaagtagcagcaactaacatttattgagctcttatcatacgtgccaggccccgtttcgagcccttcataaggattgtatcatttcattctttcaacccttggatggtaggtattagtgcaaatgcattccctttgcaaaagatgaggaaacggaagtgtttggcggcagctcatcccaagccccactccccctcagcaggtctgtgagatggggaaagtgagactcaaggaggtgtgagtgatccctgggtcacaggggctctggccccaaatccggaagttttactttgtccccctccatcttctggtctttactgttgcgtctaaacttttccaggattttaatttcctctttttacccctccccctcgcccccacccaccatctccatccctctccaaacgcctaaaagaaaacacccagacggaggcctggtctaggcttcttttgcagtacaagtcatcgtcacaccttccaggggaagtcgcctggactaccgcggcctcaaattcagcctcccggatcttaccgctagctttccaggggaccgacaagggtgcagtgctcccagggttgccctctcccctggctggtccgcctctggttctcttcagagtcggtggctccacctggccagtcgtggatctcggacgctgtggcactcagcagggaaatcaggccgaagggaccaccagctgtacctgccagtctcctgcgccctcttcgcattcagcggcaggcagctgcggcttggtgaattccgcgaattccgcgctggccccgggaccccctggtaactgaggttgcacgaattgagccgcaaccatagggcctaggcaccaaccctacttgggcatcttcttgggcatcaattctacttgaacaagttacttaattttctcacctgtaaaatgagaaaaataatacacttagctggtccagctgttgtgagaagtaagtgaatatatatatcactgagatcaacgtggacaaggaatgcctttataaatattggctattatttgaaaagagggagagttgttaaggaggcaactaaagagtgacaatatcagtggagactcttgcttccctagggcccgttttgcgagccttggacagatgttaccaaagaaaattctgctggaggagactccagaagccatcagattctaccttctactgccgtatagggtcacacagccactggagctacagagccagggctggagctagaattcagatgcttgtgtcctctcagccccaagtcactggttcaggattcagggaatggacagctcggtagtccagtcctttttttacatgtctattttgtatttcctcatggcttaactaacattttggtctttaaattttttttaatttcattgtttcttctttcttcccctcccttcatgtctttctctcttttctctctctctctctctcaattctttcctccctctctcattctccatccttctctccctctttctctctccccacatttacccttagcctctccttccattccaccctgtcaatgtattcaggggtaccgcctcttctttcctggaattctgctccgacttaactccctcccttctaatttccaaaggtttctgtttcattttgccttaacatcctgtgcatggtctcagtgaagtgggggtgtggaggtgtttcttcatccacaataattcatgttctggtcaccttggtacatagctcctctcctaccttctaaccaacccctgtggatctgttttgttgctgaccccaagctcctgcctcttctccttcctactagccttggggagctttgaggcaaccaaggcctccagttacttttttttttttttttttttttgctaaaagagctttgtctgtttcttctgtcaattaccccagtagcctctcagaggccacgtttatttttccattgaccttttcttccttatgtactggaacaatgccttattattttatttatcttaatctctggtgcaatcgtccttttttcttcaacttggctctgctagtgtttgcctttacactttctcgacttcattatgtaatcttgctgaatctccacactctgtgcatgctgtttagacctcacgtctgtcttttacttacccttgaagagttttgttttgaaactcctggcccattcatatttgtcttattcctttgtttcctactatctcgttgctgcctgtaatgcctatggatagtgtccagaaatttgcacaatatctgctttattacagatctgacccaacagaacattccattaaaaagatatattttcctaatttggccctgacacttttggtgaactgtgataatgccccttcctcctaagctagttctggttgtaggcatcatagggacattagataattgctaggatgactttcactcctttgatttccttttgagcaagtggaggacaatggagtattcactgactgccactgattggctctgggacctcagacacttaaccacgctgctctctttcacagccaggctgtattaaatgaggacaaataggtatgaaacaactttggaactgataatgtactttaaaattatttagtatagtttattgctgcaactcacattctttctggtaggtcaagtctcttcgttggcttaatatcaatcctaatagtgatgaaaagtattgcttttcttctatgacctctcctttccaacactcagctgtggtctgtctgtcttgatcatagatatttctactgacatccttgttagagcactgtgtttcaaaagtctagattcagattgtgataccttttcttcaggcctcgtctccattttggtgtcatgaaaagccttgaggaaaacaatagccaccctactgaatcccctctctatctctcaatgtcatctgcaaaggatggacattgtaatcccagtaaaagactacccccacccctactctttggtaatcctctcttgatcagtttccactcctactctcaaccacccatcccttttccagtctttgtttttagatagagggcctttactaaaaaacatactgaaaaaaaaaaaaagacacaattcactccagtgattcttggaatgtctcccccttaggggcatcctggcaacctggcttggaatagttcatgtaacggaaagttcattttaagttcagtgaaatggggcagtgtaggtttttgctttgctatctttaggtgcgaaaatgtcacctcttgcacccttttttttttttttttttgagacagaatcttgctctgtcacccaggctggagcgcagtggtgtgatctctgctcactgcaagatccgcctcccgggttcacaccattctcctgcctcagcctccagagtagctgggactacaggtgcccgccaccactcccagctaatttttgtagtttcttttttttttcccccatcatcaatatttattgagcatttacagtgtactagggacaatacagaaaacattgtccctgctcttgaggagcttacattctaaaagaaaaaatacacctcttttaaaatggcatttttgtttggtgttttctgcaaagtactgaggaaatactttgtaaagtgagctttgggtataacttagccccatcattatttagagaatagaggaagaagaaagagggaggattttaaaggcagacaatgacagaccattcaggataggtagggttttaaagggagataaacacaatctcatcaactaaggagagatttgctgcagtaaataggatgagggaaatagtctgtgggatgcaagcaaaggaagcagggtgccttaaacattgagtggagccagaaagatcatgcggcctctttccaagtacatggctaccaagtaggaatggttggtgacaagatagaaggctaaaaaaggaaggtaatcttgtgcacctgacaaataggaagaataaaggatcaaaatcaaatgcaagctataagagtatcaagaaattcttaaaaaccaaaaagtgatttggaagcacaaaacttgtagttaatgctacccaatgtcatgacgaggtttcaccatcttggccaggctagtcttgaactcctgatctcgggtgatccacccaccttggccttgcaaagtgctgggattacaggcatgagccactgcgcccagccatcttgcacccttctttacagagaaattgtgactaaatctagcattggaacttctcgctagtacaagacactggaaacaggtgtagactgtgatgtattaaatatgtaccatatattagaaatatctgtaatgaatgcagacattctgataaataatacaatgtaaggctctttgtatgattgaacactatctacttctcatatatttatgtgccagcagataaagagaacaggtttctttccctagttaaatacgttgaaacagcattagtcatttaggagtgtgttccaacctgaatgctaagatttagatggtggcaaaactaagcacatgtaggtgctctgccctggcacattcagtttttacttagagaaggaagctctcccgttaattatctggactctgatgatggaggacagggagtagtggagaatgttagaaatgcatcattttaatgtgcttttcatcgacaaggtcaaatgtgtttcagatgcagttgacagcaaaattcaaaatccttgaaatgtagaaattttataccttgacaatatacttgttcatcattataatgtagattatggtggctaaaattgcccaatctttaaggagtgaggatttcaaattgttaattctaacaattttgactctttttttcaaaatcagaaaaccaaaggtcacttcacagactgtgttttcccagagaacatggaatcttttcacacttccacagataaatatgactactgccttattagaaaatgaatataggaagttcatcttgtctttccccaagatggtatatttacatgaagatgagtttatgttatgaggagaatgccaattgggtggcttggaatgacatttagggatttatgatgccatagagtctagtctattttttaagaagtgattgattcactagatatttaaaaatgctaaagagtagggacatatttcacttacttgattcaactgttcatacaatggcaccttagtgcagaatatagggccatctcaacacctaattacagtaccttacattatagggaaagaagataatgaaaagataaaccaaagaaaatccagagctccctttaccagcagcaaaacttgcaaaatatctttttattctaatgagaaattttctcacccaatgtgagtgtctaacagatggacacaagcaatatcaaattgtctatgactgtgctgtcttatgcagtgatggtagccacatgtggctattgaggactgtcatggactgaattcctatcttaaaaccctaactccaatgtgagtgtatttgaaaataagtccttgaaggatgttaactgaggtcataaggttgggtcctaatcccaaaccaaagagcactagtgttcttaaaaaaagaagaggagacatcagaggaaggtcatgtggggaaacagcaaaagaaaaattgctatctacaagccaaggatctctcctctgaagaaaccaaatctgctgagaccttgatcttggattttcagcttccacacctgtaagaaaataaatttctgttgtttaagttccacaatctgtggtattgtgttatggcagttctagcagactaatacaaacacttggaggaaacaacaacagtatcccctgatattaggagttggcctagtactattggtgagaacttagttttcctgcaagctggcctggcactcacagttaggtctttgtgctctcccgttgagcacaatcttatagaacatcaatatcaggcagggcctctctgtgaccatgatggatgaagatgaaagtaataactctagtaatgcctgcacacagacaaaacatgaacattgtttaagccacaaaataccaaacattctcctcctctggccaataggagtgactgctacttcttaaccatttatagctccagggccattcaagtatttacactgtataaaaagtttgttgaggtacccaaccagagttcttcctgttttctgaggtaattcaatacagtgtgaaccactgcttttttggacaatttctgaaattatccaaccaaagtccaaatcctttctaacactgttttactctgatgttcagtggtttcccatgacatgtgccctttcttgatgaaagttgtaaaccaaatttcaactacagctgtgtgcttggtggtctttggttagaaagcattggcaatttgaaataaagctagtccaaattgagatatactgtaagtataaaatacacatttgattttcaaatacttaatatgaaaaagagaatgtaaaatatttcataatttcatattaattataatgataatattttggaaatgctgatagaatgtattattaaaagtcaatttgcctgttcttttttaatgtagccactagaaaatttaaaattacatatgtggcttgcatttcatttctgttgaatttgcattgttttataatgtcccagaatagccaataattgaccatcctgaccatgcatacacagcatacagcttttttcaaagaagttaattaatctcattaggagacactatactgtgagtaacaaacaactcacaaatctctgtggtttaacacaacaaaaagttatttctctcaaacacacaattcactgtgagtctgaatacctcaccagggagctgttctccatttggcagcacagggatctagtgagatatttatttctgcatcatcataaggtggagggtgctggacggtcttctgcaagtaaataagttattggttccagaaacacattggccagatctagtcatgtggctctgcttaatcatagggcatctggagagtgtaatctcttcccctattcccagaagaaggagagaagtgaaaatgaaaagcaattgcaatatctgccataaagagaaaaatgtaaatagaaatacatgctctagatctctagtttaacacaaatgtgtgacatatttgacacatgcctaatgtattttgcttaggaggcctggactcagagggtatctacactgacactgaagatgcaattttttaaaaacatgcttaagtcttctagttcatagttgtatggcaacaatttgaagttttcagctacttagatgaaatgtgtagttaccaagagctcgcaattctttacctccccttctcatgctaagataaactttcaaaacaaagttaaaactgtgttttgaaagtgttatgtaataagattaaatagaaaagaagaaggtcttcaggatc

SEQ ID NO: 4423 - protein, 189 aa, Homo sapiens
MLWKLVENVKYEDIYEDRHDGVPSHSSRLSQLGSVSQGPYSSAPPLSHTPSSDFQPPYFPPPYQPLPYHQSQDPYSHVNDPYSLNPLHQPQQHPWGQRQRQEVGSEAGSLLPQPRAALPQLSGLDPRRDYHSVRRPDVLLHSAHHGLDAGMGDSLSLHGLGHPGMEDVQSVEDANNSGMNLLDQSVIKK

SEQ ID NO: 4424 - DNA, 510 bp, Homo sapiens
  misc_feature (422)..(422): n is a, c, g, or t
aagattagaaaaagaaaaagaagcaaagatgttgaaaacaaagacgtacattgatcattccttaatgcagtaatgtgttaaaaggaaaagatttttaaaccattaagcgcaggaaaacagtaggaaagtgacttcaaaatggaaaatttgacattcagtgactgaagcattggtatgataatttctaacacttgtagaaggtccatgactgtaattttaccaatgaaaagcatttaactgttttggattccaaactagcagcactacaatgctttgctagaagctggtaaaatggaaccaaatcgcctcttcaatggatttggtccccttcaaccagctgtagctatgcattgattactacgggacaaccaacgttttcatttgtgaatatcaattacttgccaactaatttcaacttattnacattattgcagactgttgattataatcaaattaacttgttactgttaattctacctgggaaaagccagaatggttaaggatggttta

SEQ ID NO: 4425 - DNA, 4343 bp, Homo sapiens
cgcacctgctgcaggtgctcccggccgccccggaccagcgagcgcgggcactgcggcggggaggatgctgcgcgagcggaccgtgcggctgcagtacgggagccgcgtggaggcggtgtacgtgctgggcacctacctctggaccgatgtctacagcgcggccccagccggggcccaaaccttcagcctgaagcactcggaacacgtgtgggtggaggtggtgcgtgatggggaggctgaggaggtggccaccaatggcaagcagcgctggcttctctcgcccagcaccaccctgcgggtcaccatgagccaggcgagcaccgaggccagcagtgacaaggtcaccgtcaactactatgacgaggaagggagcattcccatcgaccaggcggggctcttcctcacagccattgagatctccctggatgtggacgcagaccgggatggtgtggtggagaagaacaacccaaagaaggcatcctggacctggggccccgagggccagggggccatcctgctggtgaactgtgaccgagagacaccctggttgcccaaggaggactgccgtgatgagaaggtctacagcaaggaagatctcaaggacatgtcccagatgatcctgcggaccaaaggccccgaccgcctccccgccggatacgagatagttctgtacatttccatgtcagactcagacaaagtgggcgtgttctacgtggagaacccgttcttcggccaacgctatatccacatcctgggccggcggaagctctaccatgtggtcaagtacacgggtggctccgcggagctgctgttcttcgtggaaggcctctgtttccccgacgagggcttctcaggcctggtctccatccatgtcagcctgctggagtacatggcccaggacattcccctgactcccatcttcacggacaccgtgatattccggattgctccgtggatcatgacccccaacatcctgcctcccgtgtcggtgtttgtgtgctgcatgaaggataattacctgttcctgaaagaggtgaagaaccttgtggagaaaaccaactgtgagctgaaggtctgcttccagtacctaaaccgaggcgatcgctggatccaggatgaaattgagtttggctacatcgaggccccccataaaggcttccccgtggtgctggactctccccgagatggaaacctaaaggacttccctgtgaaggagctcctgggcccagattttggctacgtgacccgggagcccctctttgagtctgtcaccagccttgactcatttggaaacctggaggtcagtcccccagtgaccgtgaacggcaagacatacccgcttggccgcatcctcatcgggagcagctttcctctgtctggtggtcggaggatgaccaaggtggtgcgtgacttcctgaaggcccagcaggtgcaggcacccgtggagctctactcagactggctgactgtgggccacgtggatgagttcatgtcctttgtccccatccccggcacaaagaaattcctgctactcatggccagcacctcggcctgctacaagctcttccgagagaagcagaaggacggccatggagaggccatcatgttcaaaggcttgggtgggatgagcagcaagcgaatcaccatcaacaagattctgtccaacgagagccttgtgcaggagaacctgtacttccagcgctgcctagactggaaccgtgacatcctcaagaaggagctgggactgacagagcaggacatcattgacctgcccgctctgttcaagatggacgaggaccaccgtgccagagccttcttcccaaacatggtgaacatgatcgtgctggacaaggacctgggcatccccaagccattcgggccacaggttgaggaggaatgctgcctggagatgcacgtgcgtggcctcctggagcccctgggcctcgaatgcaccttcatcgacgacatttctgcctaccacaaatttctgggggaagtccactgtggcaccaacgtccgcaggaagcccttcaccttcaagtggtggcacatggtgccctgacctgccaggggccctggcgtttgcctccttcgcttagttctccagaccctccctcacacgcccagagccttctgctgacatggactggacagccccgctgggagacctttgggacgtggggtggaatttggggtatctgtgccttgccctccctgagaggggcctcagtgtcctctgaagccatccccagtgagcctcgactctgtccctgctgaaaatagctgggccagtgtctctgtagccctgacataaggaacagaacacaacaaaacacagcaaaccatgtgcccaaactgctccccaaagaattttgagtctctaatctgacactgaatgaggggagaagggaaggagattctgggattgccagttcttccagcagccatgctctgaaaatcaaggtagaatccatggaaagggaccccaggaccccgggaccctagacgtatcttgaactgccatcgtcatttcaaatacatctccctcagggtttccaggtggccacccccaattattcattccttaccaacctctcaaatcctcttggctttctctctgcagtgtggacactgttggctagtcctccccactccctgagggtccagtaagttagcttagaaccttcctggaaacatttcatctgagcaggtttccccacgtgtgggatgctccttttgcctcatctgtctcagggatgcaggctcccccgcatgcatggggatttctccccagaccagcatacttgtgacctgagagttcaatgcgtaaagatgcccctggtcagccatatccatcttctcttgcctggtccttgattctctggccgctccctgaccttcctccttccactgccttgactttcttcctttttattcctggtgccatctgtccaggcagctagacaagaacttgttcgccagcagccagattcaggccttcccaggggcataataagtgaccagcccctcctctccggacatcagatccaacacataaggaccctggcctaccctccagcccaacagccagttctgggtcagctgccaacttaggggtggtttgattatcccattgaaattcaccagtgcctttgccaaagaccctctcatttggacatacccagattcattccctggctccaactgaaaagactcagtttcaatcgttaaaagttcctttagggccagaagaataaatgaattataatcccattttgaagaaccgatttataaccaatgaaaaggttataatgtaatttatattcttggaggaacaagattttcatttgggattatttccttcaaccattcaacaaacatttgttgtatgccactaagcgccaggcacggcgttgggctctgcaaacacagtggttagtagcagtctggacctggtccctactggcatggaacccatcactccccaacatgcaaagcccacatttaaaggccagcctctgccccttcagtgatgcgctctttagaaatgccagcccactatattcagaaatccgcagggcacaaaacttccagcaagtcactgttgtggtgaaatgggcagtgggggtggggggtcttctttaaacaggcccccttcccatctacctagccagtacccatccaatgagtccccagagcctccagaagctgttgtctcctctctggggacagcagctcctgcctttggaggccaaagccccagatctctccagccccagagctgaaaacaccaagtgcctatttgagggtgtctgtctggagacttagagtttgtcatgtgtgtgtgtgtgtttggttaatgtgggtttatgggttttctttctttttttttttttttttttagtctacattagggggaagtgagcgcctcccatgtgcagacagtgtgtctttatagatttttctaaggctttccccaatgatgtcggtaatttctgatgtttctgaagttcccaggactcacacacccgttcccatctcacttgcccacccagtgtgacaaccctcggtgtggatatacccccgtggactcatggctcttccccacccccactttctataaatgtaggcctagaatacgcttctctgttgcaaaactcagctaagttcctgcttccaccttgatgttgaaatatcttatgtaagagggcaggggatgtcgtgaagatggcaagaagaacacagtttcaaatttctggaaaagagcctgtggtggagatctaaagatgtttagggaagagctcgactaaagaacaatgaaataaatggtccaaggggaagtc

SEQ ID NO: 4426 - protein, 686 aa, Homo sapiens
APAAGAPGRPGPASAGTAAGRMLRERTVRLQYGSRVEAVYVLGTYLWTDVYSAAPAGAQTFSLKHSEHVWVEVVRDGEAEEVATNGKQRWLLSPSTTLRVTMSQASTEASSDKVTVNYYDEEGSIPIDQAGLFLTAIEISLDVDADRDGVVEKNNPKKASWTWGPEGQGAILLVNCDRETPWLPKEDCRDEKVYSKEDLKDMSQMILRTKGPDRLPAGYEIVLYISMSDSDKVGVFYVENPFFGQRYIHILGRRKLYHVVKYTGGSAELLFFVEGLCFPDEGFSGLVSIHVSLLEYMAQDIPLTPIFTDTVIFRIAPWIMTPNILPPVSVFVCCMKDNYLFLKEVKNLVEKTNCELKVCFQYLNRGDRWIQDEIEFGYIEAPHKGFPVVLDSPRDGNLKDFPVKELLGPDFGYVTREPLFESVTSLDSFGNLEVSPPVTVNGKTYPLGRILIGSSFPLSGGRRMTKVVRDFLKAQQVQAPVELYSDWLTVGHVDEFMSFVPIPGTKKFLLLMASTSACYKLFREKQKDGHGEAIMFKGLGGMSSKRITINKILSNESLVQENLYFQRCLDWNRDILKKELGLTEQDIIDLPALFKMDEDHRARAFFPNMVNMIVLDKDLGIPKPFGPQVEEECCLEMHVRGLLEPLGLECTFIDDISAYHKFLGEVHCGTNVRRKPFTFKWWHMVP

SEQ ID NO: 4427 - DNA, 491 bp, Homo sapiens
tatgtctcctgataatgcatcaccttccctaaacatcccaacatggcctgacctctgagctgggatcccagcttaggctgctgtgagtgccccacgcatagaaccccaagagtcctgatgacacaaacaaccatctgtcccaggcccaggaggcctgaggacttacagcaaagagggaagcttggaggggggtggcatttgggagacctgcaccacctggtcgcatggcagtgcaaaaccaaagtaaacagaggcaccttcttgaagtaccacttaagcaaaactcccatacacaggttcatctctgagagattccaggacttttcatgctgggtgatcaactagggctgtgcttgcttaatccctgaggggacaggttccttctcctttgctgtggctttgagaaggctctggaagaagctctggttgtagatcctggctacaccactgatctccggcacctgtgtctcctccacggtgcgtccattcac

SEQ ID NO: 4428 - DNA, 469 bp, Homo sapiens
cggcacgaggcaagaggtatgtggaactgaccaactactgtgattataaagactacagggaaactatattgagcaaaccaatgttgttctttattaatgtacagaccaaaaaagacacctcaaaagaaaggacgtacgcgtttcttgtaaacacgaggcaccccaagataagaagacagatagagcaagggatggacatggtcatctcctcagtgattggagaaagttaccggcttcagtttgattttcaagaggcagtgaagaatttcttccccccaggaaatgaagtggttaatggagaaaatttaagctttgcatatgaattcaaagctgatgcattatttgatttcttctattggtttgggctcagtaattccgttgtaaaagtaaatggaaaagttctgaatttgtcaagtacaagtcagaaaagaaggagacgattaagttatttctggaaaaatgagtgagc

SEQ ID NO: 4429 - DNA, 733 bp, Homo sapiens
ctaggtagaggctgggtgttaatcggccgaggccgcgctgctgagtcgactctgcgccgccgccgcgatggaggccgccgcccagctcttcgtcgagagcccggacgtggtctacggccccgaggccatcgaggcgcaatacgagtaccggacgacgcgcgtcagccgcgagggtggcgttctcaaggtgcaccccacgtccacgcgcttcaccttccggaccgcccggcaggtgccccggctcggggtcatgcttgtcggctggggcgggaacaacggctccacactcaccgccgcggtgctggccaatcgactgcgtttgtcctggcccacgcgcagcggccgcaaggaggccaactactacggctcgctgactcaggcgggcaccgtgagcctgggcctggacgccgagggccaggaggtgttcgtacccttcagcgcggtgctgcccatggtggcgcccaacgacctcgtgttcgatggctgggacatctcgtcgctgaacctggccgaggcgatgcggcgcgcgaaggtgctggactggggggctgcaggagcaactgtggccgcacatggaggccctgcggcccccggccttctgtttacatccccgaattcatcgcggcaaccagagcgcgcgcgcggacaacctcatcccaggctcgcgtgcgcagcagctggagcagatccgcaggacatccgaggacttccggtctagcgcggggctggaaca

SEQ ID NO: 4430 - DNA, 214 bp, Homo sapiens
  misc_feature (31)..(31): n is a, c, g, or t
  misc_feature (76)..(76): n is a, c, g, or t
  misc_feature (113)..(113): n is a, c, g, or t
  misc_feature (119)..(119): n is a, c, g, or t
gcaattgtgatacatgtcatctgtgtctatnctggaaggttctttgttcatcactgtactcgcatcagcaaatttncagggtcctacctgtcactccaggctactgagctganccctcngaagctgaggtctccgagcatgctaagtaaccttttagaaaagctggaggcaaactgtcgaatgctagcaggctttatgaaaggaaacatatggg

SEQ ID NO: 4431 - DNA, 495 bp, Homo sapiens
cgtgcagacccccgtggtggcgtcgcagagggtgaggatggacacgttctgcgcccggttcagccaggtcacggcgaccttggtgctggtggcccacttcaccatggtgatgtagtactccctcatccgtggatcatcaggcggcatcatctccagatcatgggtgggtccatttaagccaataacgtgtagggaaatgctggggttctcacttccagccttgggatagtggtagggcttcacggtggggtagatggagccggtgtaagttgggagctccatgatggggacacgggaatcattgatggcggcgtaggcgagtctcgtgccatccggagaccaccagtgtgcgatgtgtgtcttcaaaatctcctcttcatacagccagtcactgaggccattgtaaatcacaccttccttgccagtggagaccacacggatggcctgtttcccgacatgtgcacagtagtagatattgttttcaaaaataaatat

SEQ ID NO: 4432 - DNA, 1488 bp, Homo sapiens
cactcgctggcttcccctcactccatctctgtgcccagagaaacaggggtactccaggggaatcctgtcctctgactgttcccagtagaaggcgggagcagaattttttcttttctttctctctgcccttctggttccccttcctctctgtgcccctcatcctttggattactcatcaaatgagcagcaacaacacccctagaccagctggtcctgtcctgggtcatctcgttgtggggagtttctagctggtataaggttaaagataccctttccagccccagcaaagccttaggcatttctgggattgctcctgactctgatgggcatcctcactcctcagacatttccaatctcccccacttcactgcagctttgcttccccttccccactggaagaaggaaacactcgctctcctttcccgttcacatgtctgatatttgctatgatattgaccttcacacacatcttagaggttctgtattttcctctcttttgacttctccctatcactactctactcaggcatagattcagtctagagctcttcaacagcaatgaaacggtaaacgaggggtaaacaaaacccagagatgtcatcaggtgcctgctaggagtcccacccgttcccctctagccctggcctgcccctccctaccagagtcttcgattctccttcaaaactctggagaggttacatctggcagggtttggggacacctcttgcctccatctcaaacttccgctgcctccgagccacctttgactcctcctgggccccccttccaggtgcctcaagtgcagaggtcagccttcggttcaaattctatttctgggcttcagtgtccctgcaacctctataatagaaggaacagagtggtctatgtttctttctttctctgggagattggatgtagactcgggagacctgagttctggctctgtcttatgaattcaaattgtttaatctctctgagccacagtttacccacttggaaaagaagagttaggccacatggtctctgtcatcctgggattctgagtgaactgctccccttcagccagatcctaggggcatatccccccaacctgggacccaggcccccttcccttgcagcctctctcagttgtgagtgcacaggccagagggggttgagaggagccaagggggggcatgccgtgggacaaacgggctgtcgtagggccagtggctaaaggggcgggaggggaggagtcctcagggatcctgtttcaacaaacgtttctttcggaggtggggaaggcgggggagagggggagaaggacctatttaaagctaccctgaagctttggctttctctgtctgccagggtctccgactgtcccagacgggctggtgtgggcttggcatcctcctggtgacctctcccgctaaggtccctcagccactctgccccaagatgggccgtggggtgagtatccctaaagagcaggggtcgcagtctaga

SEQ ID NO: 4433 - protein, 16 aa, Homo sapiens
MGRGVSIPKEQGSQSR

SEQ ID NO: 4434 - DNA, 408 bp, Homo sapiens
tttgataaaaccaaagtgactgctttaatgttaaaaatatttattttttttcctaaaagatcacacaaaagttgggaagagaaggatgtcaattagactacatcaaaatctgggcagagggaggacaaagagctgcctaaagaaactggtagctggagcaaactgcagagatcaagatgaccctagtcaacggaaccagcagcccaggtcagccacattcaggagcaccaccgaggcacggcagggagagcaaagttgctggccccaatcattcctccttttcagggcaggagaggcagaagctcactctttagacatgttcttgatggtcttgtgctctttcatggccttctcccaatcgctgccattgaattcctcagtgaccatactccgcacagtgccctcatc

SEQ ID NO: 4435 - DNA, 420 bp, Homo sapiens
tttttttttttttagttttgaaggatgcagtggttttattgaaaagatgtataacttttaacaaaatatgtaacactattacccagtcaagacaaccactttcattttattgaccttccagttcttgtacatattaaacagacaaatcactgttacataccataatgagcagcagctcaattacccattcccaaaccatgcaattccaccccagccgccccaaattttaaatccagaagacaaacctagaaaagcagcaagataaatatttacaaacattgtagaaaaacagcagtatttcaagttttgttaaattctttccttcagacataatgtagacatagaggaggaacagctgagagtctctgcatcacagaaagagaaacctgagcaaaaacaaaaccatgctttctaaacttt

SEQ ID NO: 4436 - DNA, 415 bp, Homo sapiens
  misc_feature (15)..(15): n is a, c, g, or t
  misc_feature (314)..(314): n is a, c, g, or t
  misc_feature (390)..(390): n is a, c, g, or t
aggcttcaagaaatnctttggaaataaaaagttaaatgtttacatttcatgtggtatttcaggtcttcaggttctgattagcttacttttttcctttgtctttggctgatttctgctttgtagataaataataatagccctgagatgtttctaacatttaaataagaaaaaaatcaaatcgaagtcagcctgctgggaaaagtgatcacatgggcagttgcagtaacttgtatgggaaagagaaaatgcaatgagcccagttactgcacttgccactaccatgctgtccatgggaagggattaatcagcagttncagttgttcacaagccgcccttgagggaaaacggcagccaaatatttttaaatggagggttttggcagttcccccngggccagtggagggtttcttttttg

SEQ ID NO: 4437 - DNA, 531 bp, Homo sapiens
taaaaaaagggtgtgaggctcgagcacgccagccaggccgctagcacctcgcgcgcgccgcgtcagcgaggacccgcacgagctgcccggctctgtgcctgcgttgtttgaaactgtggaacccgttaggcttttggggaactacagtcccagctggctccggagcccgtgcgtgccaggggcgagtggccgtcgcgagacggctcctgcctttcgtgtctctgcagcgtggagactggaaccggcaatttcaaaggacgccacgttcaatcgcagcgctggcgcgggcggaggctaaaacacgggggtcctgagactgaggaaaacgcgccaagttcccctcggtggcggagtgctaaagaccctagcggttcaggcgttcggcgagcggggccgctgcttgttgcgctcctggctctcccggggcgggcgcagatgggcgccgctcccgggatgtagttggtgtaggtgcaagacgggagcgagcggcggtcggggttcccgctcttgggagcggatggtcactccccc

SEQ ID NO: 4438 - DNA, 588 bp, Homo sapiens
caggatccacttttttattgcaggaagactatgtctagagcgaaggctacacagaccccatgatgggggagtgggggcacccacatgcggggggagagggggcaggggcggagtcacagcaagcatggcctggcacagtccccggcaccagggatgcccaggcaggatgggccagcagccaggacaggctcgggccccctcctattgcagatgccctctctccccagggtcgggcagggcctgaggtgggagaggcctggaggtgggcagggccccaaggagattgtgctatcagggtgtgtccctgagaaagggccgcagacccctgcccagcctcactcttttcggcaccttcagaacccagaagctactgccaggacaggagaggaggcaacatcagctgctggtgggccctgggccagcccaagttttggggggacccagctctgctcagacacaatgccagctcttctgggagcccggtccacgtgctggatagcaacacacacgcacgtgtgcacactcccttctttctgagtgtggccaataaacatttggttgagtaacacttaccccaccacagaggaa

SEQ ID NO: 4439 - DNA, 3171 bp, Homo sapiens
ggcacgagatgacaccaagcaaagcctacttagtttagatctccagaaattggctggtggaaaaaaatcaaacatgaagattgcagttttgttttgtttttttctgcttatcatttttcaaactgactttggaaaaaatgaagaaattcctaggaagcaaaggaggaagatctaccacagaaggttgaggaaaagttcaacctcacacaagcacagatcaaacagacagcttggaattcagcaaacaacagtttttacaccagtagcaagacttcctattgttaactttgattatagcatggaggaaaagtttgaatccttttcaagttttcctggagtagaatcaagttataatgtgttaccaggaaagaagggacactgtttggtaaagggcataaccatgtacaacaaagctgtgtggtcgcctgagccctgcactacctgcctctgctcagatggaagagttctttgtgatgaaaccatgtgccatccccagaggtgcccccaaacagttatacctgaaggggaatgctgcccggtctgctccgctactgtctcctattctctactcagtggtatagcattaaatgatagaaatgaattttctggtgattcttcagaacaaagagaacctaccaatttacttcataagcaactgccacctcctcaggtgggaatggaccgaatagtaagaaaagaagcacttcaatctgaggaggatgaagaagtgaaagaagaagatacagagcaaaagagagagacccctgaatctagaaatcaggggcaactttacagtgagggggacagcagaggaggagacagaaagcagaggcctggagaggagaggaggctggcacaccagcaacaacgccaaggaagggaggaggaggaggatgaggaggaggagggtgaggagggtgaggaggatgaggaggacgaggaggacccggtaagaggagatatgttccgaatgccctctcgatccccgcttcctgctcctcccagaggcacactgcgcctgccaagcgggtgctctctgtcctacaggaccatcagctgcatcaacgccatgcttacccagataccaccgctgacagcaccacagataacaagtctggagctcactggcaattccatcgcctccatcccagatgaagcatttaatggattaccaaatttggaaaggcttgatctgagtaaaaataatatcacttcttcaggcataggtccaaaagcattcaagcttctgaagaagttaatgcgtttgaatatggatggaaataatttgatacagattccttcacaattgccatctacattagaagaacttaaagtcaatgagaacaatcttcaggctatcgatgaagaaagtttatcagacttaaatcagttggtcaccttagaattggaaggaaacaatctcagtgaagccaatgtcaatcctttagctttcaaacctttgaagagcctagcctacttgcgtctgggaaaaaataaatttagaattataccgcagggtcttcctggttctattgaggaattatacctagaaaataaccaaattgaagaaataactgaaatttgtttcaatcataccagaaagatcaatgtcattgtactacgttataacaaaattgaagaaaataggattgctcctttagcctggataaatcaagaaaatctagaatccattgatctctcctacaacaagctctatcacgtcccgtcctatctacccaagtccttgctgcacctagtactccttgggaaccagattgaacggatccctggctatgtgtttggccacatggaaccaggcctggaatacttgtacctgtcatttaacaaacttgctgatgatggcatggaccgtgtctccttctatggggcatatcattctctgagagaattatttctggatcacaatgacttaaaatctataccacctgggatacaagaaatgaaagcactacattttctgaggctgaacaacaacaagatacggaacattcttccagaagaaatttgcaatgctgaagaggatgatgactcaaatctggaacatcttcatcttgaaaacaattatattaaaattagagaaataccatcttacacattttcatgcataagatcatactcaagtatcgttcttaaaccacaaaacatcaagtaattccaagttttcctttgctgtttataaactttactcatgtatttgtagtagctgcatttgtcattaataagagagacataatcctcctgttatactcagtatcattatatgctagtcaacctgattcactaacacacagatgaacaaccaaaatatacctaaaaggtatagtctctaggagttttattaatagtaaaggtaaaatctctcagtttcctacctctagaaagaggccatctcactagaataggatattatgcatactgagctagaccagaagagtctggaacaaaataaacacagcctttataatcaacttgaatactggtgttagctgagaactctgtaagtccctttaaaaattatgtatcttttggttcaagattaagaagcataatgacaacaaaaaaagcaggcagaatttatgaataagtgttgtttattattaaaacaataatttgttaatttcttataaggtcctgtgctataattactggtataaatataactgaatattggggtagctttcatttcttccattaattacatgtgtaaaattaaaacactactgtaatgttaatttcctggttttgaaaatcatattatggttatgtacattgttaacattaaggaaagctggcagaagggtgtgcataaattctatactctttttgaaacttttctataattctaaaattattttttaaagttaaacagtatattaagattaccttcactattcctcactcaagattaagacattttttgaaaagcagtagagtttgcttaaaatacaaattaattattcttgactataaccttgtaaaggtaaatctaatgtataaatttttgaaaaattttgcaccactggtcatagcatctatctcctttgccttaatttactgaaatacatcattttattcggttcaattgaaataaagctatgtctttactatgtattggccctaccaaaatcatatattaaaattttctaacat

SEQ ID NO: 4440 - protein, 699 aa, Homo sapiens
MKIAVLFCFFLLIIFQTDFGKNEEIPRKQRRKIYHRRLRKSSTSHKHRSNRQLGIQQTTVFTPVARLPIVNFDYSMEEKFESFSSFPGVESSYNVLPGKKGHCLVKGITMYNKAVWSPEPCTTCLCSDGRVLCDETMCHPQRCPQTVIPEGECCPVCSATVSYSLLSGIALNDRNEFSGDSSEQREPTNLLHKQLPPPQVGMDRIVRKEALQSEEDEEVKEEDTEQKRETPESRNQGQLYSEGDSRGGDRKQRPGEERRLAHQQQRQGREEEEDEEEEGEEGEEDEEDEEDPVRGDMFRMPSRSPLPAPPRGTLRLPSGCSLSYRTISCINAMLTQIPPLTAPQITSLELTGNSIASIPDEAFNGLPNLERLDLSKNNITSSGIGPKAFKLLKKLMRLNMDGNNLIQIPSQLPSTLEELKVNENNLQAIDEESLSDLNQLVTLELEGNNLSEANVNPLAFKPLKSLAYLRLGKNKFRIIPQGLPGSIEELYLENNQIEEITEICFNHTRKINVIVLRYNKIEENRIAPLAWINQENLESIDLSYNKLYHVPSYLPKSLLHLVLLGNQIERIPGYVFGHMEPGLEYLYLSFNKLADDGMDRVSFYGAYHSLRELFLDHNDLKSIPPGIQEMKALHFLRLNNNKIRNILPEEICNAEEDDDSNLEHLHLENNYIKIREIPSYTFSCIRSYSSIVLKPQNIK

SEQ ID NO: 4441 - DNA, 506 bp, Homo sapiens
  misc_feature (6)..(6): n is a, c, g, or t
  misc_feature (27)..(27): n is a, c, g, or t
  misc_feature (395)..(395): n is a, c, g, or t
  misc_feature (407)..(407): n is a, c, g, or t
  misc_feature (442)..(442): n is a, c, g, or t
  misc_feature (476)..(476): n is a, c, g, or t
  misc_feature (482)..(482): n is a, c, g, or t
  misc_feature (495)..(495): n is a, c, g, or t
  misc_feature (500)..(500): n is a, c, g, or t
ttcctnagaaacgagcaaacctgaaanctactctctcagcttcagagggaaaaaatggttgtagatttctggacttgggagcagacatttcaagaactaatccaagaggcaaaaccccgggccacatggacgctgaagttggatggcaaccttcagctagactgcctggctcaagggtggaagcaataccaacagagagcatttggctggttccggtgttcctcctgccagcgaagttgggcttccgccaaggtgcagattctgtgccacacgtactgggagcactggatatcccagggtcaggtgcgtatgaggctctttggccaaaggtgccagaagtgctcctggtcccaaatatgagatgcctgagttctcctcgggattagcaccatganggattcttgagncaacctggttgcagccatatacttgaaagaaattntatgggaaattgggacgaagggaagtctcccagnaaattnccagtaatccctngaaantttccc

SEQ ID NO: 4442 - DNA, 1159 bp, Homo sapiens
taagatctactcaaagtacttcaaacaaaaaataaataattcattggctcatgtatcttggccacccagggaaggtctgacattgttagttagatccagagtttcaaatgtcatcaccatggatgtgtctttttctctctctcatttcccctccccatatcttgtcttttatttattataggtttgtctcattccctggcaggctctctccctgtgataggaaagagagtccccagcagccccagggtgacatagttgttatagttcattatggaatagaagagagaagagcattctcaataacccggcaaagttcccagggatgactctgatatgtctatgtctcaggtcacatttccatctatgaaccaatcatattcagaggtggaatgctaattggccaggcctgggtcatatatacaagtctagggaagaaatgagcttcatccctgtccaattgacatggactgattaggggtattaatggaagaggtgtgccaccacaaaagaatgtaccatgggcagatcaaagaacatattctgtatgtcaggcttggcacaaaagaatgacacaagtaatatgctgtagatcagaacctctctgctaatattgcctttttagcatggttaagatagctaagatctagtactgtcactccagtatgtcccaattctacctacgtttattgaagggtcaacagttctgatctcagcattgggtaaagggtgggacattcagatttacggtccttgataaaaacaatttacaacgttccgttgtgtaataaatgtaagtgtacatatgcctgggacatcagctggaaaagggacagactatcagagagttgcactgttgcggtatgggccaaatccaacataatacccgctgtacctctagagaactaaaaccttaatttctcagatcttttctgcactaatggtctttacatacagcctacattttaactaactcttgcatgggcttgtttcacagcaggaaactatattcatcatatccttattatgatagagaatgacaacattcaaaagggtgtggtgcttctgaaaatatacacaataaatggcatgatttgaaaaaaaaaaaaaaaaaaagatcggcgcaagcttattccctttagtgagggttaattttagttga

SEQ ID NO: 4443 - DNA, 544 bp, Homo sapiens
  misc_feature (544)..(544): n is a, c, g, or t
aaagcagcctggctcatccacctccagttcttctcacctagcgaagccttccagcagcagactgtgtgacaccagttctgcaaggcagggaaagtaccagcaaagcagaccttaactgttctaagaacaaagacctatatcaagaacaggtagaagtaatgttagatgtgacagatacaagtatggatacttatttggaaagagaatgggggaataaaccaagtgactgtgtaccctacaaagatgaagaactttatgatcttccagctccttgtactcctttgtcccttagttgccttcagctcagtactccagaaaatagagagagctctgtggtccaagcaggaggttccaaaaagcactcaaaccatctcagaaaattggtgtttgatgatttttgtgattcttcaaatgtttctaataaagattcttcagaagatgatataagtagaagtgaaaatgaaaagaaatcagaatgtttttcttccccaaagacaggattttgggactgttgttccacaagctatgcccaaaacttagattn

SEQ ID NO: 4444 - DNA, 668 bp, Homo sapiens
ttgaatttaggtgacactatagaagagctatgacgtcgcatgcacgcgtacgtaagcttggatcctctagagcggccgcctactactactaaattcgcggccgcgtcgaccgtaaaccttgatggctcatcttgctacaattacgagttgaaaaacactacttacgtatttgtatgacctattagtcagaggaaatcatacatatgctttgtaaatagactttgcagataactaaatagactgaagaaatatgttgcatttgatagaagcaattgcataaatatttggtttctatattagagtctgtgagtaaagtcaagtaataaacctaagtaggtataacagatttttaaaccttgaaacttgctttgatggtagagaaaatcattgaagatttacatactgtatataagatgtaaaatgtacgctgcttattaccctcaattttccagaagcaatggtatataatgcagttgaaaaaccaaaaatcttggaaaactaagacgggtcttgtttaaaatgtctctcagctttggcaaccttcaaatcttaatcaactatttaaagcattactgtgtcttgtagcctgcattccacaacagctctgttattcaggtaaaagacttgaactgagccgtttgggacctatacttgtatattttcattgg

SEQ ID NO: 4445 - DNA, 649 bp, Homo sapiens
ttttttctgtgcagtcaaatgcatttattttgtagcttaagcaagacaggtggtgaacaaattcataatgaaaatgccacccagaggttaacagcttgccatgcatgcaactgtgtgcgcaaaatcaagttgttttaataccagtgtgcagctttgattcctccatgaaattaaagctgtgttgctcacttgtttacataactcaggccaccctgaatatctgctagtggggaatttacaacccactgaccatctcagctcaaagccagatgactatcacctacacatctgccaaggtaatagcatggcaaatagtatttttcttgttctgtagccaatggcacagatacaccaacacagagatacccagaaggcacctcctctcattcagctgacaacttcctaacatttcttgggggcagagtaccatatgtgtggcggaaaaaaaagtctcatcttaagaaatatacggctgtctccaggttagagcatgggtggttggaattctcagaagagctgtttcagcacaccaccagaacattggccacatgactgtgtaagagagtctctgacatctgggtagcacagatccctgactaagctggctcattagggtagtgaaggtcaagattagaggctcagagtcgag

SEQ ID NO: 4446 - DNA, 5505 bp, Homo sapiens
gaattcgtaaggttgaggagagttgatgatgccaagtactgtggtggtcctgaacaattaaagagggattctgggaagcagagtgtggacagttccaactccctgccaaggggaagctcataggcaaaggaagctcactccagaggggatatggaagttccataccctcttttgtctgaagagccgaagtccctgttctcaggtcgttaggaagttaaaaagtaatttggaggttatcagaactgattgaattgagtttgaacctcacctatagcaacaatgggccaggctgcttgactaatgccttggcgtcaatggtacagttttctccctcttgagctgctggcagggacctgggctgacatgtctcagaaggcccttagtcaatgattagcttatctcaaggccccaagccagggcagctgtcaaagagggtccccactgcgttctgcacctagatcctcattgtgaaatgaagtatgaagtgattgagtgaggtctctattgtctctgacattttacaattccaggattctgccttcttgtcagagaagtgtataggcaagcagttgggcaggtgagagggctccgggtgagaggctcagagactgagggctcagcctctgcttgaagagtcatcatctgggaggctctgtggcctcctcagatgagttcattcacactcataccccaaaatggagtcaacaccccctccaccatctcagccttctcagcatctaaagccccagcatcgatgcctctttttttgggttaggggtcagagctgttgtggaagggcatacagtcattcttcacttgcctttgactgtgtactctgtgcacatggaggtaggagcagacatgacttcaacaaggtcatgcccccttggcaagcatctttgagaccagagaggaagacagactagggaaagaatgaggagataagcacgggctgctgtgaggtccaggggagcaggcaaaggtaagagaaaaggctttaggatactaactaacatatatggagcactagcatgagccaggcactattctaagtgcttttcaggtgttatctctttttgcctcacggacagcacctacaaggcactgtaattatccctacttcacagatgagggagtggagccacagtgaggttaacttacttgaccaagggggccaagtaggaatggaggcatttgttgagtcttctaaagatgaggaaagagtggaagtgagattttgtaagtgcttgattcatttctaccaactgaactggcaaataaataaaagcatgagtaaatgggggtataaatagtctgtcagctatgggggtgggagtgggctcaaggcaggcttagagagaaggtgcaagagctgtctgaaaaggtcagagcaaagcatgaagctggtgagcagctgtgaccatagctggaagcttctctctgagctttctcctggttacctcctcctcccctacgtgaccagtcagccaagtgttaagtccaggggaacattttgctgcttccaagtactgtctcactagtgttatttgccataacttgcggccacagggcaaggtccaggtgctcagacctttacatcctggactttccaaggcctcccaaagctctctggcacccagggaacagtgtgcgtgtcgagagcttaatccgcaggagcatagccatggttctctggggtccagtgctgggagctctgctggtggtcattgctggatacctgtgcctgccagggatgctccgacaacgcaggccatgggagccccctctggacaagggtaccgtgccctggcttggccatgccatggctttccggaagaatatgtttgaatttctgaagcgcatgaggaccaagcatggggatgtgttcacagtgcagctagggggccagtacttcaccttcgtcatggaccccctctcctttggccccatcctcaaggacacacagagaaaactagactttgggcaatatgcaaaaaaactggtgctgaaggtatttggataccgttcagtgcaaggggaccatgagatgatacactcagccagcaccaagcatctgaggggggatggcttgaaggatcttaatgagaccatgctggacagcctgtcctttgtaatgctgacgtccaaaggctggagtctggatgccagttgctggcatgaggacagcctctttcgcttctgctattacatcttgttcacagctggctacctgagcttgttcggctacacgaaggacaaggagcaggacctgctacaggcaggagagttattcatggagttccgcaagtttgaccttcttttcccaaggtttgtctactccctgctgtggccccgggagtggctagaagtgggccgactccagcgtctctttcacaagatgctctccgtgagccacagccaggagaaggagggcatcagcaactggctgggcaacatgcttcagtttctgagggagcagggggtaccctcagctatgcaggacaagttcaacttcatgatgctctgggcctcccaggggaacacggggcctacctctttctgggccctcttgtacctcctgaagcacccagaagctattcgggctgtgagggaggaagctacccaggtcctgggtgaggccaggctggagaccaagcagtcctttgccttcaaactcggtgccctgcaacacaccccagttctagacagcgtggtggaggagacgctgcggctgagggctgcacccaccctcctcaggttggttcatgaagactataccctgaagatgtccagtgggcaggagtatctgttccgccatggagacatcctggccctctttccctacctctcagtgcacatggaccctgacatccaccctgagcccaccgtcttcaagtacgatcgcttcctcaaccctaatggcagccggaaagtggacttcttcaagacaggcaagaagatccaccactacaccatgccctggggttcgggcgtttccatctgccctgggaggttctttgcactcagtgaggtgaagctctttatcctgcttatggtcacacactttgacttagagttggtggaccctgacacaccactaccccatgttgacccgcagcgctggggttttggcaccatgcagcccagccacgatgtgcgcttccgctaccgcctgcatcctacagagtgagcttggccaagccagctgcaaacctggccagaggagttctattgcatctctcacctgttctcacccctctgcagccccaagaccccactggccacccctccctctggtcctgtggcaccccctacctctgttctgcctgtcctcgctctctccccgcctagtcatctgacaggcttatcattctctttaaaataccatctctcagagtgggttctgccgaaccctcctctcacaggaagtccagaggaagggggagtatctgtgggcaacttggtttgggagatgatgcctgccttgagaagtcctgagtacagagactggttccccccagacacgagtaacatggcatcttgcaaacatcagcctccactctcccagcttgctttagttttttcagcaacacttatcccacatcctatggaattcaggttctagaacagtgtcatccaacataaatatgaagcaagctacatgagtagtggggttttttggttttgtttgtttgttttgagacagagtcttgctctgtcgccgaggctgcagtgcagcggtgcgatctctgctcactgcaacctctgcctcctgggtttaagcaattctcctgcctcagcctccccagtagctgggattacaggcacctaccaccttgcccagctaatttagtttcctggtaaacacatttttaaaaagtaaaatgaaacaattcatttttataatatactttacttaatccaatatatccaaaatattggcatttcaacgtgatcactattaaaaattttaacgtaatagtttttaccttccctttttcatcctgtcttcaaagtctggtatgtactgtacttttgcagttcttcccagttcagactagccacattccaagtgcttaattgccgtgtgtggcaggtggctgccctattggatacaacaggtctagagaaatgataccttttttttttttttgagacagagtctcactctgttgcccaggctgcagtgcagtggtgtgatcttggctcactacaacctctgcctcccgggttcaagtaattctcctgcctcaggcttctgagtagctgggattataggtgcgcaccaccacacccggctagtttctgtatttttagtagagacggcgtttcaccattttggccggcctcctcggcctcccaaagttctgggattacaggcatgagccactgtgcccagtcaggatgtctttaatgtaggaatcattcaagatccctcctcagtgcccatgtctcccccacctcagggtgctgtcaaccctcccttggtttccatgatcattgctgaactcagagctttcttctatccccagacccacatgggagtctcccagcacctctgactcagcttggccaatgcagaacttggcatctgaacccctgcctcttccctgaaccactcctcctcctgatttccctgctctctctgctcagaacactaccattcaccccatctcccagagacactctccctcctcctctttcaccttcatacaagcaggcccccgtcctatcagtacacccccctgtgatgcctctgaaatatgtaccctcctcccctctcctactgtcattcttatacctgtgatctctgcgtttctcttctacactgctgccagaggcctttttgccaaaagcactgctgattgtcactcttttactttcctggttcccctttgacttcacacacttgacgtttacattttgtcacagttggtcccccttgccttcacatacctgatgtttaaattttgtcacggttggtctccaaacttctcaactttgccagctttctccaatgaaaccatcagtagagacattgctgttcctgcccatcccagtgccagctactccttcctggaagccttcctggatttcacgcatcccatcctctggccagaaatggcctccgaactgtgcagctcctgcggcaccatttgtatcatagcatatctgttatgtgtcgttgctttctgtgtcttggtttctgcctgctgcccacttccctagactggagcctactggggcatggtattttattcatttctgacctccaattccctaagtggagattaaatgttagaaacctgacttccagtctcggctaatttactttcagtcctcaaatcatttcctggcctcagccctccaatctatgaaatgaggacaatcccccttcccagcgtgcttatcagtgctacaagagggtgagggggtggctgccatagctgcagctggctgatggcagggctccagctggagctgggacaggaggaagaatgactg

SEQ ID NO: 4447 - protein, 501 aa, Homo sapiens
MVLWGPVLGALLVVIAGYLCLPGMLRQRRPWEPPLDKGTVPWLGHAMAFRKNMFEFLKRMRTKHGDVFTVQLGGQYFTFVMDPLSFGPILKDTQRKLDFGQYAKKLVLKVFGYRSVQGDHEMIHSASTKHLRGDGLKDLNETMLDSLSFVMLTSKGWSLDASCWHEDSLFRFCYYILFTAGYLSLFGYTKDKEQDLLQAGELFMEFRKFDLLFPRFVYSLLWPREWLEVGRLQRLFHKMLSVSHSQEKEGISNWLGNMLQFLREQGVPSAMQDKFNFMMLWASQGNTGPTSFWALLYLLKHPEAIRAVREEATQVLGEARLETKQSFAFKLGALQHTPVLDSVVEETLRLRAAPTLLRLVHEDYTLKMSSGQEYLFRHGDILALFPYLSVHMDPDIHPEPTVFKYDRFLNPNGSRKVDFFKTGKKIHHYTMPWGSGVSICPGRFFALSEVKLFILLMVTHFDLELVDPDTPLPHVDPQRWGFGTMQPSHDVRFRYRLHPTE

SEQ ID NO: 4448 - DNA, 676 bp, Homo sapiens
cggacgcgtgggtagatcgcgatctagaactagagagactttgtccacagtgtgcaggagactcactcccagctgctgggctcctgggacccgtgggaagaaccggaagacgcagcccctgtggccccctccgtccctgcctctgggtaccctgagctgcccacacccaggagagaggtccagtctgaaagtgcccaggagccagcccccaggagccagggatgtggaggcgcagctgcggcggctgcaggaggagaggacgtgcaaggtgtgcctggaccgcgccgtgtccatcgtctttgtgccgtgcggccacctggtctgtgctgagtgtgcccccggcctgcagctgtgccccatctgcagagcccccgtccgcagccgcgtgcgcaccttcctgtcctaggccaggtgccatggccggccaggtgggctgcagagtgggctccctgcccctctctgcctgttctggactgtgttctgggcctgctgaggatggcagagctggtgtccatccagcactgaccagccctgattccccgaccaccgcccagggtggagaaggaggcccttgcttggcgtgggggatggcttaactgtacctgtttggatgcttctgaatagaaataaagtgggttttccctggaaaaaaaaaaaaaaaaaaaaaaaaaaaaaa

SEQ ID NO: 4449 - DNA, 1130 bp, Homo sapiens
ggtcgccgcaccggccgcctccggcccgccgccgcccccagcgccgccgccgccaccgccggggcgcccaccgcgctgccagcctaccccgcggccgagccgcccgggccgctgtggctgcagggcgagccgctgcatttctgctgcctagacttcagcctggaggagctgcagggcgagccgggctggcggctgaaccgtaagcccattgagtccacgctggtggcctgcttcatgaccctggtcatcgtggtgtggagcgtggccgccctcatctggccggtgcccatcatcgccggcttcctgcccaacggcatggaacagcgccggaccaccgccagcaccaccgcagccacccccgccgcagtgcccgcagggaccaccgcagccgccgccgccgccgccgctgccgccgccgccgcggccgtcacttcgggggtggcgaccaagtgacccgctccgctcctccctgtgtccgtcctgtgtccgcgcgcgcgggtgcctttcccgccggggactcggccggtgtgcttcgtgctgtagttatcgttagttcctcttcccgagatggggccgccgagagaccccagcgcctttgaaaagcaaggtttgtgctgcgcttccagttccgaaaagcagatgtttaagcccttggactgagggtgggatcgcagctccgaagacggagaggagggaaatggggccctttcccctctattgcatccccctgcccgactccttccccgcacccacgtgccctagattcatggcagaaaatgaccaaatcctgtgtatttgttttatatatttaataactgttttaaatgaaagttttagtaaaaaaaatacaaaacaaaaagattaaattgctattgctgtagtaagagaagctctttgtatctgaacatagttgtatttgaaatttgtggttttttaatttatttaaaattggggggagggcatgggaaggatttaacaccgatatattgttaccgctgaaaatgaactttatgaaccttttccaagttgatctatccagtgacgtggcctggtgggcgtttcttcttgtacttatgtggttttttggcttttaatacagacattttcctccaaaaaaaaaaaaaaaaagg

SEQ ID NO: 4450 - protein, 150 aa, Homo sapiens
GRRTGRLRPAAAPSAAAATAGAPTALPAYPAAEPPGPLWLQGEPLHFCCLDFSLEELQGEPGWRLNRKPIESTLVACFMTLVIVVWSVAALIWPVPIIAGFLPNGMEQRRTTASTTAATPAAVPAGTTAAAAAAAAAAAAAAVTSGVATK

SEQ ID NO: 4451 - DNA, 1294 bp, Homo sapiens
gtttttgagtccatcacccagttcagatcgagtcagaggccaaggaggagaacatgatgatggacctttttgaaactggctcctatttcttctacttggatggggaaaatgttactctgcagccattagaagtggcagaaggctctcctttgtatccagggagtgatggtaccttgtccccctgccaggaccaaatgcccccggaagcggggagcgacagcagcggagaggaacatgtcctggcgcccccgggcctgcagcctccacactgccccggccagtgtctgatctgggcttgcaagacctgcaagagaaaatctgcccccactgaccggcgaaaagccgccaccctgcgcgaaaggaggaggctaaagaaaatcaacgaggccttcgaggcactgaagcggcgaactgtggccaaccccaaccagaggctgcccaaggtggagattctgcggagcgccatcagctatattgagcggctgcaggacctgctgcaccggctggatcagcaggagaagatgcaggagctgggggtggaccccttcagctacagacccaaacaagaaaatcttgagggtgcggatttcctgcgcacctgcagctcccagtggccaagtgtttccgatcattccagggggctcgtgataacggctaaggaaggaggagcaagtattgattcgtcagcctcgagtagccttcgatgcctttcttccatcgtggacagtatttcctcggaggaacgcaaactcccctgcgtggaggaagtggtggagaagtaactgagcctgcgcttgagaccttctccacgcagcaggaagatcccaccgacccttcctggcctaatcctttagattaggtcacattacattaacatttaggaacccagaccgaaaagttgctgaaagggaaggagacacattcacaaagaaaagttgcgaaaattgcgaaatctgttgtgcacgctcaaatgaaaacgcctttcggctttgggcttttatttttttggaactgcgagtggcttaggtctagcctcattttgtttttgtttggttggttttatactatattaacttttattacggtgatccttttgtgccatgttcaaaagaagttcattcctgtctgaagtgggaaagttgcatttaatgttaggggtatttaatgtatttttgtaaatagtttagcactttctttttttacgtaaacctgaaatatattttaaatgtggaatgatgtatataaaatgtgcgaggatcctggtattgtaatattaaaaagaagtttctatatg

SEQ ID NO: 4452 - protein, 242 aa, Homo sapiens
MMMDLFETGSYFFYLDGENVTLQPLEVAEGSPLYPGSDGTLSPCQDQMPPEAGSDSSGEEHVLAPPGLQPPHCPGQCLIWACKTCKRKSAPTDRRKAATLRERRRLKKINEAFEALKRRTVANPNQRLPKVEILRSAISYIERLQDLLHRLDQQEKMQELGVDPFSYRPKQENLEGADFLRTCSSQWPSVSDHSRGLVITAKEGGASIDSSASSSLRCLSSIVDSISSEERKLPCVEEVVEK

SEQ ID NO: 4453 - DNA, 3613 bp, Homo sapiens
cagggagcctggaatggcttagatggtccctttggcagaaaagcctctagagataggtcaggagggacccaggacctgagctctcagcgaggcaagggacagagaggaggaaagaggtccctcggggagcaggggtccctggaggctgagaatggtgaggtccagggtcctggggccctaaaggaggatgaagggcagggagtggaagaggctgggaggtcaggcaggaggcctggctcactcaggagcaggtctcaggcacagtcaggggctgaggttggaggaggaaagagaaggggagcagacgaggctggaagcatggggtggcagcctatgggagagaactgggggtgcctggaggagatgctgaatgaagatcagagccgggagccccctggtcaccttggtagcaggagaagtggcaaagacggcaggttggacatctatggagagaggagagatgctacccggagttccacatccagatacaagcctggcactggcagtttctccaaggatgcccaaggccccatgggccacttctcccagggcctggctgacatggaagtgcagccgggggaggctgccacactctcctgtaccctcaccagtgacctgggacccggcacctggtttaaggatggcgtcaagctcaccacccaggatggagtcatctttaagcaagacggtctcgtgcacagcctcttcatcacgcatgtgcaggggacccaagctgggaggtacacctttgtagctggtgaccagcagagcgaggccaccctgactgtccaggattcccctaccattgctccagatgtgacagagaaactgagagagccactggtggtcaaggctgggaagccggtgatagtgaagatccccttccagagccacctccccattcaggctgcctggaggaaggacggggctgaggtggtgggcagcagtgacagggaggcccaggtggacctgggggatggctacacgcggctgtgcctccccagcgcaggcaggaaggactgtggccagtacagcgtgacactgaggagtgagggaggctctgtgcaggccgagctcactctgcaagtcataggtaccagccctgtcttcccccaactaaggcctgagagtccctggggttctgggccctccctgccatcaagggcaggcctgggatatgatctctgctggctctgatcctcatttgcatgctgtttaagatccagacctaccactaactctgctcagactgcttaggaagaagcagttgagatgaacacagtgctgggctcctgctgggggggaggagccggttatgcttctctgaccccaatacactgggccctcaggaagttgctgggtaggatggtggtccccagccctgagtggtgccagcaagacaagcctgatcccccacaaggccccatggaggttcaggattgccatagggctggcgtctgcctccgctggcggcccccaagggacaatgggggccggactgtagagtgctacgtggtggagagacggcaggctggcaggagcacttggctgaaggtgggcgaggcccccgctgacagcaccaccttcacggatgcccatgtggagccaggcaggaagtataccttccgagtgcgggctgtgacctcagagggggctggcgaggccctggagtctgaggagatattggtggctcctgaggctctccccaaggccccttccgcgccagccatcctgtcggcctccagccagggcatcacactgacatggacagcacctcggggccccggcagcgcccacatcctgggctacctgatcgagaggcgtaagaaggggagcaacacctggacggcagtgaacgaccagccggtgcctgagaggaggtggacggtggcggacgtgcggcagggctgtcagtatgagttccgggtcacagctgtggctccctcaggtcccggagagcctggacctccatcggatgccgtctttgctcgggaccccatgagaccccctgggctggtgaggaatctccaagtcacagacagatcgaacaccagcatcactctgagctgggctgggccagacacccaggaaggggatgaagcccaggggtatgtggtggagctgtgcagctcagacagtctccagtggctcccgtgccatgtaggcaccgtgccagtcaccacctacacggccaaggggcttcggcctggagagggctacttcgtgcgggtgacagcagttaatgaaggaggccagagccagcccagtgccctggacacattagtgcaagccatgcctgttactgtctgtcccaagttcctcgtggactccagcaccaaggacttgctgacagtcaaggtcggggacacagttcgtgtgcccgtctcctttgaacatgcccgcaggcccctgggcccatccacctgcaggagaacgtgcctgggacggtgacggccgagtgggaaccctctcctgacgaggcccaggatgtcccgctgcactacgcggtgttcacacgctcctcagcgcacggtccctggcacgaggcagccgaccgcatctacaccaaccgcttcaccctcctgggcatcctccccggccacgaataccacttcagggtggtggccaagaatgagctgggggccagcaaaccctcggacaccagccagccctggtgcatcccccggcagcgcgacaggttcacagtgaaggctccgtgctaccgggagcccgacctgagccagaagccccggttcctggtgggcctgcggtcccacctgctgccccagggctgcgagtgctgcatgagctgtgccgtgcagggctcgccccggccccacgtcacctggttcaagaatgaccgcagcctggaaggaaaccccgcggtgtacagcactgacctgctgggcgtgtgctccctcaccatccccagcgtatccccgaaggacagcggggagtacaaggctgtggctgagaacacgctgggccaggcagtcagcactgccaccctcattgtcatagaacccagcacctagcctcacctcaccctgggatggtcctggacccttgaagcttcacttccgacacctgcactggcccgggaagccaatcccaaggatggaggctgtgcccagagccccaggaaaatgggagtgagaagatgcctggcgaggttttggccaggaggacgtgaagtccttggggaagaaaaacaagggaggagggcattccacctcctggctccaagctaagtcactcaacagaatgacagcgaacctcctggacccttaccatatgggtttctttcttcttcgcttcaggagatccagagggcacctgcctgcaggatgggccggctccttattttcctgggctgagccgtttggagggagggtgggcacagctgggcctgctgtgaccactgggagggaagaggagaggaggtcagaggacctgggtgaggactagggcatcaaggtcgtgtgtgtgggtgggggcagcctccacctcctggattcaagagattccaggggtgcagcaagtgctttctatgcgtttcttcattaaaacattaggctaatacaggcaaaaaaaaaaaaaaaaaaaaaaaaag

SEQ ID NO: 4454 - protein, 398 aa, Homo sapiens
QGAWNGLDGPFGRKASRDRSGGTQDLSSQRGKGQRGGKRSLGEQGSLEAENGEVQGPGALKEDEGQGVEEAGRSGRRPGSLRSRSQAQSGAEVGGGKRRGADEAGSMGWQPMGENWGCLEEMLNEDQSREPPGHLGSRRSGKDGRLDIYGERRDATRSSTSRYKPGTGSFSKDAQGPMGHFSQGLADMEVQPGEAATLSCTLTSDLGPGTWFKDGVKLTTQDGVIFKQDGLVHSLFITHVQGTQAGRYTFVAGDQQSEATLTVQDSPTIAPDVTEKLREPLVVKAGKPVIVKIPFQSHLPIQAAWRKDGAEVVGSSDREAQVDLGDGYTRLCLPSAGRKDCGQYSVTLRSEGGSVQAELTLQVIGTSPVFPQLRPESPWGSGPSLPSRAGLGYDLCWL

SEQ ID NO: 4455 - DNA, 422 bp, Homo sapiens
  misc_feature (94)..(94): n is a, c, g, or t
  misc_feature (155)..(155): n is a, c, g, or t
  misc_feature (239)..(239): n is a, c, g, or t
  misc_feature (341)..(341): n is a, c, g, or t
  misc_feature (371)..(371): n is a, c, g, or t
  misc_feature (396)..(396): n is a, c, g, or t
ttttttttttttttgtagtttgacattttaatttcatttcagttcacatacacatgaattcaatctcatacaaaatttaaacatagataaaganttccaatacagatcaagacaaatgtccgccttcaggaagaggctggcaaaaacacatacantttgctctcaatcaagtgtacagtgttcaatgagtagagagtttcagttttccaagatgaaaaagttccagagacccgcctggnatttcaccactgatgtgtttaaaagcttcctactgtctcgataagaaagctcctaaggactgttgttctgtgacagtgggtttccggggctgagatccgggncggggcaaatgcagcagttcccaccttctnttaaaggctgcaatgccctgatggngagttctggttgccccaaggcctttt

SEQ ID NO: 4456 - DNA, 423 bp, Homo sapiens
agcggccgccctttttttttttttttttttttttttttttttgttttaaagttttatttgcttacaaaagaaaatggaaataggtttgcgaaaacttatctgcatgtacaaagtaatccccgtagataaggagaggcaacccctggaacaaactgctggataaatcgttcattaaaattatatctctttgcatcagagctggtggaaaatcattatttcacatgagttaaaaccactgaaaaactaaatctgtttcttaaacttccaaatttcgaaagctttaattccaatgcgtttttttgggttccccttgaaaccagttcccaagtgatctcagagttggacagatcaattaaacaagaggtagtttctccaatattggccctttttttcttatcagcaaggttattcctatagcaagta

SEQ ID NO: 4457 - DNA, 375 bp, Homo sapiens
gcacgaggaaaaaagaaaaattgaagaacataacttttctacttatgaaatagataattttttaaaattgtttaaactcctggaaattaagtgttattttttattactgcagttgagagataccttttcagaggaaaacaagaggctaaattccatgttaagagctaagtagtatttttttcttaacaattttgccaaaatttcttctactggaccaaaaggaaataaatctacaataaatctactttctaaatattatttaagatgggaaatgtcttttataggtatattctgtataatacccttaattagatgaattatcccttatcattccaaaaatgaaatgctgtgttaaatatctccagggcaaagtgg

SEQ ID NO: 4458 - DNA, 498 bp, Homo sapiens
  misc_feature (365)..(365): n is a, c, g, or t
tttttcagcttctcctacagtatcacttttacttgtttattttttaattgctgatacagatgcatccataataaatatttggtttttgtgatgctgaaacacagtcccaattacaaggcaacttagaagttaaaactgaaactgaaatataaacagcttaacaccagaaggaagcaaaactatatatgtctttttgcaacagcagttccgaaattgtttttatacactgtaacaacaaaggtaccaacttccttatttcacaaatttaagtttggtttatatattttattgacatggttactcaatgtccacatcattccatctgcatcgtcttcctacaaacagtttttcttctactattcggntatttctcctttttttgtttcctatttcagaatcaaatttattttacttgcaaagtcagtggaatatggtttggaaccagtagggcctctaacttaagcccagaacctgtcaaagagaagtgcagtatcattg

SEQ ID NO: 4459 - DNA, 277 bp, Homo sapiens
ttttttttttttttttttttttttttttttgcctattaaaaatttattagaagtagaatatcaataatccaggggaaagtctacaaccatgtcagaacacaatctaactcctttgatatttacaatctcaaaaaattcaggcatgggtactaagcagacagcagaaacccaacattcaaaaccatcacagcaaaaagtcattccatacaaagacaaaagaactctacaccaggaggctcaccatgtctcgccgaaagttatgaaggggaagtttagc

SEQ ID NO: 4460 - DNA, 313 bp, Homo sapiens
  misc_feature (91)..(91): n is a, c, g, or t
  misc_feature (189)..(189): n is a, c, g, or t
  misc_feature (295)..(295): n is a, c, g, or t
gcggagggaggccgaggcgagagctggcgctgtaggactagaacgaaaggagtgaggcgccgagagcccagataccattttggcgtgaganctggtggttggcaaggccgcgggagtgggaagcgtccgccatgttctgcgaaaaagccatggaactgatccgcgagctgcatcgcgcgcccgaagaancttgcctgccttcaacgaggatggactcagacaagttctggaggagatgaaagctttgtatgaacaaaaccagtctgatgtgaatgaagcaaagtcaagtggacgnagggatttgataccaact

SEQ ID NO: 4461 - DNA, 301 bp, Homo sapiens
tttttttttttttttttcctaatttcagaaatagctttgtgctttcccctgatgaaaaagcaagagatcatagataaaagcttttgcttttggcttggtggttctcaagcaagatggctgatgcctcttcccaaggtagccttcagatctcaggggacagagagaaattaggtactgtggagtggaagcatgtgtaacatacatgaaaccaactaggtgtgctcagagaagctagggagtgatcctgctatgtgccttggagtgagggtgagatcaaggtgcatcttccctcagtcagctc

SEQ ID NO: 4462 - DNA, 3332 bp, Homo sapiens
gcgccgagccggtttccccgccggtgtccgagaggcgcccccggcccggcccggcccggcccgcgccctccgcccccgcctccccgggccggcggcggtgggcgagctcgcgggcccggccgcccccagccccagccccgccgggccccgccccccgtcgagtgcatgaggttgacgctactttgttgcacctggagggaagaacgtatgggagaggaaggaagcgagttgcccgtgtgtgcaagctgcggccagaggatctatgatggccagtacctccaggccctgaacgcggactggcacgcagactgcttcaggtgttgtgactgcagtgcctccctgtcgcaccagtactatgagaaggatgggcagctcttctgcaagaaggactactgggcccgctatggcgagtcctgccatgggtgctctgagcaaatcaccaagggactggttatggtggctggggagctgaagtaccaccccgagtgtttcatctgcctcacgtgtgggacctttatcggtgacggggacacctacacgctggtggagcactccaagctgtactgcgggcactgctactaccagactgtggtgacccccgtcatcgagcagatcctgcctgactcccctggctcccacctgccccacaccgtcaccctggtgtccatcccagcctcatctcatggcaagcgtggactttcagtctccattgaccccccgcacggcccaccgggctgtggcaccgagcactcacacaccgtccgcgtccagggagtggatccgggctgcatgagcccagatgtgaagaattccatccacgtcggagaccggatcttggaaatcaatggcacgcccatccgaaatgtgcccctggacgagattgacctgctgattcaggaaaccagccgcctgctccagctgaccctcgagcatgaccctcacgatacactgggccacgggctggggcctgagaccagccccctgagctctccggcttatactcccagcggggaggcgggcagctctgcccggcagaaacctgtcttgaggagctgcagcatcgacaggtctccgggcgctggctcactgggctccccggcctcccagcgcaaggacctgggtcgctctgagtccctccgcgtagtctgccggccacaccgcatcttccggccgtcggacctcatccacggggaggtgctgggcaagggctgcttcggccaggctatcaaggtgacacaccgtgagacaggtgaggtgatggtgatgaaggagctgatccggttcgacgaggagacccagaggacgttcctcaaggaggtgaaggtcatgcgatgcctggaacaccccaacgtgctcaagttcatcggggtgctctacaaggacaagaggctcaacttcatcactgagtacatcaagggcggcacgctccggggcatcatcaagagcatggacagccagtacccatggagccagagagtgagctttgccaaggacatcgcatcagggatggcctacctccactccatgaacatcatccaccgagacctcaactcccacaactgcctggtccgcgagaacaagaatgtggtggtggctgacttcgggctggcgcgtctcatggtggacgagaagactcagcctgagggcctgcggagcctcaagaagccagaccgcaagaagcgctacaccgtggtgggcaacccctactggatggcacctgagatgatcaacggccgcagctatgatgagaaggtggatgtgttctcctttgggatcgtcctgtgcgagatcatcgggcgggtgaacgcagaccctgactacctgccccgcaccatggactttggcctcaacgtgcgaggattcctggaccgctactgccccccaaactgccccccgagcttcttccccatcaccgtgcgctgttgcgatctggaccccgagaagaggccatcctttgtgaagctggaacactggctggagaccctccgcatgcacctggccggccacctgccactgggcccacagctggagcagctggacagaggtttctgggagacctaccggcgcggcgagagcggactgcctgcccaccctgaggtccccgactgagccagggccactcagctgcccctgtccccacctctggagaatccacccccaccagattcctccgcgggaggtggccctcagctgggacagtggggacccaggcttctcctcagagccaggccctgacttgccttctcccaccccgtggaccgcttcccctgccttctctctgccgtggcccagagccggcccagctgcacacacacaccatgctctcgccctgctgtaacctctgtcttggcagggctgtcccctcttgcttctccttgcatgagctggagggcctgtgtgagttacgcccctttccacacgccgctgccccagcaaccctgttcacgctccacctgtctggtccatagctccctggaggctgggccaggaggcagcctccgaaccatgccccatataacgcttgggtgcgtgggagggcgcacatcagggcagaggccaagttccaggtgtctgtgttcccaggaaccaaatggggagtctggggcccgttttccccccagggggtgtctaggtagcaacaggtatcgaggactctccaaacccccaaagcagagagagggctgatcccatggggcggaggtccccagtggctgagcaaacagccccttctctcgctttgggtcttttttttgtttctttcttaaagccactttagtgagaagcaggtaccaagcctcagggtgaagggggtcccttgagggagcgtggagctgcggtgccctggccggcgatggggaggagccggctccggcagtgagaggataggcacagtggaccgggcaggtgtccaccagcagctcagcccctgcagtcatctcagagccccttcccgggcctctcccccaaggctccctgcccctcctcatgcccctctgtcctctgcgttttttctgtgtaatctattttttaagaagagtttgtattattttttcatacggctgcagcagcagctgccaggggcttgggattttatttttgtggcgggcgggggtgggagggccattttgtcactttgcctcagttgagcatctaggaagtattaaaactgtgaagctttctcagtgcactttgaacctggaaaacaatcccaacaggcccgtgggaccatgacttagggaggtgggacccacccacccccatccaggaaccgtgacgtccaaggaaccaaacccagacgcagaacaataaaataaattccgtactccccaccc

SEQ ID NO: 4463 - protein, 647 aa, Homo sapiens
MRLTLLCCTWREERMGEEGSELPVCASCGQRIYDGQYLQALNADWHADCFRCCDCSASLSHQYYEKDGQLFCKKDYWARYGESCHGCSEQITKGLVMVAGELKYHPECFICLTCGTFIGDGDTYTLVEHSKLYCGHCYYQTVVTPVIEQILPDSPGSHLPHTVTLVSIPASSHGKRGLSVSIDPPHGPPGCGTEHSHTVRVQGVDPGCMSPDVKNSIHVGDRILEINGTPIRNVPLDEIDLLIQETSRLLQLTLEHDPHDTLGHGLGPETSPLSSPAYTPSGEAGSSARQKPVLRSCSIDRSPGAGSLGSPASQRKDLGRSESLRVVCRPHRIFRPSDLIHGEVLGKGCFGQAIKVTHRETGEVMVMKELIRFDEETQRTFLKEVKVMRCLEHPNVLKFIGVLYKDKRLNFITEYIKGGTLRGIIKSMDSQYPWSQRVSFAKDIASGMAYLHSMNIIHRDLNSHNCLVRENKNVVVADFGLARLMVDEKTQPEGLRSLKKPDRKKRYTVVGNPYWMAPEMINGRSYDEKVDVFSFGIVLCEIIGRVNADPDYLPRTMDFGLNVRGFLDRYCPPNCPPSFFPITVRCCDLDPEKRPSFVKLEHWLETLRMHLAGHLPLGPQLEQLDRGFWETYRRGESGLPAHPEVPD

SEQ ID NO: 4464 - DNA, 670 bp, Homo sapiens
ccctctgaccctgcctccagagggaaagcaagacagatgcaggcccctgcaaagccccaggtagaagcatgccccccaggacaaggcgcctcccactagttaggaggaggcccgctctgcagccgccgtcctcaccccaggccaggcctgcagtaccagacgggatagctggccactccacccctgcaccccagggtctcctccctctaccttttggggcaccctgggagcgtgggaagcaggtccgagggcccctgagctggcaaggggaggtgccaggccagctgtggtgccaagatactgagtgacctgggccctggctcagggagcatgtggggccaggcccagcgccccgtcttcctccttctacccccgctgggcctggcctgggcagcgcccctgcagaggcctttgggtccttggtcctgtaacaggaagggggaggctggctggggacgaccgaccacaggctgggacacagctcctggtctgggggctccaagtgacagcatgcaggggagggggctcccagtcagtgctgtgttgggagctttctggaggctgtggactgaaggccttgagggaagcagtggctggaggagggtgctggacccatgacacgttgcttcctctggcttttccctgctgggccgctttctcaaaggcactt

SEQ ID NO: 4465 - DNA, 1527 bp, Homo sapiens
ggcctggcccagttgcaccacgagcgctgcggacactcggggcggcagtcggtctgtcagtcctcccgccaggtcccgcggcccgcacctgccgcccgcacctgcagctccgcacctgcggccagtgcctactgccctctcttgccgcccgcacctgcagccccgcacctgccgcttgcacctgcagccccgcgctctacccggttcaagcatggctgaccaggcgcccttcgacacggacgtcaacaccctgacccgcttcgtcatggaggagggcaggaaggcccgcggcacgggcgagttgacccagctgctcaactcgctctgcacagcagtcaaagccatctcttcggcggtgcgcaaggcgggcatcgcgcacctctatggcattgctggttctaccaacgtgacaggtgatcaagttaagaagctggacgtcctctccaacgacctggttatgaacatgttaaagtcatcctttgccacgtgtgttctcgtgtcagaagaagataaacacgccatcatagtggaaccggagaaaaggggtaaatatgtggtctgttttgatccccttgatggatcttccaacatcgattgccttgtgtccgttggaaccatttttggcatctatagaaagaaatcaactgatgagccttctgagaaggatgctctgcaaccaggccggaacctggtggcagccggctacgcactgtatggcagtgccaccatgctggtccttgccatggactgtggggtcaactgcttcatgctggacccggccatcggggagttcattttggtggacaaggatgtgaagataaaaaagaaaggtaaaatctacagccttaacgagggctacgccagggactttgaccctgccgtcactgagtacatccagaggaagaagttccccccagataattcagctccttatggggcccggtatgtgggctccatggtggctgatgttcatcgcactctggtctacggagggatatttctgtaccccgctaacaagaagagccccaatggaaagctgagactgctgtacgaatgcaaccccatggcctacgtcatggagaaggctgggggaatggccaccactgggaaggaggccgtgttagacgtcattcccacagacattcaccagagggcgccggtgatcttgggatcccccgacgacgtgctcgagttcctgaaggtgtatgagaagcactctgcccagtgagcacctgccctgcctgcatccggagaattgcctctacctggaccttttgtctcacacagcagtaccctgacctgctgtgcaccttacattcctagagagcagaaataaaaagcatgactatttccaccatcaaatgctgtagaatgcttggcactccctaaccaaatgctgtctccataatgccactggtgttaagatatattttgagtggatggaggagaaataaacttattcctccttaaaaaaaaaaaaaaaaaaaaaaaaaaaaaaaaaaaaaaaaaaaaaaaaaaaaaaaaaaa

SEQ ID NO: 4466 - protein, 338 aa, Homo sapiens [sequence omitted]

SEQ ID NO: 4467 - DNA, 3725 bp, Homo sapiens
accgttaaatttgaaacttggcgggtaggggtgtgggcttgaggtggccggtttgttagggagtcgtgtgcgtgccttggtcgcttctgtagctccgagggcaggttgcggaagaaagcccaggcggtctgtggcccagaggaaaggcctgcagcaggacgaggacctgagccaggaatgcaggatggcggcggtgaagaaggaagggggtgctctgagtgaagccatgtccctggagggagatgaatgggaactgagtaaagaaaatgtacaacctttaaggcaagggcggatcatgtccacgcttcagggagcactggcacaagaatctgcctgtaacaatactcttcagcagcagaaacgggcatttgaatatgaaattcgattttacactggaaatgaccctctggatgtttgggataggtatatcagctggacagagcagaactatcctcaaggtgggaaggagagtaatatgtcaacgttattagaaagagctgtagaagcactacaaggagaaaaacgatattatagtgatcctcgatttctcaatctctggcttaaattagggcgtttatgcaatgagcctttggatatgtacagttacttgcacaaccaagggattggtgtttcacttgctcagttctatatctcatgggcagaagaatatgaagctagagaaaactttaggaaagcagatgcgatatttcaggaagggattcaacagaaggctgaaccactagaaagactacagtcccagcaccgacaattccaagctcgagtgtctcggcaaactctgttggcacttgagaaagaagaagaggaggaagtttttgagtcttctgtaccacaacgaagcacactagctgaactaaagagcaaagggaaaaagacagcaagagctccaatcatccgtgtaggaggtgctctcaaggctccaagccagaacagaggactccaaaatccatttcctcaacagatgcaaaataatagtagaattactgtttttgatgaaaatgctgatgaggcttctacagcagagttgtctaagcctacagtccagccatggatagcaccccccatgcccagggccaaagagaatgagctgcaagcaggcccttggaacacaggcaggtccttggaacacaggcctcgtggcaatacagcttcactgatagctgtacccgctgtgcttcccagtttcactccatatgtggaagagactgcacaacagccagttatgacaccatgtaaaattgaacctagtataaaccacatcctaagcaccagaaagcctggaaaggaagaaggagatcctctacaaagggttcagagccatcagcaagcatctgaggagaagaaagagaagatgatgtattgtaaggagaagatttatgcaggagtaggggaattctcctttgaagaaattcgggctgaagttttccggaagaaattaaaagagcaaagggaagccgagctattgaccagtgcagagaagagagcagaaatgcagaaacagattgaagagatggagaagaagctaaaagaaatccaaactactcagcaagaaagaacaggtgatcagcaagaagagacgatgcctacaaaggagacaactaaactgcaaattgcttccgagtctcagaaaataccaggaatgactctatccagttctgtttgtcaagtaaactgttgtgccagagaaacttcacttgcggagaacatttggcaggaacaacctcattctaaaggtcccagtgtacctttctccatttttgatgagtttcttctttcagaaaagaagaataaaagtcctcctgcagatcccccacgagttttagctcaacgaagaccccttgcagttctcaaaacctcagaaagcatcacctcaaatgaagatgtgtctccagatgtttgtgatgaatttacaggaattgaacccttgagcgaggatgccattatcacaggcttcagaaatgtaacaatttgtcctaacccagaagacacttgtgactttgccagagcagctcgttttgtatccactccttttcatgagataatgtccttgaaggatctcccttctgatcctgagagactgttaccggaagaagatctagatgtaaagacctctgaggaccagcagacagcttgtggcactatctacagtcagactctcagcatcaagaagctgagcccaattattgaagacagtcgtgaagccacacactcctctggcttctctggttcttctgcctcggttgcaagcacctcctccatcaaatgtcttcaaattcctgagaaactagaacttactaatgagacttcagaaaaccctactcagtcaccatggtgttcacagtatcgcagacagctactgaagtccctaccagagttaagtgcctctgcagagttgtgtatagaagacagaccaatgcctaagttggaaattgagaaggaaattgaattaggtaatgaggattactgcattaaacgagaatacctaatatgtgaagattacaagttattttgggtggcgccaagaaactttgcagaattaacagtaataaaggtatcttctcaacctgtcccatgggacttttatatcaacctcaagttaaaggaacgtttaaatgaagattttgatcatttttgcagctgttatcaatatcaagatggctgtattgtttggcaccaatatataaactgcttcacccttcaggatcttctccaacacagtgaatatattacccatgaaataacagtgttgattatttataaccttttgacaatagtggagatgctacacaaagcagaaatagtccatggtgacttgagtccaaggtgtctgattctcagaaacagaatccacgatccctatgattgtaacaagaacaatcaagctttgaagatagtggacttttcctacagtgttgaccttagggtgcagctggatgtttttaccctcagcggctttcggactgtacagatcctggaaggacaaaagatcctggctaactgttcttctccctaccaggtagacctgtttggtatagcagatttagcacatttactattgttcaaggaacacctacaggtcttctgggatgggtccttctggaaacttagccaaaatatttctgagctaaaagatggtgaattgtggaataaattctttgtgcggattctgaatgccaatgatgaggccacagtgtctgttcttggggagcttgcagcagaaatgaatggggtttttgacactacattccaaagtcacctgaacaaagccttatggaaggtagggaagttaactagtcctggggctttgctctttcagtgagctaggcaatcaagtctcacagattgctgcctcagagcaatggttgtattgtggaacactgaaactgtatgtgctgtaatttaatttaggacacatttagatgcactaccattgctgttctactttttggtacaggtatattttgacgtcactgatattttttatacagtgatatacttactcatggccttgtctaacttttgtgaagaactattttattctaaacagactcattacaaatggttaccttgttatttaacccatttgtctctacttttccctgtacttttcccatttgtaatttgtaaaatgttctcttatgatcaccatgtattttgtaaataataaaatagtatctgttaaaaaaaaaaaaaaaaaaaaaaaaaaa

SEQ ID NO: 4468 - protein, 1050 aa, Homo sapiens [sequence omitted]

SEQ ID NO: 4469 - DNA, 456 bp, Homo sapiens
tttttttttttttttttgttttttacttgatatcaaattgacatttatttaaaaaagggaaaaaaagacgtagaacagaattcacacagacctttgttattccaagctcctatttatgaatggtgattaatagcaataattctgtctctcttctctctgtgaaatgctaacacttgctaaaggcactcagattctgggcttaacggagacaaggtcacatgggaccataagccagtacgttttttggtagctacccagaaaggaagtttacaaatgttcctcccattcataacgggaagaaaaagtcaaacagctatcagtataagcgttttatgagaagctatttacacagctatttgtccattcagccagagtgacagtaactgctcacaatggtaggggttctcccctgccaagaaagcaaaaacaataacaaaacactttttatcatatatg

SEQ ID NO: 4470 - DNA, 508 bp, Homo sapiens
tttttttttttttttgaaatatgcagaattgggtttattggcatagatgcttatgatatattgttaattgaaaaagcaggtaacaaattaatatacagtattatgttaattatgtaaaaaaagtatacatattcatagaaaaagtttggaacaatctcagatatcatctgtaggctatttctgtttgaaaataaccaaatagatttttgggttgactcaacaaattatggttgagtcagtcttactttcctattttataaatgttttttacatcattgggtatttaatcattttaaaaatctactcaggcatcatttgtataatagtaataataatttaatcccccttatttctcatgtctcatgccttatccatcatccctcatatcctactcttagcccagattttccttgacagctttattttcttggagggcaggtatggggaaccaaatttgtttccttaccctagctctagccatttccacaaaagcttttatagataatgt

SEQ ID NO: 4471 - DNA, 4437 bp, Homo sapiens
gcgcggcggccgtggttgcggcgcgggaagtttggatcctggttccgtccgctaggagtctgcgtgcgaggattatggctgctgttcctcaaaataatctacaggagcaactagaacgtcactcagccagaacacttaataataaattaagtctttcaaaaccaaaattttcaggtttcacttttaaaaagaaaacatcttcagataacaatgtatctgtaactaatgtgtcagtagcaaaaacacctgtattaagaaataaagatgttaatgttaccgaagacttttccttcagtgaacctctacccaacaccacaaatcagcaaagggtcaaggacttctttaaaaatgctccagcaggacaggaaacacagagaggtggatcaaaatcattattgccagatttcttgcagactccgaaggaagttgtatgcactacccaaaacacaccaactgtaaagaaatcccgggatactgctctcaagaaattagaatttagttcttcaccagattctttaagtaccatcaatgattgggatgatatggatgactttgatacttctgagacttcaaaatcatttgttacaccaccccaaagtcactttgtaagagtaagcactgctcagaaatcaaaaaagggtaagagaaacttttttaaagcacagctttatacaacaaacacagtaaagactgatttgcctccaccctcctctgaaagcgagcaaatagatttgactgaggaacagaaggatgactcagaatggttaagcagcgatgtgatttgcatcgatgatggccccattgctgaagtgcatataaatgaagatgctcaggaaagtgactctctgaaaactcatttggaagatgaaagagataatagcgaaaagaagaagaatttggaagaagctgaattacattcaactgagaaagttccatgtattgaatttgatgatgatgattatgatacggattttgttccaccttctccagaagaaattatttctgcttcttcttcctcttcaaaatgccttagtacgttaaaggaccttgacacatctgacagaaaagaggatgttcttagcacatcaaaagatcttttgtcaaaacctgagaaaatgagtatgcaggagctgaatccagaaaccagcacagactgtgacgctagacagataagtttacagcagcagcttattcatgtgatggagcacatctgtaaattaattgatactattcctgatgataaactgaaacttttggattgtgggaacgaactgcttcagcagcggaacataagaaggaaacttctaacggaagtagattttaataaaagtgatgccagtcttcttggctcattgtggagatacaggcctgattcacttgatggccctatggagggtgattcctgccctacagggaattctatgaaggagttaaatttttcacaccttccctcaaattctgtttctcctggggactgtttactgactaccaccctaggaaagacaggattctctgccaccaggaagaatctttttgaaaggcctttattcaatacccatttacagaagtcctttgtaagtagcaactgggctgaaacaccaagactaggaaaaaaaaatgaaagctcttatttcccaggaaatgttctcacaagcactgctgtgaaagatcagaataaacatactgcttcaataaatgacttagaaagagaaacccaaccttcctatgatattgataattttgacatagatgactttgatgatgatgatgactgggaagacataatgcataatttagcagccagcaaatcttccacagctgcctatcaacccatcaaggaaggtcggccaattaaatcagtatcagaaagactttcctcagccaagacagactgtcttccagtgtcatctactgctcaaaatataaacttctcagagtcaattcagaattatactgacaagtcagcacaaaatttagcatccagaaatctgaaacatgagcgtttccaaagtcttagttttcctcatacaaaggaaatgatgaagatttttcataaaaaatttggcctgcataattttagaactaatcagctagaggcgatcaatgctgcactgcttggtgaagactgttttatcctgatgccgactggaggtggtaagagtttgtgttaccagctccctgcctgtgtttctcctggggtcactgttgtcatttctcccttgagatcacttatcgtagatcaagtccaaaagctgacttccttggatattccagctacatatctgacaggtgataagactgactcagaagctacaaatatttacctccagttatcaaaaaaagacccaatcataaaacttctatatgtcactccagaaaagatctgtgcaagtaacagactcatttctactctggagaatctctatgagaggaagctcttggcacgttttgttattgatgaagcacattgtgtcagtcagtggggacatgattttcgtcaagattacaaaagaatgaatatgcttcgccagaagtttccttctgttccggtgatggctcttacggccacagctaatcccagggtacagaaggacatcctgactcagctgaagattctcagacctcaggtgtttagcatgagctttaacagacataatctgaaatactatgtattaccgaaaaagcctaaaaaggtggcatttgattgcctagaatggatcagaaagcaccacccatatgattcagggataatttactgcctctccaggcgagaatgtgacaccatggctgacacgttacagagagatgggctcgctgctcttgcttaccatgctggcctcagtgattctgccagagatgaagtgcagcagaagtggattaatcaggatggctgtcaggttatctgtgctacaattgcatttggaatggggattgacaaaccggacgtgcgatttgtgattcatgcatctctccctaaatctgtggagggttactaccaagaatctggcagagctggaagagatggggaaatatctcactgcctgcttttctatacctatcatgatgtgaccagactgaaaagacttataatgatggaaaaagatggaaaccatcatacaagagaaactcacttcaataatttgtatagcatggtacattactgtgaaaatataacggaatgcaggagaatacagcttttggcctactttggtgaaaatggatttaatcctgatttttgtaagaaacacccagatgtttcttgtgataattgctgtaaaacaaaggattataaaacaagagatgtgactgacgatgtgaaaagtattgtaagatttgttcaagaacatagttcatcacaaggaatgagaaatataaaacatgtaggtccttctggaagatttactatgaatatgctggtcgacattttcttggggagtaagagtgcaaaaatccagtcaggtatatttggaaaaggatctgcttattcacgacacaatgccgaaagactttttaaaaagctgatacttgacaagattttggatgaagacttatatatcaatgccaatgaccaggcgatcgcttatgtgatgctcggaaataaagcccaaactgtactaaatggcaatttaaaggtagactttatggaaacagaaaattccagcagtgtgaaaaaacaaaaagcgttagtagcaaaagtgtctcagagggaagagatggttaaaaaatgtcttggagaacttacagaagtctgcaaatctctggggaaagtttttggtgtccattacttcaatatttttaataccgtcactctcaagaagcttgcagaatctttatcttctgatcctgaggttttgcttcaaattgatggtgttactgaagacaaactggaaaaatatggtgcggaagtgatttcagtattacagaaatactctgaatggacatcgccagctgaagacagttccccagggataagcctgtccagcagcagaggccccggaagaagtgccgctgaggagcttgacgaggaaatacccgtatcttcccactactttgcaagtaaaaccagaaatgaaaggaagaggaaaaagatgccagcctcccaaaggtctaagaggagaaaaactgcttccagtggttccaaggcaaagggggggtctgccacatgtagaaagatatcttccaaaacgaaatcctccagcatcattggatccagttcagcctcacatacttctcaagcgacatcaggagccaatagcaaattggggattatggctccaccgaagcctataaatagaccgtttcttaagccttcatatgcattctcataacaaccgaatctcaatgtacatagaccctctttcttgtttgtcagcatctgaccatctgtgactataaagctgttattcttgttataccaaaaaaaaaaaaaaaaaaaaa

SEQ ID NO: 4472 - protein, 1417 aa, Homo sapiens
MAAVPQNNLQEQLERHSARTLNNKLSLSKPKFSGFTFKKKTSSDNNVSVTNVSVAKTPVLRNKDVNVTEDFSFSEPLPNTTNQQRVKDFFKNAPAGQETQRGGSKSLLPDFLQTPKEVVCTTQNTPTVKKSRDTALKKLEFSSSPDSLSTINDWDDMDDFDTSETSKSFVTPPQSHFVRVSTAQKSKKGKRNFFKAQLYTTNTVKTDLPPPSSESEQIDLTEEQKDDSEWLSSDVICIDDGPIAEVHINEDAQESDSLKTHLEDERDNSEKKKNLEEAELHSTEKVPCIEFDDDDYDTDFVPPSPEEIISASSSSSKCLSTLKDLDTSDRKEDVLSTSKDLLSKPEKMSMQELNPETSTDCDARQISLQQQLIHVMEHICKLIDTIPDDKLKLLDCGNELLQQRNIRRKLLTEVDFNKSDASLLGSLWRYRPDSLDGPMEGDSCPTGNSMKELNFSHLPSNSVSPGDCLLTTTLGKTGFSATRKNLFERPLFNTHLQKSFVSSNWAETPRLGKKNESSYFPGNVLTSTAVKDQNKHTASINDLERETQPSYDIDNFDIDDFDDDDDWEDIMHNLAASKSSTAAYQPIKEGRPIKSVSERLSSAKTDCLPVSSTAQNINFSESIQNYTDKSAQNLASRNLKHERFQSLSFPHTKEMMKIFHKKFGLHNFRTNQLEAINAALLGEDCFILMPTGGGKSLCYQLPACVSPGVTVVISPLRSLIVDQVQKLTSLDIPATYLTGDKTDSEATNIYLQLSKKDPIIKLLYVTPEKICASNRLISTLENLYERKLLARFVIDEAHCVSQWGHDFRQDYKRMNMLRQKFPSVPVMALTATANPRVQKDILTQLKILRPQVFSMSFNRHNLKYYVLPKKPKKVAFDCLEWIRKHHPYDSGIIYCLSRRECDTMADTLQRDGLAALAYHAGLSDSARDEVQQKWINQDGCQVICATIAFGMGIDKPDVRFVIHASLPKSVEGYYQESGRAGRDGEISHCLLFYTYHDVTRLKRLIMMEKDGNHHTRETHFNNLYSMVHYCENITECRRIQLLAYFGENGFNPDFCKKHPDVSCDNCCKTKDYKTRDVTDDVKSIVRFVQEHSSSQGMRNIKHVGPSGRFTMNMLVDIFLGSKSAKIQSGIFGKGSAYSRHNAERLFKKLILDKILDEDLYINANDQAIAYVMLGNKAQTVLNGNLKVDFMETENSSSVKKQKALVAKVSQREEMVKKCLGELTEVCKSLGKVFGVHYFNIFNTVTLKKLAESLSSDPEVLLQIDGVTEDKLEKYGAEVISVLQKYSEWTSPAEDSSPGISLSSSRGPGRSAAEELDEEIPVSSHYFASKTRNERKRKKMPASQRSKRRKTASSGSKAKGGSATCRKISSKTKSSSIIGSSSASHTSQATSGANSKLGIMAPPKPINRPFLKPSYAFS

SEQ ID NO: 4473 - DNA, 502 bp, Homo sapiens
tttttttttttttttaaatacttacagctttattaggagagggctgtggtcacctcagcagccagctcccttgtatacacagtatacacagcccagccagcacccaggtccttccatccttctgcagtacatggagtgcaaaagaaccaaacacaacggcggggagggagggtctaccaatgagtgtcagtgtctagtgcttccgggagccaactgccaggctagggacactcaagtccctcaaactgtcatcagctcctgccagaccccactccagcatgtcgagtgtttgggccagactcctccaatcagtgcacgcgatgggcagaggaggctagggaatcctgagcccaaagctgtattggtccatccccctcaagaagttgttggagctttcagaacgttcctcttcttgtgtagacatgagataccgctgtaactttactccatcaccagaaacctgtgccttgagtctagtctctgctcagccctcgagagcatg

SEQ ID NO: 4474 - DNA, 413 bp, Homo sapiens
agtgcgatacataaggctgaggaagtgggacctccccttttgggtcggtagttcagcgccggcgccggtgtgcgagccgcggcagagtgaggcaggcaacccgaggtgcggagcgacctgcggaggctgagccccgctttctcccagggtttcttatcagccagccgccgctgtccccgggggagtaggaggctcctgacaggccgcggctgtctgtgtgtccttctgagtgtcagaggaacggccagaccccgcgggccggagcagaacgcggccagggcagaaagcggcggcaggagaagcaggcagggggccggaggacgcagaccgagacccgaggcggaggcggaccgcgagccggccatgtcggtggtggggttggacgtgggctcgcagagctgctacatcgcggt

SEQ ID NO: 4475 - DNA, 567 bp, Homo sapiens
  misc_feature (330)..(330): n is a, c, g, or t
  misc_feature (545)..(545): n is a, c, g, or t
tcattaaattagtctttatagtagccaagaaatagaaacaacttaattaacaaatacgaaaatctattaagggtggaaggaggtaagttcataatccatatagtagaataactacagccattaaaagtgataccaagtgtgtatattgatagggaaagatacttcgccatgtaatttaaaaagcaggccacaaatagacactgtcggatgctattttttttaaagtaaatacatatatgtaggaaaaatactggaagatgatatgtaaaaatattgttagcgattatatctggatctatctaattatgtgctctttatttttagagtttnctatattgacttatttgtttacttataaaagaggagaaataagtgtcattttaaagctggaggacatttaaagctggagctgacattacagttgaatgtcaaacggactgatattaaatgcagagtcaggtgtcagctgggtcactatctggcagggatctaaggtgtccattaaactattgcagatgccctgctggtgccatgatggatgagcngggaagggcgccggattgccct

SEQ ID NO: 4476 - DNA, 445 bp, Homo sapiens
  misc_feature (10)..(10): n is a, c, g, or t
  misc_feature (21)..(21): n is a, c, g, or t
  misc_feature (40)..(40): n is a, c, g, or t
  misc_feature (97)..(97): n is a, c, g, or t
  misc_feature (135)..(135): n is a, c, g, or t
  misc_feature (365)..(365): n is a, c, g, or t
  misc_feature (394)..(394): n is a, c, g, or t
  misc_feature (409)..(409): n is a, c, g, or t
  misc_feature (432)..(432): n is a, c, g, or t
cgctaatatnaaatgtattcnaatgatcatctgactcacnaatataaacacttttaactgaaagggaggaacggaaggacaatttccagtgcacagnatcacttggatgaaataagaccagctctttacccttanttttggatatgccttttttggaagagacttagactttatccttattgttgttagtgttgttaatattcgttgcttcagcccacggtgccttggtctctccacaatcaaatggaggatcccccaagcagcttcattacagagtgatattgggaaagtgagatcctctcaccattttgccaagatactctaaaatggacatccaagtttaccagtagaaagacacaggatgncacagaatgggcatggacctttcagcttnacgagcacacctggnagaaatttcagaaccagggttcnggaattcttcaca

SEQ ID NO: 4477 - DNA, 343 bp, Homo sapiens
  misc_feature (221)..(221): n is a, c, g, or t
  misc_feature (241)..(241): n is a, c, g, or t
  misc_feature (248)..(248): n is a, c, g, or t
  misc_feature (256)..(256): n is a, c, g, or t
  misc_feature (294)..(294): n is a, c, g, or t
  misc_feature (326)..(326): n is a, c, g, or t
atctgtatcacaacgtcattaggagttctttcaacaattccataaatatactgtttactagaccttccctgtaaatgttcccaattcccatcctgtctcagacagtcaatagtcctgtgtacagtgactatttgcatgatttctcattgcactgctgcattcaggcactccagggcatgattaaacagtcattaacagtgcctctctggtacagttgatgntgcatgcattgatctttctnctctgcngttttaanatagcctttaattaaaaggaaaaaaataccactactcngcaatgcaaaagtcttcaaaattcttggctcnccgggtattaatcactt

SEQ ID NO: 4478 - DNA, 442 bp, Homo sapiens
tttttttttttttttctgttgttctgtgtatacaagtcatgagtcaccagaatgggcctgtgggagctgagagagaaagagggaaaataagttcttgattaaaaagtagcacatcagaggtcaacaaccatcacagtttagcttcagttgccaaagttgtctccagggatattccaaatttagaaaaccaataaagaaagacatggggatgataagcactgaatgctggatagctgttacctctgggtgacaaagcaatgcattcagggaaggacacacatgggattcaaagatatcagtaaagttttatttctgaggcttagtggtggatacaccaatgttagcaacaaccacacagttcagcttcagttgctgaagcataggctccagaacccacaggccttaagaaaatgctgtgcagttcatcctgattcctctcctc

SEQ ID NO: 4479 - DNA, 296 bp, Homo sapiens
ctttctgcagcaggaactcccagggatgaagattcctcctgtgacccgggctacctgtagccaaaatgcaactggatccagttaatcctctcatttctgacccactttttcctttgaaaatacaataaaattcccccataccggtgtgcatttaaatgttcttttctcttcagcctaattttttatgtgttttacatagttacatttcccaaagtggtattacgaggtgtaattttttttaaagctaacatttaccaagcacgcagagtgcaacaggcagctcatgcataggcatc

SEQ ID NO: 4480 - protein, 108 aa, Homo sapiens
MPLWVFFFVILTLSNSSHCSPPPPLTLRMRRYADAIFTNSYRKVLGQLSARKLLQDIMSRQQGESNQERGARARLGRQVDSMWAEQKQMELESILVALLQKHSRNSQG

SEQ ID NO: 4481 - DNA, 485 bp, Homo sapiens
tttttaaaatgactttgcaggatgtgctttattttaagtcagccctgaacccaaactacacaggatcaatttttgacatattctagtccattcaatgattcttctcagaaactgtatcttaatatggaatgaaaactacatttcaatcataaatttttcatgctacattgttatttaatgaagaggttgtattaccaataataataatttaagaaaaggccatttttatttccccaagctcaatatacatatttctttcataattatgaacttaaaaaacccgtctcagatgtaaaaatgtgaattggaatatgtaaactctttgatatacctgaaaaacaggaaggaaaatgtcacatactggaaaaaccattgccttaaatcatggaaatgggaaaaagcacgttaagggaaggggaaggcagaagagcggtcctgacctcagttattaaagagttacaaagtattctaggtcccactgggtt

SEQ ID NO: 4482 - DNA, 435 bp, Homo sapiens
  misc_feature (2)..(2): n is a, c, g, or t
  misc_feature (5)..(5): n is a, c, g, or t
  misc_feature (25)..(25): n is a, c, g, or t
  misc_feature (27)..(27): n is a, c, g, or t
  misc_feature (187)..(187): n is a, c, g, or t
  misc_feature (283)..(283): n is a, c, g, or t
  misc_feature (294)..(294): n is a, c, g, or t
  misc_feature (300)..(300): n is a, c, g, or t
  misc_feature (306)..(306): n is a, c, g, or t
  misc_feature (331)..(331): n is a, c, g, or t
  misc_feature (400)..(400): n is a, c, g, or t
cngtnttatagacagtcaaacgacngngagccacaaatcaagcacacatatcaaaaaacaaatgagctcttattttgtaaactcattttgcggtcgctatccaaatggcccggactaccagttgcataattatggagatcatagttccgtgagcgagcaattcagggactcggcgagcatgcactcncggcaagtacggctacggctacaatggcatggatctcagcgtcggccgctcgggctccggccactttggctccggagagcgcgcccgagctacgcngcaagcgccangcggcngcaccncgaagccccaaggtacagccagccngggcacgtccacgcactctcctcagcccgatccgctgccctgctccgccgtggccccctcgcccggagngacagcaaccacggcggggaaaaaatccctaaggc

SEQ ID NO: 4483 - DNA, 2061 bp, Homo sapiens
aggaggcgccgggaccatggtcaccctcggctgagtttccggcggcgactttgattattggcaaataaccaccataacaataccgagcccccgggcttgcaccgcacgcactgactccgcgagcccgcacacggccgcgtcgcccgccaccgggccctgagcgccagccccaaacgagccgatggaaaaatccaaaaatttccgcatcgacgccctgctggcggtggaccccccacgagccgcctctgcgcagagcgcgccgctggccttggtcacgtcgctcgccgccgccgcatctggcaccggaggtggcggcggcggcggcggggcgagcggcgggactagcggcagctgcagccccgcgtcctcggagccgccggctgcgcccgccgaccgcctgcgcgccgagagcccgtcgccgccgcgcctgctggccgcgcactgcgcgctgctgcccaagccgggcttcctgggcgcgggcggcggcggcggcggcacgggcggcgggcacggggggccccaccaccacgcgcatccgggcgcacgggccgctgccgccgccgccgccgccgccgccgccgccgccgctgggggcctggcgctggggctgcaccctgggggcgcgcagggcggcgcgggcctcccggcgcaggcggcgctctacggccacccggtctacggctactccgcggcggcggcggcggctgcgctggcgggccagcacccggcgctctcctactcgtacccgcaggtgcaaggcgcgcaccccgcgcaccccgccgaccccatcaagctgggcgccggcaccttccagctggaccagtggctgcgcgcgtccaccgcgggcatgatcctgcctaagatgcccgacttcaactcccaggcgcagtcgaacctcctggggaagtgccgccggccgcgcaccgccttcaccagccagcagctgctggagctggagcaccagttcaagctcaacaagtacctgtcgcggcccaagcgcttcgaggtggccacctcgctcatgctcaccgagacccaggtgaagatttggttccagaaccggcggatgaaatggaaacgcagcaaaaaggccaaagagcaggcggcgcaggaagcggagaaacagaagggcggcggcgggggcgcggggaagggcggcgcggaggagccgggagccgaggagctgctggggccgccagcgcccggagacaagggcagcggacgccgcctgcgggacttgagggacagtgaccccgaggaggacgaggacgaggacgacgaggaccatttcccctacagcaacggcgccagcgtccacgccgcctcctccgactgctcctcggaggacgactcgccgcccccgcggcccagccaccagcccgcgccccagtaggagccccgcggcccagcaggtgcggcgcgcacggagcgccccggccggcggcttctcccggaggccccggcgcccgcacccacccggcccggccccgagagcaggctcgaccgccgccccatggacccctcgcccaggccggggctggagggattcggccgcggcctccggtcctgggcgcttcccttttaagcaagggcgcctcacctgctcttcaagaaacagcgagagggagacccagggggctgaaacttgaactctggttcttttaaaattaattttggttggtgttgggggaggcgcgagtgcgtgtgagaagaaccgacccaccccgcgcaaggggaagcctcctgtctcccctttccccgcgtccgagaaggcggaaacccacagtgttacctgacttatgaaacttgaaaccgcctctggagccgccattctgcagagtatttggaaaaagaaaaaagggtttatgcttacgtctctggggtcggggggattatgtcacgagcgttcaaactgctggaaatctcaaaactgtactgtctttatttttgtatattgtatttatatataaaaagaaacgtctacgtatgcatgctaaattattatttagcttctcccatcgcccacgatggaatgtaaaataaattggttttgtactggat

SEQ ID NO: 4484 - DNA, 386 bp, Homo sapiens
gcacgagcccttctcctggcttttcaggtcccagcttcccttgactgtgactcccaaaagaatagagagactttgctatcctggctgcagtgccaaaattatagagaccaagcggaaacctcccccttgccctctgaagtttcactgaaaaatcaactttctttataaggaaagggagaaaggagagtcggggaatgtagacaattcttttgagggacagtaaataattattagggagaatgaattcctctcctccctaccatttattaaggtataattgatgattaaaaattgtatgtgtttacactgtgtatgatgttttgatatatatatacattatgaaattaataaagcaagctagttaacataaaaaaaaaaaaaaaaaa

SEQ ID NO: 4485 - DNA, 987 bp, Homo sapiens
ggagaagccgggagcgcggggctcagtcggggggcggcggcggcggcggctccggggatggcggcggctccgctgctgctgctgctgctgctcgtgcccgtgccgctgctgccgctgctggcccaagggcccggaggggcgctgggaaaccggcatgcggtgtactggaacagctccaaccagcacctgcggcgagagggctacaccgtgcaggtgaacgtgaacgactatctggatatttactgcccgcactacaacagctcgggggtgggccccggggcgggaccggggcccggaggcggggcagagcagtacgtgctgtacatggtgagccgcaacggctaccgcacctgcaacgccagccagggcttcaagcgctgggagtgcaaccggccgcacgccccgcacagccccatcaagttctcggagaagttccagcgctacagcgccttctctctgggctacgagttccacgccggccacgagtactactacatctccacgcccactcacaacctgcactggaagtgtctgaggatgaaggtgttcgtctgctgcgcctccacatcgcactccggggagaagccggtccccactctcccccagttcaccatgggccccaatgtgaagatcaacgtgctggaagactttgagggagagaaccctcaggtgcccaagcttgagaagagcatcagcgggaccagccccaaacgggaacacctgcccctggccgtgggcatcgccttcttcctcatgacgttcttggcctcctagctctgccccctcccctggggggggagagatggggcggggcttggaaggagcagggagcctttggcctctccaagggaagcctagtgggcctagacccctcctcccatggctagaagtggggcctgcaccatacatctgtgtccgccccctctaccccttccccccacgtagggcactgtagtggaccaagcacggggacagccatgggtcccg

SEQ ID NO: 4486 - protein, 238 aa, Homo sapiens
MAAAPLLLLLLLVPVPLLPLLAQGPGGALGNRHAVYWNSSNQHLRREGYTVQVNVNDYLDIYCPHYNSSGVGPGAGPGPGGGAEQYVLYMVSRNGYRTCNASQGFKRWECNRPHAPHSPIKFSEKFQRYSAFSLGYEFHAGHEYYYISTPTHNLHWKCLRMKVFVCCASTSHSGEKPVPTLPQFTMGPNVKINVLEDFEGENPQVPKLEKSISGTSPKREHLPLAVGIAFFLMTFLAS

SEQ ID NO: 4487 - DNA, 374 bp, Homo sapiens
ttttttgcatttaaaagtgtgttttattgttttgttgggcagtatgaaatatacagtcaaggcagattcgtacagacttgtaaagtcatctcaggaaccttttatgcttaaagtttcctcagccccatttattttcactactatcattcactctttaccactcatatcttccctgctgtctaatcactaatatcttccctcctgtctaatcactaatgtcttccttcctgtttaatcactgagttaagggaaaaatagtcatttacttacaggaatataatgggtattaataacaaaattccatttccccattaaaagctatgtctaataaaaaaaatagtggaggctttatttaaaacttctaaatggcctgg

SEQ ID NO: 4488 - DNA, 418 bp, Homo sapiens
  misc_feature (11)..(12): n is a, c, g, or t
  misc_feature (402)..(402): n is a, c, g, or t
ttctaataacnnagctgaattcttttttatttagccactctcatttcataggcaaagcaagtccaattacatttcatgttatagcaattatctatgtatgttttcctcactccattaaaatttcaccttttccccgacccacattctgcagtgaattcagatctattttccatttttttctcacattatttatatagctacactatcacttccacttccttctcttggggatatagggtaggcatttgggcaacccattttaggcagggttgcttatggcttcaacccatggacaaaatatcacatcctcactttcttcatcactctaggaaatctttctggttggtggtaaaccacctgtggattttcgggcactggtaacaggcttgaggaggggttccnttaggggaggttgggg

SEQ ID NO: 4489 - DNA, 400 bp, Homo sapiens
  misc_feature (385)..(385): n is a, c, g, or t
  misc_feature (399)..(399): n is a, c, g, or t
tttttttttataacaatatattcctccatgggagaggaagtttataaagaaacaataaaagtgagttgcaaagatggcttgtatgtcgtggatgtgccaggaacccggccctgacatgaggccaccactgccctgagcccctgcaggcctgatccgggctttctccccgaccctgcaggtgcccctccctctcaatctgccgcttaggagcagggaactgggaaggttgggaaggaggtaggtgctgagggcgcacaggtgacaggaactgagacagaagattccagggcggacattcccaaggtccaagtccttcagcccacttactgcccgctgcggcttttgggagagttgttgggcaaaggccttttttccccccagccanatttttgggggtant

SEQ ID NO: 4490 - DNA, 285 bp, Homo sapiens
gcgtgtctgggtgcttgagacactccctcaagcagaaaaataagtctttcacagataaatatttgttccatgatctgtaataacatctgataatatatgagtaattattttccaataaactaaaataaaagtaatctttctttttctttctatcttgaagtagtgcgaggaaaaatactatttggaagcgtcatgccctaaaatagtggaaagctttagagggatgggtttcacatcaggaaatctagggaggaaaaatctcttcctctgggatggtgttaggtt

SEQ ID NO: 4491 - DNA, 824 bp, Homo sapiens
ctgcgctagccacctggcaggggcggcggccgccagcgcttcttgcgcacatgatccggctgctgcggctgcggcgctgaagtccggatacccgctggtgtaccccacgcacccgctgcacggtgtgcactcctcgctaacggccgccgcggctgctggcgccacaccgccctccctggccggccaccccctctacccctacggctttatgctccctaacgacccactcccccacatctgcaactgggtgtcggccaacgggccgtgcgacaagcgcttcgccacgtccgaagagctgctgagccacttgcggacccatacggcatttcccgggacagacaaactgctgtcgggctaccccagctcgtcgtctctggccagcgctgccgcggcgccatggcttgccacatgcacatccccacctcgggcgcaccgggcagccctgggacgctggcgctgcgcagcccccaccacgcgctgggactcagcagccgctaccacccctactccaagagcccgcttcccacgcctggcgcccccgtgccggtgcccgccgcaccggaccgtactactccccctacgccctctacggacagagactgaccaccgcctcggcgctggggtatcagtgagggcggccgggagggcgagcgagggagaggagggaagagggggaggggaggagtccaggaagaggcgggatcacggccaggctgtgacaccgcgcgtggggaggactccggccacgaaaggaagaatgtataccgtattatctaccgaagaggacgaaccgtgggaaatcccctttcccaattacttccaat

SEQ ID NO: 4492 - DNA, 489 bp, Homo sapiens
cggccgccgcggcgcggtgcagcgcagcggcgagaaggagtgcgttatcgtcttgcgctactgctgaatgtccgtcccggaggaggaggagaggcttttgccgctgacccagagatggccccgagcgagcaaattcctactgtccggctgcgcggctaccgtggccgagctaggtacccggctgcccacgcctgggcctcccgggccagtggcacgcgccgcgctgggggagggagcgcgggcggcttcgcgcccggcagtgcgcatcggagaggtcgccccttccatgcccgcctggcagaggtggcggtggaggccaggcccgcggtgggaggaggagggattgaggtctccacggccttttccttctaatctcttctaatgcttcccttaggcatgtgctgcggtgcttgaatgttgtactttaagaagcttcgcgagctgtcattcctctgtaggaatcattttccttttcatgaggatgacctt

SEQ ID NO: 4493 - DNA, 5309 bp, Homo sapiens
gccagaatcagccctattgtcggggactgccggatcctcaggacatcattagccaaagccttcaatcgccttctcagcaagctgccaaatccttttatgatcgaatcagtttccttataggatctgatagcacccatgttatacctggagaaagtcctttcaataagagccttgcatctgtcatcagaggccaagtactgactgctgatggaactccacttattggagtaaatgtctcgtttttccattacccagaatatggatatactattacccgccaggacggaatgtttgacttggtggcaaatggtggggcctctctaactttggtatttgaacgatccccattcctcactcagtatcatactgtgtggattccatggaatgtcttttatgtgatggataccctagtcatgaagaaagaagagaatgacattcccagctgtgatctgagtggattcgtgaggccaaatcccatcattgtgtcatcacctttatccacctttttcagatcttctcctgaagacagtcccatcattcccgaaacacaggtactccacgaggaaactacaattccaggaacagatttgaaactctcctacttgagttccagagctgcagggtataagtcagttctcaagatcaccatgacccagtctattattccatttaatttaatgaaggttcatcttatggtagctgtagtaggaagactcttccaaaagtggtttcctgcctcaccaaacttggcctatactttcatatgggataaaacagatgcatataatcagaaagtctatggtctatctgaagctgttgtgtcagttggatatgagtatgagtcgtgtttggacctgactctgtgggaaaagaggactgccattctgcagggctatgaattggatgcgtccaacatgggtggctggacattagataaacatcacgtgctggatgtacagaacggtatactgtacaagggaaacggggaaaaccagttcatctcccagcagcctccagtcgtgagtagcatcatgggcaatgggcgaaggcgcagcatttcctgccccagttgcaatggtcaagctgatggtaacaagttactggccccagtggcgctagcttgtgggatcgatggcagtctgtacgtaggcgatttcaactacgtgcggcggatattcccttctggaaatgtaacaagtgtcttagaactaagaaataaagattttagacatagcagcaacccagctcatagatactaccttgcaacggatccagtcacgggagatctgtacgtttctgacacaaacacccgcagaatttatcgcccaaagtcacttacgggggcaaaagacttgactaaaaatgcagaagtcgtcgcagggacaggggagcaatgccttccgtttgacgaggcgagatgtggggatggagggaaggccgtggaagccacactcatgagtcccaaaggaatggcagttgataagaatggattaatctactttgttgatggaaccatgattaggaaagttgaccaaaatggaatcatatcaactcttctgggctctaacgatttgacttcagccagacctttaacttgtgacaccagcatgcacatcagccaggtacgtctggaatggcccactgacctagccattaaccctatggataactccatttatgtcctggataataatgtagttttacagatcactgaaaatcgtcaagttcgcattgctgctggacggcccatgcactgtcaggttcccggagtggaatatcctgtggggaagcacgcggtgcagacaacactggaatcagccactgccattgctgtgtcctacagtggggtcctgtacattactgaaactgatgagaagaaaattaaccggataaggcaggtcacaacagatggagaaatctccttagtggccggaataccttcagagtgtgactgcaaaaatgatgccaactgtgactgttaccagagtggagatggctacgccaaggatgccaaactcagtgccccatcctccctggctgcttctccagatggtacactgtatattgcagatctagggaatatccggatccgggctgtgtcaaagaataagcctttacttaactctatgaacttctatgaagttgcgtctccaactgatcaagaactctacatctttgacatcaatggtactcaccaatatactgtaagtttagtcactggtgattacctttacaattttagctacagcaatgacaatgatattactgctgtgacagacagcaatggcaacacccttagaattagacgggacccaaatcgcatgccagttcgagtggtgtctcctgataaccaagtgatatggttgacaataggaacaaatggatgtttgaaaagcatgactgctcaaggactggaattagttttgtttacttaccatggcaatagtggccttttagccactaaaagtgatgaaactggatggacaacgttttttgactatgacagtgaaggtcgtctgacaaatgttacgtttccaactggagtggtcacaaacctgcatggggacatggacaaggctatcacagtggacattgagtcatctagccgagaagaagatgtcagcatcacttcaaatctgtcctcgatcgattctttctacaccatggttcaagatcagttaagaaacagctaccagattggttatgacggctccctcagaattatctacgccagtggcctggactcacactaccaaacagagccgcacgttctggctggcaccgctaatccgacggttgccaaaagaaacatgactttgcctggcgagaacggtcaaaacttggtggaatggagattccgaaaagagcaagcccaagggaaagtcaatgtctttggccgcaagctcagggttaatggcagaaacctcctttcagttgactttgatcgaacaacaaagacagaaaagatctatgacgaccaccgtaaatttctactgaggatcgcctacgacacgtctgggcacccgactctctggctgccaagcagcaagctgatggccgtcaatgtcacctattcatccacaggtcaaattgccagcatccagcgaggcaccactagcgagaaagtagattatgacggacaggggaggatcgtgtctcgggtctttgctgatggtaaaacatggagttacacatatttagaaaagtccatggttcttctgcttcatagccagcggcagtacatcttcgaatacgatatgtgggaccgcctgtctgccatcaccatgcccagtgtggctcgccacaccatgcagaccatccgatccattggctactaccgcaacatatacaaccccccggaaagcaacgcctccatcatcacggactacaacgaggaagggctgcttctacaaacagctttcttgggtacaagtcggagggtcttattcaaatacagaaggcagactaggctctcagaaattttatatgatagcacaagagtcagttttacctatgatgaaacagcaggagtcctaaagacagtaaacctccagagtgatggttttatttgcaccattagatacaggcaaattggtcccctgattgacaggcagattttccgctttagtgaagatgggatggtaaatgcaagatttgactatagctatgacaacagctttcgagtgaccagcatgcagggtgtgatcaatgaaacgccactgcctattgatctgtatcagtttgatgacatttctggcaaagttgagcagtttggaaagtttggagttatatattatgatattaaccagatcatttctacagctgtaatgacctatacgaagcactttgatgctcatggccgtatcaaggagattcaatatgagatattcaggtcgctcatgtactggattacaattcagtatgataacatgggtcgggtaaccaagagagagattaaaatagggccctttgccaacaccaccaaatatgcttatgaatatgatgttgatggacagctccaaacagtttacctcaatgaaaagataatgtggcggtacaactacgatctgaatggaaacctccatttactgaacccaagtaacagtgcgcgtctgacaccccttcgctatgacctgcgagacagaatcactcgactgggtgatgttcaatatcggttggatgaagatggtttcctacgtcaaaggggcacggaaatctttgaatatagctccaaggggcttctaactcgagtttacagtaaaggcagtggctggacagtgatctaccgttatgacggcctgggaaggcgtgtttctagcaaaaccagtctaggacagcacctgcagtttttttatgctgacttaacttatcccactaggattactcatgtctacaaccattcgagttcagaaattacctccctgtattatgatctccaaggacatctttttgccatggaaatcagcagtggggatgaattctatattgcatcggataacacagggacaccactggctgtgttcagtagcaatgggcttatgctgaaacagattcagtacactgcatatggggaaatctattttgactctaatattgactttcaactggtaattggatttcatggtggcctgtatgacccactcaccaaattaatccactttggagaaagagattatgacattttggcaggacggtggacaacacctgacatagaaatctggaaaagaattgggaaggacccagctccttttaacttgtacatgtttaggaataacaaccctgcaagcaaaatccatgacgtgaaagattacatcacagatgttaacagctggctggtgacatttggtttccatctgcacaatgctattcctggattccctgttcccaaatttgatttaacagaaccttcttacgaacttgtgaagagtcagcagtgggatgatataccgcccatcttcggagtccagcagcaagtggcgcggcaggccaaggccttcctgtcgctggggaagatggccgaggtgcaggtgagccggcgccgggccggcggcgcgcagtcctggctgtggttcgccacggtcaagtcgctgatcggcaagggcgtcatgctggccgtcagccagggccgcgtgcagaccaacgtgctcaacatcgccaacgaggactgcatcaaggtggcggccgtgctcaacaacgccttctacctggagaacctgcacttcaccatcgagggcaaggacacgcactacttcatcaagaccaccacgcccgagagcgacctgggcacgctgcggttgaccagcggccgc

SEQ ID NO: 4494 - protein, 1769 aa, Homo sapiens
QNQPYCRGLPDPQDIISQSLQSPSQQAAKSFYDRISFLIGSDSTHVIPGESPFNKSLASVIRGQVLTADGTPLIGVNVSFFHYPEYGYTITRQDGMFDLVANGGASLTLVFERSPFLTQYHTVWIPWNVFYVMDTLVMKKEENDIPSCDLSGFVRPNPIIVSSPLSTFFRSSPEDSPIIPETQVLHEETTIPGTDLKLSYLSSRAAGYKSVLKITMTQSIIPFNLMKVHLMVAVVGRLFQKWFPASPNLAYTFIWDKTDAYNQKVYGLSEAVVSVGYEYESCLDLTLWEKRTAILQGYELDASNMGGWTLDKHHVLDVQNGILYKGNGENQFISQQPPVVSSIMGNGRRRSISCPSCNGQADGNKLLAPVALACGIDGSLYVGDFNYVRRIFPSGNVTSVLELRNKDFRHSSNPAHRYYLATDPVTGDLYVSDTNTRRIYRPKSLTGAKDLTKNAEVVAGTGEQCLPFDEARCGDGGKAVEATLMSPKGMAVDKNGLIYFVDGTMIRKVDQNGIISTLLGSNDLTSARPLTCDTSMHISQVRLEWPTDLAINPMDNSIYVLDNNVVLQITENRQVRIAAGRPMHCQVPGVEYPVGKHAVQTTLESATAIAVSYSGVLYITETDEKKINRIRQVTTDGEISLVAGIPSECDCKNDANCDCYQSGDGYAKDAKLSAPSSLAASPDGTLYIADLGNIRIRAVSKNKPLLNSMNFYEVASPTDQELYIFDINGTHQYTVSLVTGDYLYNFSYSNDNDITAVTDSNGNTLRIRRDPNRMPVRVVSPDNQVIWLTIGTNGCLKSMTAQGLELVLFTYHGNSGLLATKSDETGWTTFFDYDSEGRLTNVTFPTGVVTNLHGDMDKAITVDIESSSREEDVSITSNLSSIDSFYTMVQDQLRNSYQIGYDGSLRIIYASGLDSHYQTEPHVLAGTANPTVAKRNMTLPGENGQNLVEWRFRKEQAQGKVNVFGRKLRVNGRNLLSVDFDRTTKTEKIYDDHRKFLLRIAYDTSGHPTLWLPSSKLMAVNVTYSSTGQIASIQRGTTSEKVDYDGQGRIVSRVFADGKTWSYTYLEKSMVLLLHSQRQYIFEYDMWDRLSAITMPSVARHTMQTIRSIGYYRNIYNPPESNASIITDYNEEGLLLQTAFLGTSRRVLFKYRRQTRLSEILYDSTRVSFTYDETAGVLKTVNLQSDGFICTIRYRQIGPLIDRQIFRFSEDGMVNARFDYSYDNSFRVTSMQGVINETPLPIDLYQFDDISGKVEQFGKFGVIYYDINQIISTAVMTYTKHFDAHGRIKEIQYEIFRSLMYWITIQYDNMGRVTKREIKIGPFANTTKYAYEYDVDGQLQTVYLNEKIMWRYNYDLNGNLHLLNPSNSARLTPLRYDLRDRITRLGDVQYRLDEDGFLRQRGTEIFEYSSKGLLTRVYSKGSGWTVIYRYDGLGRRVSSKTSLGQHLQFFYADLTYPTRITHVYNHSSSEITSLYYDLQGHLFAMEISSGDEFYIASDNTGTPLAVFSSNGLMLKQIQYTAYGEIYFDSNIDFQLVIGFHGGLYDPLTKLIHFGERDYDILAGRWTTPDIEIWKRIGKDPAPFNLYMFRNNNPASKIHDVKDYITDVNSWLVTFGFHLHNAIPGFPVPKFDLTEPSYELVKSQQWDDIPPIFGVQQQVARQAKAFLSLGKMAEVQVSRRRAGGAQSWLWFATVKSLIGKGVMLAVSQGRVQTNVLNIANEDCIKVAAVLNNAFYLENLHFTIEGKDTHYFIKTTTPESDLGTLRLTSGR

SEQ ID NO: 4495 - DNA, 186 bp, Homo sapiens
ttctgtgacacccaatccccacatttaaaatagaatgtttggtttatttaaagtaaataggctattttttcttactgggtctggcttctctggcccttcgcatacgtgtgtctgctgagtgttcctgcatgtaagaattaagaccaatggaggggagagagaaacccacacatgggtagtcacaga

SEQ ID NO: 4496 - DNA, 614 bp, Homo sapiens
aatgtcatggctgcaagggcacggggggaaccatcactcctatatgccttccactggaagtgagactggaacggtatcaggctggatttgttgacacctttgatgattctgtaggaggcttcgccaatgtcttatattttgaaattcatggcaagacataagcaacagatttggcaagaggaaatattataacctgaaaaatgggacagattactagaaaagcagcacaaccagggagaagggaagggaaaaaaaggatgacagaataaaaggaaaagagagaaaagtaaaaaaggaaattgaagagaattaagtgttctggtgctgatggagcttaagaatcaggaagtgataataacaataatagttataaaagtaggaatgagatggttagaaagcctcaaacaaaaacgttaggaaggaggggatctttcaggcattaggtgatccatctcctttctttatggctaaagaaaaaaagaaagagaaaaaagaagagaaatagagaacctgcgtgtctgggcctttgggtctaggggatcggactatgatctatgagactctttccacaactaataatctatgactttatacgtcatgtatgttttccagat

SEQ ID NO: 4497 - DNA, 4217 bp, Homo sapiens
cttcccggccccagccaaggctgtcgtttacgtgtcggacattcaggagctgtacatccgtgtggttgacaaggtggagattgggaagacagtgaaggcatacgtccgcgtgctggacttgcacaagaagcccttccttgccaaatacttcccctttatggacctgaagctccgagcagcctccccgatcattacattggtggcccttgatgaagcccttgacaactacaccatcacattcctcatccgcggtgtggccatcggccagaccagtctaactgcaagtgtgaccaataaagctggacagagaatcaactcagccccacaacagattgaagtctttcccccgttcaggctgatgcccaggaaggtgacactgcttatcggggccacgatgcaggtcacctccgagggcggcccccagcctcagtccaacatccttttctccatcagcaatgagagcgttgcgctggtgagcgctgctgggctggtacagggcctcgccatcgggaacggcactgtgtctgggctcgtgcaggcagtggatgcagagaccggcaaggtggtcatcatctctcaggacctcgtgcaggtggaggtgctgctgctaagggccgtgaggatccgcgcccccatcatgcggatgaggacgggcacccagatgcccatctatgtcaccggcatcaccaaccaccagaaccctttctcctttggcaatgccgtgccaggcctgaccttccactggtctgtcaccaagcgggacgtcctggacctccgagggcggcaccacgaggcgtcgatccgactcccgtcacagtacaactttgccatgaacgtgctcggccgggtaaaaggccggaccgggctgagggtggtggtcaaggctgtggaccccacatcggggcagctgtatggcctggccagagaactctcggatgagatccaagtccaggtgtttgagaagctgcagctgctcaaccctgaaatagaagcagaacaaatattaatgtcgcccaactcatatataaagctgcagacaaacagggatggtgcagcctctctgagctaccgcgtcctggatggacccgaaaaggttccagttgtgcatgttgatgagaaaggctttctagcatcagggtctatgatcgggacatccaccatcgaagtgattgcacaagagccctttggggccaaccaaaccatcattgttgctgtaaaggtatcccctgtttcctacctgagggtttccatgagccctgtcctgcacacccagaacaaggaggccctggtggccgtgcctttgggaatgaccgtgaccttcactgtccacttccacgacaactctggagatgtcttccatgctcacagttcggtcctcaactttgccactaacagagacgactttgtgcagatcgggaagggccccaccaacaacacctgcgttgtccgcacagtcagcgtgggcctgacactgctccgtgtgtgggacgcagagcacccgggcctctcggacttcatgcccctgcctgtcctacaggccatctccccagagctgtctggggccatggtggtgggggacgtgctctgtctggccactgttctgaccagcctggaaggcctctcaggaacctggagctcctcagccaacagcatcctccacatcgaccccaagacgggtgtggctgtggcccgggccgtgggatccgtgacggtttactatgaggtcgctgggcacctgaggacctacaaggaggtggtggtcagcgtccctcagaggatcatggcccgtcacctccaccccatccagacaagcttccaggaggctacagcctccaaagtgattgttgccgtgggagacagaagctctaacctgagaggcgagtgcacccccacccagagggaagtcatccaggccttgcacccagagaccctcatcagctgccagtcccagttcaagccggccgtctttgatttcccatctcaagatgtgttcaccgtggagccacagtttgacactgctctcggccagtacttctgctcaatcacaatgcacaggctgacggacaagcagcggaagcacctgagcatgaagaagacagctctggtggtcagtgcctccctctccagcagccacttctccacagagcaggtgggggccgaggtgcccttcagcccaggtctcttcgccgaccaggctgaaatccttttgagcaaccactacaccagttccgagatcagggtctttggtgccccggaggttctggagaacttggaggtgaaatccgggtccccggccgtgctggcattcgcaaaggagaagtcttttgggtggcccagcttcatcacatacacggtcggcgtctcggaccccgcggctggcagccaagggcctctgtccactaccctgaccttctccagccccgtgaccaaccaagccattgccatcccagtgacagtggcttttgtgatggatcgccgtgggcccggtccttatggagccagcctcttccagcacttcctggattcctaccaggtcatgttcttcacgctcttcgccctgttggctgggacagcggtcatgatcatagcctaccacactgtctgcacgccccgggatcttgctgtgcctgcagccctcacgcctcgagccagccctggacacagcccccactatttcgctgcctcatcacccacatctcccaatgcattgcctcctgctcgcaaagccagccctccctcagggctgtggagcccagcctatgcctcccactaggccgcgtgaaggttcccggaggatgggtctcagccgagcctcgtgcacccccaagatggaacatccctgctgcattcacactggaacaagcccctccagatgagtgccccggccccaggccagcttcactgccgtctcttcacacagagctgtagtttcggctctgcccattagctcattttatgtaggagttttaaatgtgtgtttttttcctttcaagtcttacaaagctaagactttttggctcattcctttttgcatggttgtctagggtttctggacaatgtgctgttgcatttttattttcctagccttgctaaaatctttcccttctcaagactttgagcagttagaagtgctctttagaagttgtctgtgggtgatgttactgtagtggtctcagggaaaggattgtccagttactttagggggtttttggtggggtttttccccctgtgaaaacttactttgcccctagtctggctgctgctaggacttctgaggagcaatgggacatgagtgtccctgtatctgcgccactgccgcaagggaagcctcaggaaccagcacctggaggccaggatagccaagccctgggtgagcgagaggctggagaacacaggagctcacccagggctgctgcccaaccatgggccactgtgaacagacttcagtcctctgtttttgtttcataagccgttgagacatctgatggacttggcttaggccctgctgggacatcccacgtgtgatccctttcactccatcaggacaccaggactgtccttaggaaaatgtccttgagatggcagcaggagtcatattttctgtgtgtgtgtttcggaaagccgctgtgtcctgcctcagcacaaagacccagtgtcatttgctcctcctgttcctgtgccactccagaacctcagcagatctgagccaccgcctgccagtgtgagaggcggccactttcatggcagcttatcaggcgcagggccccagacagcttcccagccggccctagagcccggcctgggccaatgatggagggcggccaccagcccagggcctgcccatccagaagggactccccagggcctgggggaggagacccttggaaaagtcctctcttcccagctcctgattctggatctgagattctcagatcacaggcccctgtgctccaggccgaggctgggccaccctcagggagatccagagactcatgcccatggccatccatgcgtggacgctgtgtggagagtccaggatgacgggatcccgcacaagctcccttcagtccttcagggctgggccatgtggttgatttttctaaagctggagaaaggaagaattgtgccttgcatattacttgagcttaaactgacaacctggatgtaaataggagcctttctactggtttatttaataaagttctatgtgatttttt

SEQ ID NO: 4498 - protein, 923 aa, Homo sapiens
FPAPAKAVVYVSDIQELYIRVVDKVEIGKTVKAYVRVLDLHKKPFLAKYFPFMDLKLRAASPIITLVALDEALDNYTITFLIRGVAIGQTSLTASVTNKAGQRINSAPQQIEVFPPFRLMPRKVTLLIGATMQVTSEGGPQPQSNILFSISNESVALVSAAGLVQGLAIGNGTVSGLVQAVDAETGKVVIISQDLVQVEVLLLRAVRIRAPIMRMRTGTQMPIYVTGITNHQNPFSFGNAVPGLTFHWSVTKRDVLDLRGRHHEASIRLPSQYNFAMNVLGRVKGRTGLRVVVKAVDPTSGQLYGLARELSDEIQVQVFEKLQLLNPEIEAEQILMSPNSYIKLQTNRDGAASLSYRVLDGPEKVPVVHVDEKGFLASGSMIGTSTIEVIAQEPFGANQTIIVAVKVSPVSYLRVSMSPVLHTQNKEALVAVPLGMTVTFTVHFHDNSGDVFHAHSSVLNFATNRDDFVQIGKGPTNNTCVVRTVSVGLTLLRVWDAEHPGLSDFMPLPVLQAISPELSGAMVVGDVLCLATVLTSLEGLSGTWSSSANSILHIDPKTGVAVARAVGSVTVYYEVAGHLRTYKEVVVSVPQRIMARHLHPIQTSFQEATASKVIVAVGDRSSNLRGECTPTQREVIQALHPETLISCQSQFKPAVFDFPSQDVFTVEPQFDTALGQYFCSITMHRLTDKQRKHLSMKKTALVVSASLSSSHFSTEQVGAEVPFSPGLFADQAEILLSNHYTSSEIRVFGAPEVLENLEVKSGSPAVLAFAKEKSFGWPSFITYTVGVSDPAAGSQGPLSTTLTFSSPVTNQAIAIPVTVAFVMDRRGPGPYGASLFQHFLDSYQVMFFTLFALLAGTAVMIIAYHTVCTPRDLAVPAALTPRASPGHSPHYFAASSPTSPNALPPARKASPPSGLWSPAYASH

SEQ ID NO: 4499 - DNA, 639 bp, Homo sapiens
gaagtgtgtagcaagtgaggagatatcctgatgaataaataacaagatgagagatgagctggaagttagagcaaggaagctggaagaagcagctacaggtgaggtcagtaacaggcagaagagctgggacgagacaaaaatacagcctaagagagaaagtcatggttaattatgaatcccacaaccacttagccacttctctactgatgggttcatatgcagacttctttttaactatgagcttggaatgagatttcagtcttctgctatgcccatactgaatcctgttttcctgcctccctcaaaaacgggaagagaaaatatggggtgagatttaaccagaatatctgaaattcttttgagagggaaaaatagtaaatgctccttttttttttggaaatagtctcataggccggatggagtgcaggggcgcgatctgggctcacggcaacttccgcctcccgtgttcaagcagttctccggcctccacctcctgagtagctgggattacaggcgtgcacaaccacacccagctaatttacgtatcttcagtagagacgggggtcttaccatgtgggccaggctggtctggaactcctgacctcaagtgatctacctgcttcagcttcccaaaggtgt

SEQ ID NO: 4500 - DNA, 953 bp, Homo sapiens
cggggctgctgctgctgctgggccaggtggccgacgggctgtgcacaccgctcgtgggctacgaggccgaccgcgccgccagctgctgcgcccgctacggcccgcgcaaggcctggcacctggtcggcaccgtctgcgtcctgctgtccttccccttcatcttcaggcccctgcctgggctgtggggcggccacgcccgagtgggctgccctcctctactacggcccgttcatcgtgatcttccagtttggctgggcctccacacagatctcccacctcagcctcatcccggagctcgtcaccaacgaccatgagaaggtggagctcacggcactcaggtatgcgttcaccgtggtggccaacatcaccgtctacggcgccgcctggctcctgctgcacctgcagggctcgtcgcgggtggagcccacccaagacatcagcatcagcgaccagctgggggtgccagggacgtgcccgtgttccggaacctgtccctgctggtggtgggtgtcggcgccgtgttctcactgctattccacctgggcacccgggagaggcgccggccgctgcggaggagccaggcgagcacacccccctgttggccctgccacggccaagccctgctgctctgagaagcactggctccgggagccggtttctaccagggtgggctactgtgcatgaccaccaggctccatcgtgaacctgtcccagacctacatgggctgttacttcacttatcggtacaacctgcgcaaaggtctccgcggaccttccctggttgtgtacctcagggcgtttgtccccttctcatgagccctcgaagttgtttggggggcatggacaactctggcgccggggactgcctgccccggtgccaccgagtaggttggccacaccggtgtgctgggagcaaacccacctcgaagacacttcccacaaggcgtctccta

SEQ ID NO: 4501 - DNA, 371 bp, Homo sapiens
accagtggatcggtctccaaaataaatcaatcaatcaaataaagaccaaagtcaaaccgcacatcaggatctctcacacccttccaattttgccatctaccagcacttagctaaacccatctcccatctcttccaccatgaattcactctttcaaaaaggctaatgtcttcttactcacccttgcctctaagcctttgctatcaccatttcccccaagctggagggccctccctctccctttacccctcttccactacctcccacccctactttttccagatagccatttcctctcttttttctgattgatccttccctctcacccaggattagatgctggaaatgaccacttctggagggcagggaacaa

SEQ ID NO: 4502 - DNA, 422 bp, Homo sapiens
ttttttttttttttgcacataaaaaacgtttattgaacaaacgaatcctgtatgttcctccccccaggcaggaaacgctccctgggagggagggtagtctattggtgagctaggacgtttggactcagggttccgaggaaccaggagcgatccttagtgggccgagacttccgaatttgatcaaaggtaaagagggactggagagcggtccatctgacttctgtgggggatgggcaggagtcaggggcggacgcctgaatcttgtttctcagaagagccgagaggcctaggctcaagcttggggcgatccggtacttggaggttcgaagctcctagtttcgggttgagaccgatgtggagggcgatgacgcgcgggttccttgacatcgaggatcagtaacacccggagtgggtggggaaca

SEQ ID NO: 4503 - DNA, 273 bp, Homo sapiens
acccttacggcttgaatgtttgctgcctctgggaagaagtagagaggagagggtataagaaggacgctgacaccaggctttcctgtagtacttattcacagagccaggtgcttgagtactggtggtggtgtggggggattgtccattgatcctccttgacttttgccataagagaggctttatttatgggctactggctttctctcatttgttatgtgtttttttttcttttcatgcagtgatcagaatataatgtccaaacattcaagccgt

SEQ ID NO: 4504 - DNA, 628 bp, Homo sapiens
aattcgtagacacagaatacagattagtggttgccagggcctggagggagaggaagatggggataaactgcttaatgggtaagaagttttactttggagtgatgggaatgttttaaaaatagaggtggtggttgcataacattatagatgtactaaatgccgctgttcgttttagaatgattttatgttatgttaatttcacctcagtaaatgtttaaatcaaatgaaaacaacttgctgtaggagatgaagaagtaaggagcaccccatctgagtgtgagatgcctctggggtttgtccaacacacagcccagccgaggctctgagggaggtcgtggtgcagccactgatgcatcacagccacacgtggcattcacacaagcatggtttatgacttgggtaattatccaagctgttccacaaacctggaggtcactcatcgtaaaagtctttaatcataaagatgtgtttcctcttcacagaaggtgtgttttgttctgggaaggctcagagtccttgtccttttttccaattgggtgtcagagtacagtgcaagcaactggtatttgctttcaaatctttttcttcaccttttaggcccaattttactgcttttttaaaagatgtc

SEQ ID NO: 4505 - DNA, 552 bp, Homo sapiens
tggcttgtgctgctgatcttgaggatccccgtgtgatagccggacatgtttcagtgtggcgatccagagataggcctgcctgccttactaaaaggcaaggagtagtttacgaggaaatgggcaggagtacagtctgagaatgagttgtcagaagtcacaagcccttagagaagggtggcaagaaattagcccactgataagaaaaaggctgaaacaccaatgtgctgccctctaaagtgagaggaacactcagagccagctacaggcagtgaggagccctgaggaagaagttgggaatgccgtgaatactatgtgggccatctctccagtcaagggagaaaaggagcccaaaaggggacggcaagccagaagaggcatcggctctgcacaattgtcaccagagtaacttctaaaatttaaaattgggattcattccctagggtgtacagacgggctacaggtgtctgaaaatgttttgctgtcagaagcaaaattgtttgtgtctaggtatttttctggggagagtctctatagctttcatcagattctcca

SEQ ID NO: 4506 - DNA, 399 bp, Homo sapiens
agatccaaatgaatccaagattaaatataaacacctaatccataaatataactgatgaaaacataatcattttagctcactgagcttgcttgaaagataaaaaacataaaaatgaagataatgattttgatcacctaagattgtaaagcttttaacaatgttaaaaaacaaggaaaaatactcataacctataacaatttattttcctaatatacaaaaagttcatttgttgagtgtttgttatgtgttaagcactacatacaatatcccatttaattctcacaacaatcctgacaggaaagtactaattaacatcgtaattttacagatgaaataactcagagcttaagtaaggccttcccagttttgccacagaatactagtatggtagaaccgact

SEQ ID NO: 4507 - DNA, 260 bp, Homo sapiens
  misc_feature (219)..(219): n is a, c, g, or t
agcagcgtcttggtcttgcggcgcggtcggtacttgtagtccggatactccttcatgtgcacggcgcgaagtcgcttggcctcgtcgatgaatggtcgcttctcggcgtcggtcagcagtttccagtcggcgcccaagcgcttgctgatctcagaattgtgcatcttggggttctccagggccattttgcgccgctgcccgcgggaccataccatgaangcgttcattgggccgtttcacacggtcctgggtctgtaccc

SEQ ID NO: 4508 - DNA, 558 bp, Homo sapiens
gattctagaggatcccaaggttgatgaaactgccaccacagcatctcttgaggacccccatggattgctgtgcgcagaggagaccccatgggtaccactcaggctagccaatggccccacacagtctctaacctttcctggggagctacggagcaggctctgggtttggcattttgcttctgtccctcgagtgaaatgtgcctctgcttcatttcgtggaaaatcgggtttgtgatttttgtgattctgctttagcccaggattcgagggatcatgtccacatttgtaggccatccagggagcagagagaaacttttagggccgtgataaagacaagccaagtggaaaatagccttgtgcctcattggcacacctggtgtctttatttccattagccctgattgatcaagcgttgctggtctgtgggcacttcacgctcccagagagaccagattggagctgtcctgttgaatctgggctgtaccagatcatcactggagagtgggagggggcgtcttgttagattcctaggtaacccctgtccccatttctaaaata

SEQ ID NO: 4509 - DNA, 329 bp, Homo sapiens
tcgatctagaggatcccacaacattggctcgactcaaggcctgaacacttctgttgtcttcttgatcaccttccttgaagagaggggccaaagccggcacgttctgcggagactgtctctagacctaggaaggggcacaccagggcagcggacgatttgctccgcgtctctcaaaactactgccagcccaattagtaaaccgagagggcagccctgagatgcaggatggccagagagttgaaatgagtctgggagttaagagtgggatggggcggacgaacaggcgtggggagggtaaacaacgcaccaggagcgggagtgagaacagg

SEQ ID NO: 4510 - DNA, 464 bp, Homo sapiens
cggccgccaactttttcttttcatagagcagtttggaaacactctgtttgtaatgtctgcaagtggatatatggacggcattgaggccttcgttggaaacgggatttcttcatttcatgctagacagaagaattctcagtaacttctttgtgctgtgtgtattcaactcacagagtggaacgtccctttgcacagagcagatttgaaacactctttttgtggagtttgcaagtggagatttcaagcgatttgatgccaacagtagaaaaggaagtatcttcaaataaaaactagacagaatcattctcagaaactactttgtgatgtgtgccttcaactcaccgagtttaacctttcttttctgagagcagcttagaaacactctgcttgttatgtctgcaagttgatatttggacctctttgaggccttcgttgcaaacggggtttcttcctttaatgctaga

SEQ ID NO: 4511 - DNA, 919 bp, Homo sapiens
cgctcgcctccctcgctccacgcgcgcccggacgcggcggccaggcttgcgcgtggttcccctcccggtgggcggattcctgggcaagatgaagtgggtgtgggcgctcttgctgttggcggcgtgggcagcggccgagcgcgactgccgagtgagcagcttccgagtcaaggagaacttcgacaaggctcgcttctctgggacctggtacgccatggccaagaaggaccccgagggcctctttctgcaggacaacatcgtcgcggagttctcggtggacgagaccggccagatgagcgccacagccaagggccgagtccgtcttttgaataactgggacgtgtgcgcagacatggtgggcaccttcacagacaccgaggaccctgccaagttcaagatgaagtactggggcgtagcctcctttctgcagaaaggaaatgatgaccactggatcgtcgacacagactacgacacgtatgccgtacagtactcctgccgcctcctgaacctcgatggcacctgtgctgacagctactccttcgtgttttcccgggaccccaacggcctgcccccagaagcgcagaagattgtaaggcagcggcaggaggagctgtgcctggccaggcagtacaggctgatcgtccacaacggttactgcgatggcagatcagaaagaaaccttttgtagcaatatcaagaatctagtttcatctgagaacttctgattagctctcagtcttcagctctatttatcttaggagtttaatttgcccttctctccccatcttccctcagttcccataaaaccttcattacacataaagatacacgtgggggtcagtgaatctgcttgcctttcctgaaagtttctggggcttaagattccagactctgattcattaaactatagtcacccgtg

SEQ ID NO: 4512 - protein, 199 aa, Homo sapiens
MKWVWALLLLAAWAAAERDCRVSSFRVKENFDKARFSGTWYAMAKKDPEGLFLQDNIVAEFSVDETGQMSATAKGRVRLLNNWDVCADMVGTFTDTEDPAKFKMKYWGVASFLQKGNDDHWIVDTDYDTYAVQYSCRLLNLDGTCADSYSFVFSRDPNGLPPEAQKIVRQRQEELCLARQYRLIVHNGYCDGRSERNLL

SEQ ID NO: 4513 - DNA, 304 bp, Homo sapiens
gcggccgcggggctgccctgcgccgcgggcggcttcatgtggcggctcagctgggcccggcgcgcgtggccttgggtcctgcgaggtggcagccggggctattcgggggcttgctgtcccgcacacttcagccctgccagtcccttcggcgctgcgctccagccgcgccgctcccagcacggtccgcgcccgccctaccaccggctcgggttcctagatcttatagccttcggcgggcggagcggaggcggggccggggcggggctgcggagccggggcgacgggtctgtccccgccgccctcc

SEQ ID NO: 4514 - DNA, 349 bp, Homo sapiens
  misc_feature (25)..(25): n is a, c, g, or t
aaataatagcaaaaatatcattttncccctctagaatacaaattattgagctgtcaaaacttggcatgaagaatatactattacttaggcttaaatatcaaaagataatggctacttcagtgtcatattgttgaaatagaaacaaaactgcatggttcaagcatcctaatcattagtgccaatgaatgatagtgcaggcaagtgccaggtaaatgcctagtcccacttcattctcctcctgggaagaaaggataagaatagtggctgcagataaggtatggaaatatttaatcaagactgtcttaaacacataagcatatataatgttatcaaggttaccagtgctgcc

SEQ ID NO: 4515 - DNA, 335 bp, Homo sapiens
  misc_feature (12)..(12): n is a, c, g, or t
  misc_feature (29)..(29): n is a, c, g, or t
  misc_feature (47)..(47): n is a, c, g, or t
  misc_feature (217)..(217): n is a, c, g, or t
  misc_feature (318)..(318): n is a, c, g, or t
ccacccaacggntacctaacctttttttnttctcaatgacatatctntgtattggtcttccaccatcatttttaggtggctcccactttaggtcaacatgtcgttttgtcacatcaaccactgccagggcgtagggtggtccaggagtggtaaaggtgtctttggccagcacagagtcctcaatttcggtgtagtcgctttgtcctatagcattttntgcagcaactcggaacacatataaagagccctcagtcagtggggtgactgtgcacttggtgtccttgacagtggtatccactgttttgccagccttttcgnctgacggctctcttttt

SEQ ID NO: 4516 - DNA, 2676 bp, Homo sapiens
gtggacacacaagagttaactggcgggtgtgacaggcggaccgccctcaggaagtgttactcactggggatgtgcgtgccttgccttgggactggattctcttcctgaagcgaaggggctcccagccatggaaagccctggagagtcaggcgcgggctctcctggagcccccagcccgtccagcttcactactgggcacctggcgagagaaaagccagcccaggacccactgtatgacgtgcccaatgccagcggcgggcaggcaggcgggccgcagcggccggggcgcgttgtgagcctgcgggagcgcctgctgctcacccggcccgtgtggctgcagctgcaagccaacgcagcggccgcactgcacatgctgaggaccgagcccccggggacgttcctcgtgcggaaatctaacacccgccagtgccaggccctgtgcatgcggttgcctgaagccagtggcccctccttcgtctccagccactacatcctggagagccctggcggcgtctccttggagggctcggagctcatgttcccagacctagtccagctcatctgtgcctactgccacacccgggacatccttctcctcccgctgcagctccccagagccatccaccacgcagccactcacaaagagctggaggccatctcccatctgggcattgagttctggagctcctccctcaacatcaaggctcagcggggcccggctggaggcccagtgttgccccagctgaaggcccggtcccctcaagagctggaccagggcaccggagccgccttgtgcttcttcaaccccctgttcccgggggacctagggcccaccaagcgggagaaattcaagagaagcttcaaagtgcgcgtgtccacagagacctccagccccctgtctccacctgccgtgccacctccccccgtccccgtgctgccaggggcagtccccagccagacagagcggctgcccccttgccagctgctacggagggagagctcagtggggtaccgcgtgccagcaggcagtggccctagccttccgcctatgccctccctccaagaggtggactgcggctcccccagcagctccgaggaggagggggtgccagggtcccgggggagcccagcgacctcaccccacctgggccgccgacgacctctgcttcggtccatgagcgccgccttctgctccctactggcaccggagcggcaggtgggccgggctgcggcagcactgatgcaggaccgacacacagccgcgggccagctggtgcaggacctactgacccaggtgcgggatgggcagaggccccaggagctcgagggcatccgtcaggcgctgagccgggcccgggccatgctgagtgcggagctgggccctgagaagctcgtgtcgcctaagaggctggaacatgtcctggagaagtcattgcattgctctgtgctcaagcctctccggcccatcctggcagcccgcctgcggcgccggcttgccgcagacggctccctgggccgcctagctgagggcctccgcctggcccgggcccagggccccggagccttcgggtcccacctgagcctgccctccccagtagagttggagcaagtgcgccagaagctgctgcagctcgtccgcacctactcacccagcgcccaggtcaagcggctcctgcaggcctgcaagctgctctacatggccctgaggacccaggaaggggagggctcgggtgccgacgggttcctgcctctgctgagcctcgtcttggcccactgtgaccttcctgagctgctgctggaggccgagtacatgtcggagctgctggagcccagcctgcttactggagagggtggctactacctgaccagcctctctgccagcctggccctgctgagtggcctgggtcaggcccacaccctcccactgagccccgtgcaggagctacggcgctccctcagcctctgggagcagcgccgcctgcctgccacccactgcttccagcacctcctccgagtagcctatcaggatcccagcagtggctgcacctccaagaccctggccgtgcccccagaggcctcgattgccaccctgaaccagctctgtgccaccaagttccgagtgacccagcccaacacttttggcctcttcctgtacaaggagcagggctaccaccgcctgccccctggggccctggcccacaggctgcccaccactggctacctcgtctaccgccgggcagagtggcctgagacccagggggctgtgacagaggaggagggcagtgggcagtcagaggcaagaagcagaggggaggagcaagggtgccagggagatggggatgctggggtcaaagccagccccagggacattcgggaacagtctgagacaactgctgaagggggccagggtcaagcccaggaaggccctgctcagccaggggaaccagaggcagagggaagccgggcagcagaggagtagcttgaagtggccagaagggtcattcggggcgggagaccctgagcctgctgagaaatccttttagcgccagcaagccccacccagggccctgtcctgtgtctgccaccacctttgtctgatacttgtttccagggaagctgggggaactgccacatctgaggaactggaataaagatgaggggccttcgggggccaat

SEQ ID NO: 4517 - protein, 783 aa, Homo sapiens
MESPGESGAGSPGAPSPSSFTTGHLAREKPAQDPLYDVPNASGGQAGGPQRPGRVVSLRERLLLTRPVWLQLQANAAAALHMLRTEPPGTFLVRKSNTRQCQALCMRLPEASGPSFVSSHYILESPGGVSLEGSELMFPDLVQLICAYCHTRDILLLPLQLPRAIHHAATHKELEAISHLGIEFWSSSLNIKAQRGPAGGPVLPQLKARSPQELDQGTGAALCFFNPLFPGDLGPTKREKFKRSFKVRVSTETSSPLSPPAVPPPPVPVLPGAVPSQTERLPPCQLLRRESSVGYRVPAGSGPSLPPMPSLQEVDCGSPSSSEEEGVPGSRGSPATSPHLGRRRPLLRSMSAAFCSLLAPERQVGRAAAALMQDRHTAAGQLVQDLLTQVRDGQRPQELEGIRQALSRARAMLSAELGPEKLVSPKRLEHVLEKSLHCSVLKPLRPILAARLRRRLAADGSLGRLAEGLRLARAQGPGAFGSHLSLPSPVELEQVRQKLLQLVRTYSPSAQVKRLLQACKLLYMALRTQEGEGSGADGFLPLLSLVLAHCDLPELLLEAEYMSELLEPSLLTGEGGYYLTSLSASLALLSGLGQAHTLPLSPVQELRRSLSLWEQRRLPATHCFQHLLRVAYQDPSSGCTSKTLAVPPEASIATLNQLCATKFRVTQPNTFGLFLYKEQGYHRLPPGALAHRLPTTGYLVYRRAEWPETQGAVTEEEGSGQSEARSRGEEQGCQGDGDAGVKASPRDIREQSETTAEGGQGQAQEGPAQPGEPEAEGSRAAEE

SEQ ID NO: 4518 - DNA, 432 bp, Homo sapiens
  misc_feature (376)..(376): n is a, c, g, or t
  misc_feature (388)..(388): n is a, c, g, or t
  misc_feature (393)..(393): n is a, c, g, or t
gcatcagacatcaccactcctgaaaaaaaccttctacaagaattgaaaagtgttgcaggacctaatactgaaataggaaatatggactatcttcaaactgcacaaatgatgcatgaatccacatttgagacccgcaactccgaggtacctaatgtgaatgattaaagatattttacaaaccggggagccctttcaagtgctttccactttcaaccttctctctttgaagaccccaattcataatgggtgaggcataaaacatggcatactggggaatttttatggggccccatatatacattccagactgtacatggaatggtcttgatctttggggttctgatatttaggggcaaggtctaaatggttatatggnaccatttaaccntaggnttactcaaaccttacccatttgggcccaaaccctccctt

SEQ ID NO: 4519 - DNA, 662 bp, Homo sapiens
ctatgacgtcgcatgcacgcgtacgtaagcttggatcctctagagcggccgtctactactactaaattcgcggtcggtcgactttttttttttttttttttgcctcctagtaagtgggtgggtgtaatgactaggccatcttgcaaccatgaggaaaaaggcaagaaattttagaatcctcaccactgacaactagccagcaaccacctactattgacttattatgtgacagaaaaaaaaaattaccaacagggtcaaggtctaaaagccagttgataactggctattctgttacatgcagctcttctgttacattcattactgatgcattgctcctcaacacatatgtgaaataatacaaaacaaggacaaaatacacagcaaacagccacagaggctgactcataatgcactacacacacacacccacaaccactcacacacacccacaccccaccttctttcgtgatagtccagcttctaaaagagccaaatagaaaaatatcacctacactatataagggcaagagaaggacgtcgacgcggccgcgaatttagtagtagtagtcgacccgggaattccggaccggtacctgcaggcgtaccagctttccctatagtgagtcgtattagagcttggcgtaatcatggtcatagctgtt

SEQ ID NO: 4520 - DNA, 346 bp, Homo sapiens
ctgaagcgcccgcatagtcggtgcggcgccttcttcctcccaagcgaaactccctgcggggcggggtcggcgcgtagggccttgccgcggaagcgcagagcagccgagcagcgagacagcaggcagacgagcaggacgagcagccgcccgcgccatcacgcccttgcgctggttggtttctaggtggcaggcaccagtgaccgggtcgcacgtgtcctcgtggcagctgcaggcctgagcacagtccgcgccgtggagtccgggcgggcacgtcacgttacagtggggcccgtggacgccagggctgcacaggcagcgcccgactggaagtcgcagtgtccgctgc

SEQ ID NO: 4521 - DNA, 509 bp, Homo sapiens
tttttcacatgtagaaaagaggctttattaagaaggctttgaagtcaaaaaataaaactcttgatacaatttttttaacccttaaatcagctcagcaaatatataatcagtaatttagctgtgtaagattaaaggtccattactttatttaaaataaaatatattttagttcttaaaatttattccataaagtacatatttccctataaattccctacatatacacaagaggtaaaaagtaaaagtaaaaaaaaaaagcaaaattaaaaaaattttaaaaatgacaacagaaaccgcagtaaaaaggggattaattatttaccggaaagttagaaatttggttggaaggccctgcgcccccgcccccctgcccccctccggccgcgcacggttggatgtacaaaagcataaatggttagccccaaaaagggagtaaaaatgtcaccctcctcctctggaacgtctgtgcggcctgagaccggccggcgagaaaagtcaaatcagaaaac

SEQ ID NO: 4522 - DNA, 971 bp, Homo sapiens
cggctgcagctcgggcggcggccgcgggggacaaagggcgggcggatcggcggggagggggcggggcgcggccaggccaagcccgggggctccgcaatgctgcagctgcccccgggcgcccccgccgccgccctcgccgcggagccgcgcggagcggacgccggcgagctaacccgagccagccggcgggcgtccccggaggcggtggcgcagggaggggcccgacgctcgcacgtggccccggcggccgccatggcggacagcggcaccgcggggggcgcggcgttggcggccccggcccccgggccgggcagtggcggcccaggaccacgcgtctactttcagagcccccccggggccgcaggagagggcccgggcggggcggacgatgagggcccagtgaggcgccaagggaaggtcaccgtcaagtatgaccgcaaggagctacggaagcgcctcaacctagaggagtggatcctggagcagctcacgcgcctctacgactgccaggaagaggagatcccagaactggagattgacgtggatgagctcctggacatggagagtgacgatgcccgggctgccagggtcaaggagctgctggttgactgttacaaacccacagaggccttcatttctggcctgctggacaagatccggggcatgcagaagctgagcacaccccagaagaagtgagggatccccgacccaggagaacggtggctcccacaggacaatcgctgccccccaacctcgtagcaacagcaataccgggggaccctgcggccaggcctggtgccatgagcagggctcctcgtgcccctggcccaggggtctcttcccctgccccctcagttttccacttttggggttttttattgttattaaactgatgggactttttgtgtttttatattgactctgcggcgcgggccctttaataaagctaggatacgcctttggtgcagcta

SEQ ID NO: 4523 - DNA, 398 bp, Homo sapiens
ctccttaatatctagcttttatttttagcttttaattgtttataagagaggaaccactggaaagagtttaaaatccttgttccattttcaggttgggaagtgtacgtgtgtgggggtgggtattaaacaagacttgagcattaagcatttcccctcctgagcccagctcctctcctcacttgttgactaagccctgcttcactgagcattttctttttttctgcccacaacctgagtgccccatggaggtgaaggacatagcctgagtctgtgccatcagtcagtagaacaaatgggcttgctctgcctaacatcgggccatctcggattccacctcttttataggaatgagtgatgaagagaggtgggttccgctttgccgctgtattaatacacat

SEQ ID NO: 4524 - DNA, 2155 bp, Homo sapiens
tgggggcgttcgcctcgtttgcctcgcgccctccactggagctgttcgcgcctcccggctcccaccgcagcccacccggcagaggagtcgctaccagcgcccagtgcgctctgtcagtccgcaaactccttgccgcccgccccgggctgggcgccaaataccaggctaccatggtctacaagactctcttcgctctttgcatcttaactgcaggatggagggtacagagtctgcctacatcagctcctttgtctgtttctcttccgacaaacattgtaccaccgactaccatctggactagctctccacaaaacactgatgcagacactgcctccccatccaacggcactcacaacaactcggtgctcccagttacagcatcagccccaacatctctgcttcctaagaacatttccatagagtccagagaagaggagatcaccagcccaggttcgaattgggaaggcacaaacacagacccctcaccttctgggttctcgtcaacaagcggtggagtccacttaacaaccacgttggaggaacacagcttgggcactcctgaagcaggcgtggcagctacactgtcgcagtccgctgctgagcctcccacactcatctcccctcaagctccagcctcatcaccctcatccctatcaacctcaccacctgaggtcttttctgcctccgttactaccaaccatagctccactgtgaccagcacccaacccactggagctccaactgcaccagagtccccaacagaggagtccagctctgaccacacacccacttcacatgccacagctgagccagtgccccaggagaaaacacccccaacaactgtgtcaggcaaagtgatgtgtgagctcatagacatggagacaccaccacctttcccagggtgatcatgcaggaagtagaacatgcattaagttcaggcagcatcgccgccattaccgtgacagtcattgccgtggtgctgctggtgtttggagttgcagcctacctaaaaatcaggcattcctcctatggaagacttttggacgaccatgactacgggtcctggggaaactacaacaaccctctgtacgatgactcctaacaatggaatatggcctgggatgaggattaactgttctttatttataagtgcttatccagtagaattaataagtacctgatgcgcattgaacgacaatcttaagccctgttttgttggtatggttgtttttgttttcctccctctcctctggctgctacaacttcccctttctggtacaagaagaaccattctttaaaggtgagtggaggctgatttgcagctgaagtgggccagccttgcaccagccaggccagaccaccatggtgaaggcttctttccccactgcaggacccactttgagaaggaccgaggaggaggatttgggttgttttgttaggggttactttcaggggaacatttcatttgtgttatttcttaaacttctatttaggaaattacattaagtattaatgaggggaaaggaaatgagctctacgaggatttcaccctgcatgggagagagcagggttttctcagattcctttttaatctctatttatctggttgtttctgacaggatgctgcctgcttggctctacaagctggaaagcagcttcttagctgcctaattaatgaaagatgaaaataggaagtgccctggagggggccagcaggtcacggggcagaatctctcaggttgctgtgggatctcagtgtgcccctacctgttctcccctccaggccacctgtctctgtaaaggatgtctgctctgttcaaaaggcagctgggatcccagcccacaagtgatcagcagagttgcatttccaaagaaaaaggctatgagatgagctgagttatagagagaaagggagaggcatgtacggtgtggggaagtggaagggaagctggcgggggagaaggaggctaacctgcactgagtacttcattaggacaagtgagaatcagctattgataatggccagagatatccacagcttggaggagcccagagaccgtttgctttatacccacacagcaactggtccactgctttactgtctgttggataatggctgtaaaatgtttaaaaacaaaaaaaaaaaaaaaaaaaa

SEQ ID NO: 4525 - protein, 244 aa, Homo sapiens
MVYKTLFALCILTAGWRVQSLPTSAPLSVSLPTNIVPPTTIWTSSPQNTDADTASPSNGTHNNSVLPVTASAPTSLLPKNISIESREEEITSPGSNWEGTNTDPSPSGFSSTSGGVHLTTTLEEHSLGTPEAGVAATLSQSAAEPPTLISPQAPASSPSSLSTSPPEVFSASVTTNHSSTVTSTQPTGAPTAPESPTEESSSDHTPTSHATAEPVPQEKTPPTTVSGKVMCELIDMETPPPFPG

SEQ ID NO: 4526 - DNA, 346 bp, Homo sapiens
aaagtcttcacatattcaaactaagctactatatgtaaggccttccaaattcttctaactcttccaaaagccttctgccttagttttttttaaattacaccagtccttttagtagcttttggatgtgatttttaaccaacttccccttctagcttcaagtattcttctaaactatactgattccatcagccctctcatcttttctctctgtgccttcttccaggcactcaaatccttgccattcattcaacttaacttgtaagcagatgactctccagtcctggctgcctctttcagctccagcacctaaatccagctgccttcccggcggaagtatgtagtcacg

SEQ ID NO: 4527 - DNA, 434 bp, Homo sapiens
ggggccctcgccccggtgcagccgctggtgcagtcgcaacgtcagctggtcccggaagcgccgctcacactccccgcagccgtagggcttctccggcatcggaccccacccagacagcgcgagcccactcagtgcccccggggcccctggctccagtttgtacgcggcagccagatgccccaggtcaggcgcgggaaaggggctgggaagtaacgatagatgctggggccattcgacctcctcttctgcctcctgatcttcgtcctccaccttcaccttccgaatcatccactcctctcctgggcaggtacccacaggctgagccttctgtgctgagcacgcctggcctctgcagggagcctcggcttggtctggtgggcacctttcctccgtgtaggggcctcgtgcccctgcagagaataggatacctcaag

SEQ ID NO: 4528 - DNA, 723 bp, Homo sapiens
aagctagtacgaggctggttggaatcggccgaggccacagaaggcatggtctccccacggatgtccgggctcctctcccagactgtgatcctagcgctcattttcctcccccagacacggcccgctggcgtcttcgagctgcagatccactctttcgggccgggtccaggccctggggccccgcggtccccctgcagcgcccggctcccctgccgcctcttcttcagagtctgcctgaagcctgggctctcagaggaggccgccgagtccccgtgcgccctgggcgcggcgctgagtgcgcgcggaccggtctacaccgagcagcccggagcgcccgcgcctgatctcccactgcccgacggcctcttgcaggtgcccttccgggacgcctggcctggcaccttctctttcatcatcgaaacctggagagaggagttaggagaccagattggagggcccgcctggagcctgctggcgcgcgtggctggcaggcggcgcttggcagccggaggcccgtgggcccgggacattcagcgcgcaggcgcctgggagctgcgctgctcgtaccgcgcgcgctgcgagccgcctgcggtcgggaccgcgtgcacgcgcctctgcccgtccgcgcagcgcccctcgcggtgcggtccggggactggcccctggcaccgtcgaggacgatgtgaggccccgtcgtgtgccgacaggtgacccgaactggtc

SEQ ID NO: 4529 - DNA, 604 bp, Homo sapiens
  misc_feature (419)..(419): n is a, c, g, or t
  misc_feature (468)..(468): n is a, c, g, or t
gcggccgcgcaccaaggctgcgatggggctggagacggagaaggcggacgtacagctcttcatggacgacgactcctacagccaccacagcggcctcgagtacgccgaccccgagaagttcgcggactcggaccaggaccgggatccccaccggctcaactcgcatctcaagctgggcttcgaggatgtgatcgcagagccggtgactacgcactcctttgacaaagtgtggatctgcagccatgccctctttgaaatcagcaaatacgtaatgtacaagttcctgacggtgttcctggccattcccctggccttcattgcgggaattctctttgccaccctcagctgtctgcacatctggattttaatgccttttgtaaagacctgcctaatggttctgccttcagtggagacaatantggaagagtgtgacagatgttatcattgctccattgtgtacgagcgtangacgatgcttctcttctgtcagcctgcaactgagccaggattgaatacttgaccccaggtctggagattggatactgtatacttctttgtattatacataaagcaccactgtctgtcatttcctagtgtctattaa

SEQ ID NO: 4530 - DNA, 548 bp, Homo sapiens
ggccgctcgctctcggtgggcccgagctcgtgttccccgaggccatgaaccaccccgcgctgaccgtgcatccggcgcaccagctgggcgcctccccgctgcagcccccgcactccttcttcggcgcccagcaccgggaccctctccatttctacccctgggtcctgcggaaccgcttcttcggccaccgcttccaggccagcgacgtgccccaggacgggctgcttctgcacggccccttcgcacgcaagcccaagcggatccgcacggccttctcgccctcgcagctgctgcggctggagcgcgccttcgagaagaaccactacgtggtgggcgccgagcggaagcagctggccggcagtctcagcctctccgagacgcaggtgaaggtgtggttccagaaccggaggacaaagtacaaacggcagaagctggaggaggaagggcctgagtccgagcagaagaagaagggctctcatcacatcaaccggtggcgcattgccacgaagcaggccaatggtgaggacatcgatgtcacctccaatgac

SEQ ID NO: 4531 - DNA, 1054 bp, Homo sapiens
attcaagcctgggccctggaaggaggggtggacagtcccctcccttccagtccagcatgggtctggggaagaggagcagctttgcctggaaggggcctcctaggagggggagcggtggtttctagctcaggctttaggatcagagagcagcagattcaaatcctgacggttttggtaaagtcaattcaatctctccaagactccgtttacttgatctgcgaagtggggataatggtatcacgtcgcagggttgtcaggcggagctggtaggggagctgccccccagagcagcatggatgccccgcgaagggacatggagttgctcagcaacagcctggctgcctacgcgcacatccgcgccaaccccgagagctttggcctctacttcgtgctgggcgtctgcttcggcctgctgctcaccctctgcctgctcgtcatcagcatctcgtgggcgccccgcccgcggccccggggcccggctcagcgccgggacccccgcagcagcaccctggagcccgaggacgacgacgaggacgaggaggacacggtgactcggctgggccccgacgacacgctgccgggccccgagctgtccgcagagccggacgggcccctcaacgtcaacgtcttcacgtcggcggaggagctggagcgggcgcagcggctggaggagcgcgaacggatcctgcgggagatctggcgcaccgggcagccggacctgctgggcacaggcacgctggggcccagccccacggccacgggcaccctgggccgcatgcactattactgatgggccctggctcccgccgcaaggcgctcggggtaccggacctgtacatgagctcagagctaccccacaccttcggactgcctcggcccccacagctcccaggtgctactgggcgtggaccgccaccccctgagaggctcccttccccagtcctgccagaagaccccgggggcggggagggggcagcatgcagggtccccactccctctctggggtcgatgaagaggtgaagtgaccaaatgaaagaaagctgcattctcagtg

SEQ ID NO: 4532 - protein, 165 aa, Homo sapiens
MDAPRRDMELLSNSLAAYAHIRANPESFGLYFVLGVCFGLLLTLCLLVISISWAPRPRPRGPAQRRDPRSSTLEPEDDDEDEEDTVTRLGPDDTLPGPELSAEPDGPLNVNVFTSAEELERAQRLEERERILREIWRTGQPDLLGTGTLGPSPTATGTLGRMHYY

SEQ ID NO: 4533 - DNA, 1117 bp, Homo sapiens
atgtcgtgaagctgggggagctcgtcgccgccgccggcggctagcgggcgtccgcgccatggagcgctacgcggccgccttggaggaggtggcggacggtgcccggcagcaggagcgacactaccagttgctgtcggcgctacagagcctggtgaaggagttgcccagctctttccagcagcgcctgtcctacaccacgctcagcgacctggccctggcgcttctcgacggcaccgtgttcgaaatcgtgcaggggctactggagatccagcacctcaccgaaaagagcctgtacaaccggcgcctgcgcctacagaacgagcaccgagtgctcaggcaggcgctgcggcagaagcaccaggaagcccagcaggcctgccggccccacaacctgcctgtggttcaggcggctcagcagcgagaactagaggccgtggaacaccggatccgtgaggagcagcgggcgatggaccagaagatcatcctggagctggaccggaaggtggctgaccagcagagcacactggagaaggcgggggtggctggcttctacgtgaccaccaacccacaggagctgatgctgcagatgaacctgctggaactcatccgaaagctgcagcagaggggctgccgggcagggaatgcagccctgggactgggaggtccctggcagtcgcctgctgcccagtgtgaccagaaaggcagccctgtcccaccatagccacaggcagcagaggtctgggcagagttcatcttcttgacctttggccactgccttcccagctgcccgcagggggttccccctgctgaggagagaccaggtggaccccagctgcctgtcacccttcatctgggacttgctgtcaaaccctaggatagtctcataaaggggaggctgggccagcctgctgctgtctgcttcaggaccaggcagagagtgaggctgggggttctcacaccttactccaccgggcacatcccaacctgcactggggcccacccgagcgcttgttctggtctcagccgctcccttggcagctgcagcccccatgcagaagaggctcccaggcccaagctctgtgtgacccagagaaataaagatgcctcagtgtggccc

SEQ ID NO: 4534 - DNA, 404 bp, Homo sapiens
  misc_feature (29)..(29): n is a, c, g, or t
  misc_feature (32)..(32): n is a, c, g, or t
  misc_feature (35)..(35): n is a, c, g, or t
  misc_feature (38)..(38): n is a, c, g, or t
  misc_feature (247)..(247): n is a, c, g, or t
cggtgtcggaccgcgcgcgccagtggatnatntanatncgtacttgcatgagctttccacccacttgagcccagtcctccgggccgttcctcgcccccacccctgtctggcgtgaccccagcctcagcctctttctaagggacttcctcagcacatttgtatttttatatccgactctttgtttactggctctgctcatgggttcctgccctcccctcagtctcggccacgctcttctgcgcctggnagataggatgggtgttgaggctgggatgagacaagcccccgacacggttaccaaccacatgggccagtctgcccagggctgaccccagggaggctttctgggcagaccccttctccccaaggtatcatcacttttccaaggggcccagattccgatt

SEQ ID NO: 4535 - DNA, 456 bp, Homo sapiens
aggcccgggtcgggcagcggcttgtccagcgcgccgggcggcagcgcgagtgccgggaagaaggagggctgcgccgccgccagaaaggcggacatggggaagtcggcgggccgtggcgcgtggaacgggtggtaagccatggcgctggccgccagcgccggctctctcatcgggacatccggcccaggcgcccgggggccggggccggggccgggggcgcgcggctcggacccccggcccgggcggcggcgcgcgcggtggacggacgacccgggtggcgggcgcagcagctgctcctcggggcttcccgtccggcgcaccgcaaggggcacccggctctgtgcgcgggggcggcgggggctctgcgcggggccgggctgggccgggctgagctggcccgctccggcgccggggaccacgcgcgactggttagatcttgtcgtgatctctggaaaa

SEQ ID NO: 4536 - DNA, 1157 bp, Homo sapiens
ccccagcggaggtgaaggacgtccttccccaggagccgactggccaatcacaggcaggaagatgaaggttctgtgggctgcgttgctggtcacattcctggcaggatgccaggccaaggtggagcaagcggtggagacagagccggagcccgagctgcgccagcagaccgagtggcagagcggccagcgctgggaactggcactgggtcgcttttgggattacctgcgctgggtgcagacactgtctgagcaggtgcaggaggagctgctcagctcccaagtcacccaagaactgagggcgctgatggacgagaccatgaaggagttgaaggcctacaaatcggaactggaggaacaactgaccccggtagcggaggagacgcgggcacggctgtccaaggagctgcagacggcgcaggcccggctgggcgcggacatggaggacgtgtgcggccgcctggtgcagtaccgcggcgaggtgcaggccatgctcggccagagcaccgaggagctgcgggtgcgcctcgcctcccacctgcgcaagctgcgtaagcggctcctccgcgatcccgatgacctgcagaagcgcctggcagtgtaccaggccggggcccgcgagggcgccgagcgcggcctcagcgccatccgcgagcgcctggggcccctggtggaacagggccgcgtgcgggccgccactgtgggctccctggccggccagccgctacaggagcgggcccaggcctggggcgagcggctgcgcgcgcggatggaggagatgggcagtcggacccgcgaccgcctggacgaggtgaaggagcaggtggcggaggtgcgcgccaagctggaggagcaggcccagcagatacgcctgcaggccgaggccttccaggcccgcctcaagagctggttcgagcccctggtggaagacatgcagcgccagtgggccgggctggtggagaaggtgcaggctgccgtgggcaccagcgccgcccctgtgcccagcgacaatcactgaacgccgaagcctgcagccatgcgaccccacgccaccccgtgcctcctgcctccgcgcagcctgcagcgggagaccctgtccccgccccagccgtcctcctggggtggaccctagtttaataaagattcaccaagtttcacgc

SEQ ID NO: 4537 - protein, 317 aa, Homo sapiens
MKVLWAALLVTFLAGCQAKVEQAVETEPEPELRQQTEWQSGQRWELALGRFWDYLRWVQTLSEQVQEELLSSQVTQELRALMDETMKELKAYKSELEEQLTPVAEETRARLSKELQTAQARLGADMEDVCGRLVQYRGEVQAMLGQSTEELRVRLASHLRKLRKRLLRDPDDLQKRLAVYQAGAREGAERGLSAIRERLGPLVEQGRVRAATVGSLAGQPLQERAQAWGERLRARMEEMGSRTRDRLDEVKEQVAEVRAKLEEQAQQIRLQAEAFQARLKSWFEPLVEDMQRQWAGLVEKVQAAVGTSAAPVPSDNH

SEQ ID NO: 4538 - DNA, 418 bp, Homo sapiens
cagaaccgcgttgtagggctccaccaccgtgtccgacaccttgggagaaggcatgacgctgaaggaattcatgatccggtccgggtactcctctctaatcttgttcatgagcagagtgcccatcccggagcctgtgcccccgcccagggagtggacgatctggaagccctgcaggcagtcacagctctcactctcgtgcctcaccacctctaggacattctcgatcagctcggctccctccgtgtagtggcctttgcgcagtttgttgccagccccagagttacctgtggccaaaaagagaaaccagcaggggaagaaaggtgaaaagagaagggcaccagtaaagcatccccccctcctccatggtggaaccttctggaaaaacataccatggacaaaactgtcgggttgaaagaga

SEQ ID NO: 4539 - DNA, 431 bp, Homo sapiens
  misc_feature (425)..(425): n is a, c, g, or t
agaaagggaagtagggcagtgcatgactggccttaggttttttctttccaagtttattttcttgtgcttcagctactagaaaggtttaattcagggataagtcccaattgagtagttcaagatgatcagagactttgctattttcccctaagttctattccataatctaaaatgttctgtttctagtgccagttcttatgctaagcaggttacgtgggaatatatcacttaactcaaaaagccctgttaagccagggactgttatctccatttaacaggatgaggaaaatgggaggtttatgggtctgttctcacactgctacggagggaaatacccccaaactggggtaattattataaagggaaagagggttttaatgggacttcagttcccgcattgctgggtgagggcctcagggacactntttacc

SEQ ID NO: 4540 - DNA, 402 bp, Homo sapiens
tttttttttttttacatgacactttaaaagatttattcagaagtttaatatattcacaaggtacaaactttaaagttacaaaaaaggcatagagtgaaaagtctaccccagttccctggtcactcatttttgctccagccactcacttctgctctttgtaagcgatagtcttgccagtgtcttgtgtctctttccagagactatgtagaagcaaataattttttatttaaaaatgtttatatttgaataggtgatacatatagatggcaagaaaattcaaaagggcaggcagtgaaaattttcttcgctcacccacagttccccagtttctgtgtttccctctgcagagacagtcatcctttcttatatatccttctggatgttgtaagtgattgtagagca

SEQ ID NO: 4541 - DNA, 405 bp, Homo sapiens; identical to SEQ ID NO: 2534
  misc_feature (13)..(13): n is a, c, g, or t
  misc_feature (21)..(21): n is a, c, g, or t
  misc_feature (24)..(24): n is a, c, g, or t
  misc_feature (62)..(62): n is a, c, g, or t
  misc_feature (100)..(100): n is a, c, g, or t
  misc_feature (105)..(105): n is a, c, g, or t
  misc_feature (159)..(159): n is a, c, g, or t
  misc_feature (166)..(166): n is a, c, g, or t
  misc_feature (284)..(284): n is a, c, g, or t
  misc_feature (298)..(298): n is a, c, g, or t
  misc_feature (308)..(308): n is a, c, g, or t
  misc_feature (371)..(371): n is a, c, g, or t
  misc_feature (384)..(384): n is a, c, g, or t

SEQ ID NO: 4542 - DNA, 443 bp, Homo sapiens
  misc_feature (422)..(422): n is a, c, g, or t
aagggaataagcttgcggccgcggcccccggctttgccctgcacaccgcgccaaaggcggccagcgacgcgggcaaggcgggcgcgcacccgctcgagtcccactaccggtccccgggcggcggctacgcgcccaagaaagatgccagcgagggctgcaccgtggttggcgggggcgtccagccctacctatagaagggccgagcacagcaatgcaagtaagtgggcaccctggtgcttcccagaccctgtggagcctcccagcaccaacttgcttaatgtgtttttcttgcttctggtcatggggttagaagacagagcatttcaatcttgtccagcttttctttccttaagggggaaactatattttctgttttatagattccctctttttggcacaagttctatcactcctttacctangggaaggaaaaaaaaatatat

SEQ ID NO: 4543 - DNA, 643 bp, Homo sapiens
aagcttgcggccgcctggggaccagctccgcgcctcggcctctccgccccctccccagcctttctctcgccctcttctcccacactcccggccggcgcctcggctttgtgcgaggagatggtgtagccccctggccgccgaaggaggagccggacacttgtctcccgtctccgagctgctccccacccctggaggagagacccccccctcggctcggcgccttctgcgtctcccggctggtggggaagcctctgcgccgccggcaccatgagtgaacagagtatctgtcaggcaagagctgctgtgatggtttatgatgatgccaataagaagtgggtgccagctggtggctcaactggattcagcagagttcatatctatcaccatacaggcaacaacacattcagagtggtgggcaggaagattcaggaccatcaggtcgtgataaactgtgccattcctaaagggttgaagtacaatcaagctacacagaccttccaccagtggcgagatgctagacaggtgtatggtctcaactttggcagcaaagaagatgccaatgtctttcgcaagtgccatgatgcatgccttagaagtgttaaattcacaggaaacagggccaacattgcctagacaaaactca

SEQ ID NO: 4544 - DNA, 993 bp, Homo sapiens
gggcgccggggccgcggccgggccggctccagggccggccgccgcggtggggcgcaggccgccgcgcgagtgaatcgaggcggcgggcccatccggaaccggccggccatcgcccgcggcgcggccggcggaggcggcaggaaccgaccggcgccctacagcaggccaaaacaacttcccgacaagtggcagcacgatcttttcgacagtggcttcggcggtggtgccggcgtggagacaggtgggaaactgctggtgtccaatctggattttggagtctcagacgccgatattcaggaactctttgctgaatttggaacgctgaagaaggcggctgtgcactatgatcgctctggtcgcagcttaggaacagcaaacgtgcactttgagcggaaggcagatgccctgaaggccatgaagcagtacaacggcttccctctggatggccgccccatgaacattcagcttgtcacgtcacagattgacgcacagcggaggcctgcacagagcgtaaacagaggtggcatgactagaaaccgtggcgctggaggttttggtggtggtggaggcacccggagaggcacccgcggaggcgcccgtggaagaggcagaggtgccggcaggaattcaaagcagcagctttcggcagaggagctggatgcccagctggacgcctataatgcgagaatggacaccagttaaacagaccagcaaatccgcgtgcggaacaggacccaggcgtctcctcttgctccctggttggggggcggtggctggggctgtgcgcccaatgatggatttgtttcttttatgttttaaaataggatttaaaaactcatgtaaaggttttttttttttcttttttttttttttaattctgaaacagacctgttttgtaccgagttatttttgggataaattttactggttgctgttgtggagaaggtggcgtttccaccggaattccaaaaaaaaaaaaaaaaaaaaaaaaaa

SEQ ID NO: 4545 - protein, 233 aa, Homo sapiens
GRRGRGRAGSRAGRRGGAQAAARVNRGGGPIRNRPAIARGAAGGGGRNRPAPYSRPKQLPDKWQHDLFDSGFGGGAGVETGGKLLVSNLDFGVSDADIQELFAEFGTLKKAAVHYDRSGRSLGTANVHFERKADALKAMKQYNGFPLDGRPMNIQLVTSQIDAQRRPAQSVNRGGMTRNRGAGGFGGGGGTRRGTRGGARGRGRGAGRNSKQQLSAEELDAQLDAYNARMDTS

SEQ ID NO: 4546 - DNA, 306 bp, Homo sapiens
ccgtctgctcacccggcctgccctttcctgcctttcgtctgcagcggccgccagctcctgctcggtgtccaaaacaaaatggccgccacgtccagtgcttgtctgaccggctaaaatggcgtctacacaattacgtcaggcgtcagatccgcgtaccactagaggacagggaagattttagctgtattgtccgcgtacccagcttagtgcttttagacttttaaccagacccttagacccccacagtaccggacctcaagcattcctaaagtaggcaggtgacatacgccttagccttttcacgaa

SEQ ID NO: 4547 - DNA, 1541 bp, Homo sapiens
aaatggtgaaagggggggaggggagaaaagaaaaaaaaaaaaagaaaggggaaaggggggaaaaataagaaaaagcgagacagaggcgctgccgcgtccgctcgcggggaaggctggggtcggccgggtgctaggccggggccgaggccgaggccggggcgggatccagagcgggagccggcgcgggatctgggactcggagcgggatccggagcgggacccaggagccggcgcggggccatggcgaggcgcgggccagggtggcggccgcttctgctgctcgtgctgctggcgggcgcggcgcagggcggcctctacttccgccggggacagacctgctaccggcctctgcggggggacgggctggctccgctggggcgcacgacatacccccggcctcatgagtacctgtccccagcggatctgcccaagagctgggactggcgcaatgtggatggtgtcaactatgccagcatcacccggaaccagcacatcccccaatactgcggctcctgctgggcccacgccagcaccagcgctatggcggatcggatcaacatcaagaggaagggagcgtggccctccaccctcctgtccgtgcagaacgtcatcgactgcggtaacgctggctcctgtgaagggggtaatgacctgtccgtgtgggactacgcccaccagcacggcatccctgacgagacctgcaacaactaccaggccaaggaccaggagtgtgacaagtttaaccaatgtgggacatgcaatgaattcaaagagtgccacgccatccggaactacaccctctggagggtgggagactacggctccctctctgggagggagaagatgatggcagaaatctacgcaaatggtcccatcagctgtggaataatggcaacagaaagactggctaactacaccggaggcatctatgccgaataccaggacaccacatatataaaccatgtcgtttccgtggctgggtggggcatcagtgatgggactgagtactggattgtccggaattcatggggtgaaccatggggcgagagaggctggctgaggatcgtgaccagcacctataaggatgggaagggcgccagatacaaccttgccatcgaggagcactgtacatttggggaccccatcgtttaaggccatgtcactagaagcgcagtttaagaaaaggcatggtgacccatgaccagaggggatcctatggttatgtgtgccaggctggctggcaggaactggggtggctatcaatattggatggcgaggacagcgtggtactggctgcgagtgttcctgagagttgaaagtgggatgacttatgacacttgcacagcatgctctgcctcacaatgatgcagtcagccacctggtgaagaagtgacctgcaacacaggaaacgatgggacctcagtcttcttcagcagaggacttgatattttgtatttggcaactgtgggcaataatatggcatttaagaggtgaaagagttcagacttatcaccattcttatgtcactttagaatcaaggg

SEQ ID NO: 4548 - protein, 303 aa, Homo sapiens
MARRGPGWRPLLLLVLLAGAAQGGLYFRRGQTCYRPLRGDGLAPLGRTTYPRPHEYLSPADLPKSWDWRNVDGVNYASITRNQHIPQYCGSCWAHASTSAMADRINIKRKGAWPSTLLSVQNVIDCGNAGSCEGGNDLSVWDYAHQHGIPDETCNNYQAKDQECDKFNQCGTCNEFKECHAIRNYTLWRVGDYGSLSGREKMMAEIYANGPISCGIMATERLANYTGGIYAEYQDTTYINHVVSVAGWGISDGTEYWIVRNSWGEPWGERGWLRIVTSTYKDGKGARYNLAIEEHCTFGDPIV

SEQ ID NO: 4549 - DNA, 443 bp, Homo sapiens; identical to SEQ ID NO: 4542
  misc_feature (422)..(422): n is a, c, g, or t

SEQ ID NO: 4550 - DNA, 623 bp, Homo sapiens
ttgaatttaggtgacactatagaagagctatgacgtcgcatgcacgcgtacgtaagcttggatcctctagagcggccgcctactactactactactaaattcgcggccgcgtcgacttttttttttttttaatttaattaaatccttattttgctctttaactacaagaagctcacttttcgctacattggggcagaattttttttttcaagagacacagaaataatccccaaatagaagcccagaggggtgcacagacagacagactgtgggtctgtctgacctgccttcagcagccacttgctcatctaacacttgccggcctgtgctcacgcaaggccccatgctggctgtttacccagcagctggattaaatgaagaaggcagaatgtaaacaggtatgaagttagtgttctggagcacgcaggaaggagtatttaaatctccttggaggtgggcaaggaagatgctgacccttttagagtgtcaggccaagtgtcttgacttctccagactccgcttgaaggtgaccaattcattctagtttgcaaggcccaagttcctagaaacccccttagtcacaggcaaacccagacaaccagtccccctacctgcatcctgcc

SEQ ID NO: 4551 - DNA, 527 bp, Homo sapiens
ttgaatttaggtgacactatagaagagctatgacgtcgcatgcacgcgtacgtaagcttggatcctctagagcggccgcctactactactaaattcgcggccgcgtcgactttttttttttttttgccacacatacattgccctgagagggtttgaaaaattcactttatctgtgtcatccagaaaaaaggaaacaagttgtgttgtagcagtagaaatctctgttacagcataatttaaatgtgtactgcacatactaaatgtaagttgggttgatttaatgtgggccttcaatatcttttctattatctttcctctcttgccctggaatacaaggaggggaacatgtaatgaaagtaaatctgaactgtcttcctaaagggacatttctggtactttcgaaggtgcagactgaagacttgagtcaaggattgctgctcaccagactggcgagagagcatataaatgtgtttgtgtgtagtgtgcatgtatgtgttgcaatgaaattacagctttccaagtgtatg

SEQ ID NO: 4552 - DNA, 623 bp, Homo sapiens; identical to SEQ ID NO: 4550

SEQ ID NO: 4553 - DNA, 451 bp, Homo sapiens
  misc_feature (29)..(29): n is a, c, g, or t
  misc_feature (270)..(270): n is a, c, g, or t
  misc_feature (305)..(305): n is a, c, g, or t
  misc_feature (405)..(405): n is a, c, g, or t
ttttaatttttaaatgcaatatttaatcnctgtcagattacttgaagacaaagttttacagaaatttttaaatttcaaaaaaaaaactgcaatgtaccaataaacacctagaaaataatataattaaaaaatttaaagcatcaaacaacctcaagatctcgtcaggaataatgaacaaggcattttgcgttcacatcggttagcaacttgcatcccagttcacgcgggggagggtgatggtcgatatttctgtgtgtgtgagaatccagncacaattattttgcccgttttcccaagagaaagangccagggggaggggcagaggatggacggagggggctcggctgcagtacgtttttggttcagcgattgtgtttccttgaaacacatttaggtaaattcttncttcgaattcttaattgctggggattggggaaaccctgacctgccc

SEQ ID NO: 4554 - DNA, 444 bp, Homo sapiens
aagcttgcggccgcgccgctgggccaggcggagagaggcggacggacttcaggggaggcccgggccacgccgcggaaactacccgactccctggaggcggccaggaccgaccctgtcccgacaaaatggagttccccgtgtggcttcagctcgcggcgcgttcccagagctcctcagtgatccggctttcggattgttcgcctttcatctcatttgccgttgtccaaattctaatttaaaactcatgtgttacttgctgtaaggttaacaaacgtacaccgcaaactggataaagggataacttttatgttgtgtatgttttaccacaataaaaataaattttgtaaaaaaaaacctcgtgccgaattcttggcctcgagggccaaattccctatagtgagtcgtattaaattcgtaatcatgtcatagctgtttcctgtgtga

SEQ ID NO: 4555 - DNA, 2808 bp, Homo sapiens
gcggcggcggcggcgcagtttgctcatactttgtgacttgcggtcacagtggcattcagctccacacttggtagaaccacaggcacgacaagcatagaaacatcctaaacaatcttcatcgaggcatcgaggtccatcccaataaaaatcaggagaccctggctatcatagaccttagtcttcgctggtatactcgctgtctgtcaaccagcggttgactttttttaagccttcttttttctcttttaccagtttctggagcaaattcagtttgccttcctggatttgtaaattgtaatgacctcaaaactttagcagttcttccatctgactcaggtttgcttctctggcggtcttcagaatcaacatccacacttccgtgattatctgcgtgcattttggacaaagcttccaaccaggatacgggaagaagaaatggctggtgatctttcagcaggtttcttcatggaggaacttaatacataccgtcagaagcagggagtagtacttaaatatcaagaactgcctaattcaggacctccacatgataggaggtttacatttcaagttataatagatggaagagaatttccagaaggtgaaggtagatcaaagaaggaagcaaaaaatgccgcagccaaattagctgttgagatacttaataaggaaaagaaggcagttagtcctttattattgacaacaacgaattcttcagaaggattatccatggggaattacataggccttatcaatagaattgcccagaagaaaagactaactgtaaattatgaacagtgtgcatcgggggtgcatgggccagaaggatttcattataaatgcaaaatgggacagaaagaatatagtattggtacaggttctactaaacaggaagcaaaacaattggccgctaaacttgcatatcttcagatattatcagaagaaacctcagtgaaatctgactacctgtcctctggttcttttgctactacgtgtgagtcccaaagcaactctttagtgaccagcacactcgcttctgaatcatcatctgaaggtgacttctcagcagatacatcagagataaattctaacagtgacagtttaaacagttcttcgttgcttatgaatggtctcagaaataatcaaaggaaggcaaaaagatctttggcacccagatttgaccttcctgacatgaaagaaacaaagtatactgtggacaagaggtttggcatggattttaaagaaatagaattaattggctcaggtggatttggccaagttttcaaagcaaaacacagaattgacggaaagacttacgttattaaacgtgttaaatataataacgagaaggcggagcgtgaagtaaaagcattggcaaaacttgatcatgtaaatattgttcactacaatggctgttgggatggatttgattatgatcctgagaccagtgatgattctcttgagagcagtgattatgatcctgagaacagcaaaaatagttcaaggtcaaagactaagtgccttttcatccaaatggaattctgtgataaagggaccttggaacaatggattgaaaaaagaagaggcgagaaactagacaaagttttggctttggaactctttgaacaaataacaaaaggggtggattatatacattcaaaaaaattaattcatagagatcttaagccaagtaatatattcttagtagatacaaaacaagtaaagattggagactttggacttgtaacatctctgaaaaatgatggaaagcgaacaaggagtaagggaactttgcgatacatgagcccagaacagatttcttcgcaagactatggaaaggaagtggacctctacgctttggggctaattcttgctgaacttcttcatgtatgtgacactgcttttgaaacatcaaagtttttcacagacctacgggatggcatcatctcagatatatttgataaaaaagaaaaaactcttctacagaaattactctcaaagaaacctgaggatcgacctaacacatctgaaatactaaggaccttgactgtgtggaagaaaagcccagagaaaaatgaacgacacacatgttagagcccttctgaaaaagtatcctgcttctgatatgcagttttccttaaattatctaaaatctgctagggaatatcaatagatatttaccttttattttaatgtttcctttaattttttactatttttactaatctttctgcagaaacagaaaggttttcttctttttgcttcaaaaacattcttacattttactttttcctggctcatctctttattcttttttttttttttaaagacagagtctcgctctgttgcccaggctggagtgcaatgacacagtcttggctcactgcaacttctgcctcttgggttcaagtgattctcctgcctcagcctcctgagtagctggattacaggcatgtgccacccacccaactaatttttgtgtttttaataaagacagggtttcaccatgttggccaggctggtctcaaactcctgacctcaagtaatccacctgcctcggcctcccaaagtgctgggattacagggatgagccaccgcgcccagcctcatctctttgttctaaagatggaaaaaccacccccaaattttctttttatactattaatgaatcaatcaattcatatctatttattaaatttctaccgcttttaggccaaaaaaatgtaagatcgttctctgcctcacatagcttacaagccagctggagaaatatggtactcattaaaaaaaaaaaaaaagtgatgtacaacc

SEQ ID NO: 4556 - protein, 551 aa, Homo sapiens
MAGDLSAGFFMEELNTYRQKQGVVLKYQELPNSGPPHDRRFTFQVIIDGREFPEGEGRSKKEAKNAAAKLAVEILNKEKKAVSPLLLTTTNSSEGLSMGNYIGLINRIAQKKRLTVNYEQCASGVHGPEGFHYKCKMGQKEYSIGTGSTKQEAKQLAAKLAYLQILSEETSVKSDYLSSGSFATTCESQSNSLVTSTLASESSSEGDFSADTSEINSNSDSLNSSSLLMNGLRNNQRKAKRSLAPRFDLPDMKETKYTVDKRFGMDFKEIELIGSGGFGQVFKAKHRIDGKTYVIKRVKYNNEKAEREVKALAKLDHVNIVHYNGCWDGFDYDPETSDDSLESSDYDPENSKNSSRSKTKCLFIQMEFCDKGTLEQWIEKRRGEKLDKVLALELFEQITKGVDYIHSKKLIHRDLKPSNIFLVDTKQVKIGDFGLVTSLKNDGKRTRSKGTLRYMSPEQISSQDYGKEVDLYALGLILAELLHVCDTAFETSKFFTDLRDGIISDIFDKKEKTLLQKLLSKKPEDRPNTSEILRTLTVWKKSPEKNERHTC

SEQ ID NO: 4557 - DNA, 414 bp, Homo sapiens
gaatccaatctgtgcggggtagggtggattgctgcagagaagtcggcacgtgttaaagctaaaattttcctttgttgcagttttattaaccatagcctatgccatagtgccacctgttgagtgctaccgatgggcattctggctggaagaaccacttgtccatagtgttaatagtgctctctattaatggtgttagattttaaaggtctcacaatgattgaagctcttcagagggtgagtgctccttatctgacatgcttgggaccagaagtgttttggatttgtgagtttttttgaattttcaaatatctgcacgtacttactggttgagcagccctaaactgaaaaatctgaaatccaaaatgctccaacgagatgacctttgagtgccaggtcggtgctcaaaagggttct

SEQ ID NO: 4558 - DNA, 545 bp, Homo sapiens
  misc_feature (257)..(257): n is a, c, g, or t
  misc_feature (405)..(405): n is a, c, g, or t
  misc_feature (455)..(455): n is a, c, g, or t
  misc_feature (518)..(518): n is a, c, g, or t
  misc_feature (527)..(527): n is a, c, g, or t
  misc_feature (532)..(532): n is a, c, g, or t
gactgcatagggctcggcgtggaatgcagtgagtggtgtgatcacggcttactgccgcctccatctcccaggctcaagcaatcctcccacctcagccacccaagtcctgggaatatatgcgtacagacgatgcccagctaatttcttaaatgtattttttgtagagacagggtctcactatgttgcccaggctggtctcaaactcctgggctcaagcagtcctcctgcctcagcctcccaatgtgctgggattacanggcatgagtccgctgcactagtttaattatccattttctgataaaaagtttttcctattatatttgcaatttatactatcaatgaatagtacaataaaatttcaaagctatgagggaactcagaaatgagtaacttgagaactaagtnatatttctatcattttgaacgctactgcaattaatgctgatatttttcanccttaccaggaaaatgaaatttaaaaagcatattggttttatattggaatttttaagttgaantttaaggcnggccncattttgaaaagg

SEQ ID NO: 4559 - DNA, 470 bp, Homo sapiens
tttttaagacggcaaaatgttaattattgaatgtgggtgatgagtatacagataattgcctattctttcacattctttatatgtttgaaagtttttacaataaaaaatttaatttttcaagaaggcttgacagaggctgtgctatttttaaaaaggccttgaaggatgagctctggggctccaagcaaacatggcagaggtcagggcgaagaaacccgcaccatctgagatagggctggtcctttcacttctcaggagttccaggcccccttgacagagtgaccagaagaggagctgaaaaggtcggacagatgcagaagatgaaggcctcccatgtcatctgcgatcttctcgctaggccacagggtaccacatatgcgcctgaacttgaagtttgttgattccttctaagttttgttggcaggacgtgaactcagctattaaattcctagttttccctgtatattcca

SEQ ID NO: 4560 - DNA, 478 bp, Homo sapiens
cacgaggccgctcccgccgccgccgccgccgccgccgccagaggagcagcagcgcttgtgcaaaccgggaagatggcggccggcggcggcggaggcagcagtaaggcctcctcctcgtcggcctcttcggcaggggctctggagtcctcgttggatcgaaaattccagtcggtaaccaacaccatggagtccattcaaggcttgtcgtcttggtgtatagagaacaaaaaacaccacagtactatcgtctatcattggatgaagtggctccggagatctgcatatccccaccgtttgaatctcttttaccttgccaatgatgtcatacagaactgtaaaaggaaaaatgcaatcatattccgtgaatcatttgctgatgtacttcctgaagcagctgctctagtgaaggatccatctgtctctaagtctgtaaaacgaatctttaaaatctgggaagatagaaatgtatacccagaag

SEQ ID NO: 4561 - DNA, 164 bp, Homo sapiens
tccttgccctccgctctcactctggctgggagcagaaggcagcctcggtctctgggcggcggcggcggcccactctgccctggccgcgctgtgtggtgaccgcaggcccgagacatgagggcggcccgtgctctgctgcccctgctgctgcaggcctgctggac

SEQ ID NO: 4562 - DNA, 3064 bp, Homo sapiens
gatgggatggtgcatccttacaaaggggaccgggccgagtactgcaaggcagccaataagagggtcatggatgtgatcaactcagccaggacccgccagcagatgctgcatgcccagaccttccacagcaactctcttttgacccaggaagatgcagcagctgctggggatcgcagaccagcccctgacacctggatttatccgctgattcagatgaagcccttcgagattcaaatcgatgagattgtcactgagaccctgttgactgaggcggagcgcggggcaaaggtctacctcaccactggctatttcaacctgacccaggcctacatggacctggtcttgggcactcgggctgagtaccagatcctgctggcctcaccagaggtgaatggcttctttggggccaagggggtggccggcgccatcccagcggcctatgtgcacatcgagcgacagttcttcagtgaggtgtgcagcctgggacagcaggagcgggtccagcttcaggagtactggcggaggggctggacgttccacgccaaaggcctctggctgtacctggcagggagcagcctgccctgtctcacgctgattggctctcctaattttgggtacaggtcagttcaccgggacctggaggcccagattgcgatcgtgacggagaaccaggccctgcagcagcagcttcaccaggagcaagagcagctctacctgaggtcaggtgtggtgtcctctgccaccttcgagcagccgagtcgccaggtgaagctgtgggtgaagatggtgactccactgatcaagaacttcttctgaggacagacaggtgctgtctctagcatcacctctcagcacgattttcccgagagttcacaggtggggcaggtggttgttctgactcaaccagagcttccagagggctctttgatccctttctcagttaaacacagagcagcatcttcaggggtatggcagctgtcctcaaagttagaagctggatgctaaattaggcagtctgttcactttccatctggtacccactccactaagtcccaaggcgcctgtgctggggtcggcagtggcagcctgtagtccccttctgctctcccttcccggggggtcctgaagaagccctggggcaagggctcagggatgagggggcagaaaggcagattgagcccctccaagctgagcacactggtgcaggagatgtagacgtgggaggaggggagcacgtttgctcgtgagagtggctctggcttgctgccctggccggctgtagtgcacagggtggggcgtcggtagagccagaccgtgggctgctgcctggacgcctcgctgacatccctgtgctgcggttacagagctgcgcccttctagactctggaagttgagtaacaggacctgctctgcccacccaggaggggcctgccgcttcaccagaggcaccagtggggtcccacagtcacctgaggtacccctggactgtcttgacgcctagaggtccgggcagggggtggctgccattaaaggtggggtctttgctgagtgaccttttgtgtcctggatccctcagggcctggactgcactccgggtggggtcaggctcccgaggcccctgctctctggttctggatgttgtgggtagttctgttgctttggatggctgggcctttggatggtggcttgtggggaagggacggtgaggagtcaaagatgagccaggacccatgtggccggcacatgcgctagtgccggcatctcatgtgtgcagcgtgggctcccttagtgcctggcaccttagtgctctgctaagtctcattgtttaaaaatgtgtagtttatctgcagcttttcctagttattttaattacttttcattttatttgaatagtatgtgcaaatgtagagagtaaaacaatactgcggccatttcctgccctcccttcccccaggcagccactcttggcttgtttcttctgatgtgcacacgtgtccgtatttctaaataacgtgcatatcctgctgtcttcccccaaaatgtgtacttaaccaaaacagcaccagtgtcactcctgaaacaaaaattaccaagaatgtcttagtatcatcaaatacctaaatggtgttcacaattccacttgccttaaaattaattttttcgattatttgacttgaagtccaattaaggactacaccttgtgattgttttttccctagcaatttattttttgaagaatgaactttatttttattggatctacttaaaacatttttgtgtcacctagtagcaggggattttgaatacatgtcatgtgtgtttataaagccagctctccatatcccccagtgtctccaggagctgcttttgtgacctcactgcctgatctctttatcatcttcaggtgcttgacccttgcacagagaagcttcctgggctacagggcatggcagcctgtcctttcggggagtgagattagatttagtccctgcactttgcctctctagaagcagcttctcgcctttccctcccgagggctggcaggagtcactgtcagtcacccttcatggggtctgaaaggttgcatgggctcacctggtcttagacaaggacagttgcagcttccgcaccaggcagacctgcagtttgagtggctggggataggtggagcggcggcctggccacagtgccctggacagcagcacatcacatcagttaacactgtttgccttccaactagttattacggtgtcctgtgggacaattagactggaggagccaaaggaatgtgcaggggcactgggtttctgtttggagagaggctctcggtaaacagagttcgcattcctccagattctgtgggaccagagtaaatatcattatgccacagccaggcttaagcaatctatctgcagtgccgttcccgcagcgcacactgctccctctgtctctgctgatgaccttcgaggctgtcctaggcaggttctccctgaggagctccccacaccaagcctccctaactctgcaaagcagccggagcaacagagagcagcgggcggcgggc

SEQ ID NO: 4563 - protein, 271 aa, Homo sapiens
DGMVHPYKGDRAEYCKAANKRVMDVINSARTRQQMLHAQTFHSNSLLTQEDAAAAGDRRPAPDTWIYPLIQMKPFEIQIDEIVTETLLTEAERGAKVYLTTGYFNLTQAYMDLVLGTRAEYQILLASPEVNGFFGAKGVAGAIPAAYVHIERQFFSEVCSLGQQERVQLQEYWRRGWTFHAKGLWLYLAGSSLPCLTLIGSPNFGYRSVHRDLEAQIAIVTENQALQQQLHQEQEQLYLRSGVVSSATFEQPSRQVKLWVKMVTPLIKNFF

SEQ ID NO: 4564 - DNA, 446 bp, Homo sapiens
tttttttttttttttcataaaatattgtttttatttttttaattagtaaataaggtcatgacagattttactcagagtgaaggcctactatgctgacaattatccctaaccatctttctctgccaaattctttactttccttaacccaaaaacaagctcctcccttttccaaccagctgctataagatttggttgtggaaaggaggaaacagaaagcaaaaaggggagtggggtaaaggatgctggggaaagggggagcagacagaaccctttgtgccagctcagaactgggaaaggacattacattcaccaatggcagattctcagcctcacccccccgttcatcctcctgaactctaggttttgaggagacacagaattgggtcttctttaacatcacctcttctctaataggtctttttcatcagacatcagaaggagacttg

SEQ ID NO: 4565 - DNA, 461 bp, Homo sapiens
tttgtttttcctccgtatttaattcggtatcacaggagcaccaataaatagtttcttcccgcccctgcaatcttcctcctgccccgggcagagccttaggggccggcgatcccgtcgggggcaaggcacctgcaacccagaacgcagcagctcaggccagctgaactgccgcgcctgcgaagctcccgggagagttccaaagcggtgcgtccaagttttccggcagtgggcggggcctaggaacgcccccgcgccccgccggtcgagcctcgaagggacttccccccaagagggcggggcactcagggggcgtggttttcgtcagcggctgtcacgatgacgtccatccaaatgcgcatggcttcggggctcggagccaccatgtagaaaaggcgttcgtaggttttgacgcagaaggtcaggcgggggttgggggctctgaaggcaacgcgtaagtggtt

SEQ ID NO: 4566 - DNA, 390 bp, Homo sapiens
gaataagctggcggccgccgcgctcgcgctcctcacctgggtggccgtggcgctgctcgggggcgcctgtgacgagtgcgcggccaccgggagcgcggccttcgcgcagcgcctgtgcctcggccgcaaccgcagctgcgccgcggagctgccgctggtgccgtgcaaccaggccaaggcgtcggacgtgcaggacctcctgaaggatctgaaggctcagtcgcaggtgttgggctggatcttgatagcagttgttatcatcattcttctgatttttacatctgtcacccgatgcctatctccagttagttttctgcagctgaaattctggaaaatctatttggaacaggagcagcagatccttaaaagtaaagccacagagcatgcaac

SEQ ID NO: 4567 - DNA, 335 bp, Homo sapiens
ttttttttttctcagttcagaggcttttaaaaaaatattctagacctagtaaagtgcctccattcataaaatgaaacatccaagattgagacaatttcatactgatgcgcatctaaaataggtcgacgtatacagtaaataaacagcgcctctaagttgccatatttcagttagtggaatacacacccagccttcgccgttctggatgtgcaaactagaaactgaagacaaatggggatttcagcgtctagtcccaatcgttcagcacggaagtactccacacggtcggctgcttttcaaaaaccaccaggacgacgtcccatgtcgagccgacc

SEQ ID NO: 4568 - DNA, 269 bp, Homo sapiens
cgttttttttttttttttttttttttttttttwtttttttttttattatttatccagatttatcaaaagtttattaaatagakatacaatggcaaaattcaaggcttttaacaattgagtggtaaagttcaavtggatggaagcmtaactcagaggagtaagagaagaaaagamcaatatttttbcctabtgccavtttaattcccacaaatttgcaaagtgagcattgttattctcagtttccagatgaatgcactgaaataatttgg

SEQ ID NO: 4569 - DNA, 211 bp, Homo sapiens
  misc_feature (45)..(45): n is a, c, g, or t
  misc_feature (57)..(57): n is a, c, g, or t
  misc_feature (104)..(104): n is a, c, g, or t
  misc_feature (157)..(157): n is a, c, g, or t
  misc_feature (168)..(168): n is a, c, g, or t
  misc_feature (170)..(170): n is a, c, g, or t
aagtagccgaagcggctggagcgggcggcaaggcgaggcgaaagntgcacagggccntacgcggccgcctcagcatgtcggacttcgacgagttcgagcggcantcatacgagaataaacaagagcgggacaaggagaaccggcatcggaagcgcancacagccgctntnggagccgggaccgcaaacgccggagccggagccgcgaccgg

SEQ ID NO: 4570 - DNA, 456 bp, Homo sapiens
ccctggctggaggatattttatggactataaattcctaaacaattataataacttagttatttatcctatccatggatcacctggaagtttacaatgtgatttaaaatgcattctatcattccaccgacctgcagtgaattttgttgtcattattactccagggatacctaaaggggaagtttgtttataattcgtacccactccttgtagaaaggattcaagacagccgatgatgaaaacacccatgcttgcaagtgaaggttctgcctgtcacttctcgcagaggctgcagaaaaggcccaggaggctgttgatgacatgaacgaccaccaggagaagctggagcaggctgatgcacagaagggcggagaagagggacacgtgccagacaacagctgcagagggctccaggcagacggagttccagagcgaacggtcatacagataattcctac

SEQ ID NO: 4571 - DNA, 490 bp, Homo sapiens
ccagacacaccccgaacatattactgaatgtttgggcaccgcatggcccagtcaagttgacacatgaaagtaaccatcacagtagctaaaactgaaatccacaatttaggataacagaggaaattcacttgactcaccccaaagtcaaaatgccagcctagtctccaggaagacacagttctcagccactagagaaagcacacgtgttttgtttcagatggtcatcttgaggaagcgaactcagtataacgcaacttgagatggacacttaataaatgtggttttgatcaaattctcataataaaaccgcacagaagaacccaatgtctaatgtttccattcacccaagctcaaggaactttgtacctcagggcatctgagtcagagagccgcttagcgactcaggcccggtgctgacaaaggaggctgcctgagtcactgaggctgagtaactggccctcggcacaggacaggagtaaactactcctga

SEQ ID NO: 4572 - DNA, 490 bp, Homo sapiens; identical to SEQ ID NO: 4571

SEQ ID NO: 4573 - DNA, 550 bp, Homo sapiens
tatcataaataaatgaaattttattatatttatgtctgcaaagtctacatagaggttgtttaaattagtagacaatattaaattgttatttctagcctaagtttacatacatgcaattaaaagcaattcgacccttaaaaatctcgatcttttatatgtattcatctttctttaataatcattaagaatcttgtccatatctattaatttcactaacaaatactttttattaactgtcaatagcatggttatacttgtaaggagtctaaaacacatatgtatatacatatatgaatttaaagattaaaaatacatatgtttatatattttaaatcgccatttacatggtaatttaaaaaattcttttctttttctctaattatctgcagtaagcatataatacttttttaactgaaaaaaaaacaacagcctccaaagaatgagagtgactattaaacacttgcaagtgctaaagattcataaaatccaaatattaacaatgttggcctggagctggaaagactgcatgcaacagtgacagcacatgggg

SEQ ID NO: 4574 - DNA, 405 bp, Homo sapiens
gagaagacgacagaaggggtgattggatggaaagaggccagaaaccccagcctgagagactgctgtgcaccccacagtctgactgcacagagccgcctctgttggcaggaggcactgaggctccccttcctgtgtattgagaagcagtgtttgccaatatattttgctttcaattccaagaggagctctgggaaaacctgtggataaaaccaaatgccaaatgttggacgttgtttccttttccttttctctctctgattgttttaattgttctgtggtggttttaatggatttgagaccctggagcggcagctgcctttctgatttccagctgctttttgtgaataattcaaaaaaaaaaaaaaaaaaaaaaaaaaaagtcgtatcgatgtcgagcgatcatga

SEQ ID NO: 4575 - DNA, 358 bp, Homo sapiens
tttttttttttttttttggacttttctgctcttattttactgtttagtattattcttttgaattatatgtgagttacatgagtaattacattttcaattttcaatgcttatggtctcttaaagtcttgccctggccctgatcctatctccattctcagccagggcacttcctgcatgtttctgccctagacagaaaggctctgtgaggacagcaactgtgcctctgctcccagagggaaggctccctgggggtggacctggtgtcctctggttttctctccttaatcttgtaccagaggcaagactcaaccaaatggtgctgcatcctgaccataacctcccttctccggctgcaaca

SEQ ID NO: 4576 - DNA, 318 bp, Homo sapiens
  misc_feature (259)..(259): n is a, c, g, or t
gcggccgctggacatgggaaagcggatccaccaaaaggagtgatgatcaacgatctcatgataaatctggatgctagttctcatgcctcaggacatcctactgggaacgacacaccagctcctgggatcagactttcatctacttaggacccctctttgcccagactactaaagccagtcttcactagccacgaatggctacccaaaggaaacacttggtgaaagattttaatccttacattacctgctatatctgtanagggtattctgatcaagccaacaacagtgacggaatgcctccatacatctgcagaatcc

SEQ ID NO: 4577 - DNA, 693 bp, Homo sapiens
caggaacacttgagcttctcatgttcaatgtgaataaaccgtcaaatcattctctgtgcagttatttcatgagaattcagcgaaattatgctgtagtgagggtctcatccttattaaacagttaagggaagtagctgacaatctcaccaaagctctatacaattgcagatgagttaattctctaaaagttgactgaggtgctaccgctataaaaaaagaaatggaggcaagacagatatgatcaagagatggtcatattgatgaaacagtatgtcttaaattttgctatgctccgaaatagggaaagttaagagctaccttaaattagaaataactaagtgaacaggtgcctcaggtacatttagtggagcgatgtgtagcagtcgctttcgtcaagtttcgttcccacattattgttcattcccaaatttctcaactctaaaagaatcaactttaaagatagctataattgatcacatccatatcaaatactaataattactttggtccatgtcccctcactcccagattttaacctatataccaggtgcacctatgtgtctcctcattttgagttcaggctcattgaattttaaagaacacttcagaactcagataggcagtaagtttataaaaggccaccttgtctggctcaatatatagaaattttcttctcgctggatactggggatc

SEQ ID NO: 4578 - DNA, 526 bp, Homo sapiens
ataattactcttactctatattcaaggacccagttcttcatcttctcaagaagaaaccagaaaggctaaacagtgttctctaaaactaaagaacagacactctccaacataattctttgtcacttcccagaatgtggaaaagtcattgttattaaaacatcaccccttttccgtcccactatgcaaaactcatatgctgagtggagacttaccctggaaaatgttacaaccaatgcaaagttggttgtctgcccatttgtcaccgcccccaaccctccacccaccaattcttccttgcactcagaactccagatttattcaggtacaagcagcaatgggaagcggaagggaaggaacatggacaacatccgtatcacttgtttaaaactgctcgttgatgaaaagttttggaaataggtagtagtgatggttgtacagcattgtagatgtaattactgccactgaattgtacacttaaaaatggttaaaatgacaaaatttgtgttacatatattttaccacagtt

SEQ ID NO: 4579 - DNA, 238 bp, Homo sapiens
ggccgcccacggccccgcgcccacgtcacgcgcccgccgcgcatacctacataaggcagccggggcgactggcgcggcgaggcccccgatgaacagggcgggctggacggggctaagagcggcacttggtgttcgggagaggctagtccgaaccgcgctccctcccctccagagggctccgtggaaaacgcgcgagccagctggcggcgtgtgcacgtggtgctgggcttgggaatat

SEQ ID NO: 4580 - DNA, 639 bp, Homo sapiens
tgggggctgcgggcgcgcggcggccgcgtgagccgccggagcaggagctgcagcgacgtcgggagcagaagcggcggcgacacgacgcgcagcagctgcagcagctcaagcacctggagtccttttacgaaaaacctcctcctgggcttatcaaggaagatgagactaagccagaagattgcataccagatgtaccaggcaatgaacacgccagggaatttctggctcatgcaccaactaaaggactttggatgccactggggaaagaagtcaaagttatgcagtgttggcgttgcaaacgctatggtcaccgaacgggtgacaaagaatgccctttctttatcaaaggcaaccaaaagttagagcagttcagagtggcacatgaagatcccatgtatgacatcatacgagacaataaacgacatgaaaaggacgtaaggatacagcagttaaaacagttactggaggattctacctcagatgaagataggagcagctccagttcctctgaaggtaaagagaaacacaagaaaaagaagaagaaagaaaagcataagaaaaggaagaaagaaaacgacaacagaagaaaaaacggaagcacagatcttccaagtcaaatgagggttctgactcagagtg

SEQ ID NO: 4581 - DNA, 522 bp, Homo sapiens
cggccgcgccggcgggggcagcgccggccgccgattagttttatctcggaacgtcaattgacttagactgattggcttcctgccgccaatgtcaattaaattgcaaatgcttggcggaggccggcgcgagcgggcggcctccttcccgggggcgccgcgctcagccttctctttgcgccacgttcggccgcagctgaattcatttctccttccacgtcgcgcaggaaatccaggtgacctcctggaagtcgtctgccctccgcccccggccctggggactcctccgtcggacccgagccccgaggaccccggccggtgggcgggagctaggcccacggggcgcccggaccgcggggccgaggaggaagggaccggcctccccgcagggacctcggcctctctgccgagctgtattctcacggtggctccgcggatccctggacctccttcaaagatcttgggatatgactcggtgcgcccttgagcgactcgcttcctgctcctctcatgcctggctttctt

SEQ ID NO: 4582 - DNA, 510 bp, Homo sapiens
caatccaaaaagcgtttattgagtgcagagctctgtgctggtcattttagtaaagccaagatgagcaagacttatgatgagtctctgtcatcaaggagctgggagtatgagctgaactaagacgcacacaaattattaaaatatggtgcagggtacttaaaggaagtccaaggagaaataaagctgacattattcaggacgttttaatatgtcagggcagtcacatatattaacaacccttccaaaaattccaggtaggctcagggaggataggtaacttgtcattaacgctagaaagttagtgtagtctggcattgtccctaaccgaggttctaaagctcaggctcctttcagaacactactgttaaagggaagccccaaagagtcgggggaggggactaagttttgactggatgtgtctcggttgccgtggagggaacaagaggtcagaaaagccatttggaggcagcgtgtgcgatgggactataaggatgaaccggagattgagtg

SEQ ID NO: 4583 - DNA, 395 bp, Homo sapiens
  misc_feature (366)..(366): n is a, c, g, or t
acaaagcattggctcggcattttaaaaaagatttgttttctgtttgtaaagatttcccaagagaagaaagcaaagaataatcccctgacactgtattgtaaaaaatgttctgtgcctcctttccttttattgcctctagccacagaaaccttatcagaatatttttgggtcagggtttccctttggaaactttataaggtaatgtgtcctcagccacccttcagttttttccctggttctgggtttcagtactgtctggggataaatcaagatatccactgtggctgtgtatgctacaatgtccaagtaaatttcagctcctggcctggaatgaaaccttccgcataaccggggaatgggagacangacaagccctgaaagttgggaattgtaaa

SEQ ID NO: 4584 - DNA, 245 bp, Homo sapiens
ggcggcggcggcggctcggctgggtcggtcgtcgctggctccgcggcctctcggcggctactcgtagctccttccctccgcgtctggcgccggcgcctcccgcccgcccgctcttccctccgccccacgacccgaacctcgacccctgaccccagcggcgggaaacgcgccgcgattcaaaaccagtacagctttattggctcaggaggcggacactctcattgtccggcccgccccgcgcttcc

SEQ ID NO: 4585 - DNA, 2711 bp, Homo sapiens
gggagagggagctctcgggtcggggctagggaaggctgaaccccgctcggcccgggtgaaagggcggtgacggcactgggtggggccgagctccagggctggctgctgggctgctaagggaactgtgagccgctcagagccgcgcgcctcccgggcggggcggggccggccgtgggagtccgcgcgtgcccgcgccgagctgcctgctccggcggcttcgctgctagctcgcggcgacgtcgggccgattttcccaggatgacagagctgaggcagagggtggcccatgagccggttgcgccacccgaggacaaggagtcagagtcagaagcaaaggtagatggagagactgcatcggacagtgagagccgggcagaatccgcacccctgccagtctctgcagatgataccccggaggtcctcaatagggccctttccaacttgtcttcaagatggaagaactggtgggtgagaggcatcctgactttggccatgattgcatttttcttcatcatcatttacctgggaccaatggttttgatgataatcgtgatgtgcgttcagattaagtgtttccatgagataatcactattggctacaacgtctaccactcatatgatctgccctggttcaggacgctcagctggtactttctcctgtgtgtaaactatttcttctatggtgagacagtgacggattacttcttcaccctggtccagagagaagagcctttgcggattctcagtaaataccaccggttcatttcctttactctctatctaataggattctgcatgtttgtactgagtctggtcaagaagcattatcgactgcagttctacatgtttggctggacccatgtgacattgctgattgttgtaacacagtcacatcttgttatccacaacctatttgaaggaatgatctggttcattgtccccatatcttgtgtgatctgtaatgacatcatggcctatatgtttggctttttctttggtcggaccccactcatcaagctgtccccgaagaagacctgggaaggcttcattgggggcttctttgctactgtggtgtttggccttctgctgtcctatgtgatgtccgggtacagatgctttgtctgccctgtggagtacaacaatgacaccaacagcttcactgtggactgtgagccctcggacctgtttcgcctgcaggagtacaacattcctggggtgatccagtcagtcattggctggaaaacggtccggatgtaccccttccagattcacagcatcgctctctccacctttgcctcgctcattggcccctttggaggattcttcgcaagtggattcaaacgagcctttaaaatcaaagactttgccaataccattcctggccatggaggcatcatggatcgctttgactgccagtatctgatggccacctttgtcaatgtatacatcgccagttttatcagaggccctaacccaagcaaactgattcagcagttcctgactttacggccagatcagcagctccacatcttcaacacgctgcggtctcatctgatcgacaaagggatgctgacatccaccacagaggacgagtaggggccacccagggtcaggagaacaggaacagaactgagcaggggcaggtctccaaggcaagcccagctggtgtgacttagacaatgacgaggcttcaactcactgtctttttttttttttttggagggtattttttatttgtgggttcaaaaaatctgtatatacagtctatgtgtttagaatttgtgttgtaagtaaactacagctttgagttggaaagaagtcacgggttgtaaaaccatttggatttttttaaaacaaaagtattaataatctggaagacagtgttgcccaggtcaggagtgttttcttggtggttccagcccccatcaattgaactgtttctgggctcagtcagacacagacattcatctgtgtctgaccaaatcaggggacttccccacctgtggtgaggcacagcttagatgttttgtacacctggtcttttctagaaatccctgcttggagctgcagaagggttgccttctgtaggtcggaggaatggaggcttactaaccaggtaagccttctatgcatccacaccaaaatcctgcagaatgtaagtaagctctgctttataagatgggttcaccttcatcgcagactgaaaatttcagtttttatttttttcagaaagcacgaaaaattatttataatagtctggagaaaaaacacactgtaatatttcaagtgtatgcagtagaatgtactgtaactgagccctttcccacatgtctaggctccaatgtctcctgtaggtccacctaactgtgtgttttcagggacaatgccatccatgtttgtgctgtagacttgctgctgctgaatcctttctggggactttctcatcgggcagggagcagagggcttctcgttcatgcaccctttgcctgaacacccatgtagctgctgtgttgtgtatatattactcttaagaggagtgtgtgtgtctgtgtttgttttaaaagtcacttatttcttacagtgatttcaattgcaccatgacttcttcactaaaaccacaaagtcctgcttaaaactatggaaaacctaacctgattagagccttgactattttgaagattaaatgcacactttttatataaaaaaaaacg

SEQ ID NO: 4586 - protein, 445 aa, Homo sapiens
MTELRQRVAHEPVAPPEDKESESEAKVDGETASDSESRAESAPLPVSADDTPEVLNRALSNLSSRWKNWWVRGILTLAMIAFFFIIIYLGPMVLMIIVMCVQIKCFHEIITIGYNVYHSYDLPWFRTLSWYFLLCVNYFFYGETVTDYFFTLVQREEPLRILSKYHRFISFTLYLIGFCMFVLSLVKKHYRLQFYMFGWTHVTLLIVVTQSHLVIHNLFEGMIWFIVPISCVICNDIMAYMFGFFFGRTPLIKLSPKKTWEGFIGGFFATVVFGLLLSYVMSGYRCFVCPVEYNNDTNSFTVDCEPSDLFRLQEYNIPGVIQSVIGWKTVRMYPFQIHSIALSTFASLIGPFGGFFASGFKRAFKIKDFANTIPGHGGIMDRFDCQYLMATFVNVYIASFIRGPNPSKLIQQFLTLRPDQQLHIFNTLRSHLIDKGMLTSTTEDE

SEQ ID NO: 4587 - DNA, 454 bp, Homo sapiens
gtcttaggaaggagaggagtcagtatgggatggataagagtgaggcataaggcagagagcctaggtctgtggttagaacaacaggtaaggctggaaagatttagctgagcaggagcatgatggagggtgggaagtcagaatcaaagaaaagggacaactgagtcagcttaggatgttcaagaagttttggtccagaatcagtcttcacctaaaaacgtttcctaagttgaagcatgagaagtagtagcccaggctgttttccattgttaaaaatggctatactgttatgcacaaaggaagtttcctttcctttcctttttcttgtaaagggttccttttaccattggcagttgcactctttggacttcctctttgttgaagttagtgatcagagaacaagatagaccctgctaaccacatttgtccgtgtgttctgcgggggttgggggggtgg

SEQ ID NO: 4588 - DNA, 522 bp, Homo sapiens; identical to SEQ ID NO: 4207

SEQ ID NO: 4589 - DNA, 554 bp, Homo sapiens
attaagaaatctgaaaaactttgaataggtagtaaaagatgatgaattcttagagctttacctcagaatgtgtaattttcatgcttttcctttctagaaatctaggaaacctgacatgggacctttggtaaatacattattattcatacattttgatggaatataactaatatgtttattttctctaaaccatagtttcataagtacaagccacacctttgatttacctaccctatcttctttactgatgaagctgaaactactttgtgatgcctattgtcccagatctttctgttaattgcctaacaacaaaccagtttagaaacatcaactggaatcaatttgcatttgaaaattagatcagcacaaagacttgatattgtggaatgactagcaaacaagcaatgtcatctaacgaacaagaaaggctcttgtgttataatggggaagtccttgttttccagttgtctaaaggaaattttgcagataaagagcctacaaaaacacccatattacatgtcagaagaatggtatttgacagaggaacaaaagta

SEQ ID NO: 4590 - DNA, 183 bp, Homo sapiens
  misc_feature (43)..(43): n is a, c, g, or t
  misc_feature (159)..(159): n is a, c, g, or t
  misc_feature (175)..(175): n is a, c, g, or t
aaggaaaacagaaatctgtattttgagatggtcattgtacagnaagaagtggcccctctgcaacatgtcctcacagaaacgaaatggtgtgtagcaatcaacactagaaagtagaccttttgcaaattaatatgtccttgaccttttttgcccttttcngggggtgaggtggggntaaaaaag

SEQ ID NO: 4591 - DNA, 510 bp, Homo sapiens
gcggccgcccagccccacactacagcatgctgccagtgaggacaacctgtccagcagcacgggcgaggccgtgtcccgggcagtcggacatcatggggacggccccaggccctggctgcgtggccagaagaaaagcctgggcaagaaaagggaggagtcgctggaggcaaagagaaggaagcggaggtcccgatccttcgaggtcaccgggcaagggctctcccaccccaagacacacctcctggggccccatcaggcggagcgcatctcggaccacaggatgccagtgtgcaggcacccagcccctggtatccggcatctgggaaaggtcacgctacctttggccaaagtcaaactccctccaagccagaacacgggcccgggggactcctcacccctggctgttccccccaacccaggtggtggttctcgacgggctacccgtgggccccgcctgccccacggcacaagcacccatggcaaagatggatgctcccggcataactgagg

SEQ ID NO: 4592 - DNA, 586 bp, Homo sapiens
ttgaatttaggtgacactatagaagagctatgacgtcgcatgcacgcgtacgtaagcttggatcctctagagcggccgcctactactactaaattcgcggccgcgtcgactttttttttttttttttttttgagacagggtctcactgttacccaggctggagaatagtagggcaatcatagctcactgtagtcttgacctcccaggctcaagtgatcctcctgcctcagccttccaagtaactgtgactacaggcacacaccaccacacctaactttttttttttttttaatttttagtggagaacaggccttactatgttgcccagggtgaactcctgttgctcagttcttgaaatcctgagctcaagtgattctccaacctcggcctcccaaagtgctgggattatagacatgagtcactgaacccagccagaataaatattcttaataactaaattcttggctacacttcagtaactttgtttctgatccttcctagggagtgagttaacaaatagggctgtgctggaagggctaggctgatagctgctcagtaaattttatcacggtatgactttttttga

SEQ ID NO: 4593 - DNA, 547 bp, Homo sapiens
aaagacagggtttccctctgtgtaatcacaaaggcacagtcacagctgatttgcagcctttacctcctgggctcaagtgaatttcccacctcagcctcctgagtagctggaactacaggtgtacaccaccacatccagctgatttttaattttttgtagagaggagatctcactatgttgcataggcttgtcttgaactgctgtgctcaagcgatcttcctgctttgatctcccaacgtgttgggattacaggcatgagcaccacacctggccctatttgccttttatgaagtcttttaataaagcaataaaaatattgaaatgtttttagaagcttctgcacatcaataggcatccttgaagactaattgaggacccctcatttttaagtgctgtgttgttcattaggaacggtccattgtaattttaagttacaaagattttgccatttctgtaagtagttatttcttctgaggcctaatatttatacattctaccttatagctagaaggtagaatacggtgttcttcagatactaaggatccaa

SEQ ID NO: 4594 - DNA, 422 bp, Homo sapiens
tttttttttttttttacaataagttacacatttatttatttaaataattgtaaaacattttaaaatttttccctttttttgttcattttttaaagagattaagctataagcaaacacacatacaacatttcatcattcaattcaggttgcgttttaagaaagtcttccatgctggtaccctgttttgttcaatttttttctgcataaactaaattggtatctgaaaggcttcatagaaaatagaaactttcaacttttttttcctacaaagaaaaacaaatagtatccaaaatattaagcattaattgtttgccaattttttcttaaatattttacaaacataggaaggtggttttcataatgttcataacaaagaattgcatttctgctcttagcactgactacgtcaatgacatcttttg

SEQ ID NO: 4595 - DNA, 280 bp, Homo sapiens
  misc_feature (137)..(138): n is a, c, g, or t
cgaattgtggcattccctcataatgcaaagggttttagaactgatggattaaaggcatccaaagacctagtgaaatcattctcagcttttttttttttttttttcctggcagctccatcatcttggggtttgtatannactttcccttttactagaagtactgacaggaaaaattttaaaatcataatattgtttatcttcattttgactttggggaacttcttgtgtatttcccaagactgttgtgccctctatgtagggaaagcattggccaagggtg

SEQ ID NO: 4596 - DNA, 458 bp, Homo sapiens; identical to SEQ ID NO: 2854

SEQ ID NO: 4597 - DNA, 2374 bp, Homo sapiens
gccccgcggcgggccacgcgtccgagccggagcccaagccagagcggcgcggcctggaagaggccagggcccgggggaggcggcggcagcggcggcggctggggcagcccgggcagcccgagccccgcagcctgggcctgtgctcggcgccatgagcggcggcgggccttcgggaggcggccctgggggctcgggcagggcgcggactagctcgttcgcggagcccggcggcggaggcggaggaggcggcggcggccccggaggctcggcctccggcccaggcggcaccggcggcggaaaggcatctgtcggggccatgggtgggggcgtcggggcctcgagctccgggggtggacccggcggcagcggcggaggaggcagcggaggccccggcgcaggcactagcttcccgccgcccggggtgaagctgggccgtgacagcgggaaggtgaccacagtcgtagccactctaggccaaggcccagagcgctcccaagaagtggcttacacggacatcaaagtgattggcaatggctcatttggggtcgtgtaccaggcacggctggcagagaccagggaactagtcgccatcaagaaggttctccaggacaagaggttcaagaaccgagagctgcagatcatgcgtaagctggaccactgcaatattgtgaggctgagatactttttctactccagtggcgagaagaaagacgagctttacctaaatctggtgctggaatatgtgcccgagacagtgtaccgggtggcccgccacttcaccaaggccaagttgaccatccctatcctctatgtcaaggtgtacatgtaccagctcttccgcagcttggcctacatccactcccagggcgtgtgtcaccgcgacatcaagccccagaacctgctggtggaccctgacactgctgtcctcaagctctgcgattttggcagtgcaaagcagttggtccgaggggagcccaatgtctcctacatctgttctcgctactaccgggccccagagctcatctttggagccactgattacacctcatccatcgatgtttggtcagctggctgtgtactggcagagctcctcttgggccagcccatcttccctggggacagtggggtggaccagctggtggagatcatcaaggtgctgggaacaccaacccgggaacaaatccgagagatgaaccccaactacacggagttcaagttccctcagattaaagctcacccctggacaaaggtgttcaaatctcgaacgccgccagaggccatcgcgctctgctctagcctgctggagtacaccccatcctcaaggctctccccactagaggcctgtgcgcacagcttctttgatgaactgcgatgtctgggaacccagctgcctaacaaccgcccacttccccctctcttcaacttcagtgctggtgaactctccatccaaccgtctctcaacgccattctcatccctcctcacttgaggtccccagcgggcactaccaccctcaccccgtcctcacaagctttaactgagactccgaccagctcagactggcagtcgaccgatgccacacctaccctcactaactcctcctgagggccccaccaagcacccttccacttccatctgggagccccaagaggggctgggaaggggggccatagcccatcaagctcctgccctggctgggcccctagactagagggcagaggtaaatgagtccctgtccccacctccagtccctccctcaccagcctcacccctgtggtgggctttttaagaggattttaactggttgtggggagggaagagaaggacagggtgttggggggatgaggacctcctacccccttggccccctcccctcccccagacctccacctcctccagaccccctcccctcctgtgtcccttgtaaatagaaccagcccagcccgtctcctcttcccttccctggcccccgggtgtaaatagattgttataatttttttcttaaagaaaacgtcgattcgcaccgtccaacctggccccgcccctcctacagctgtaactcccctcctgtcctctgcccccaaggtctactccctcctcaccccaccctggagggccaggggagtggagagagctcctgatgtcttagtttccacagtaaggtttgcctgtgtacagacctccgttcaataaattattggcatgaaaaaaagaaaaaaaaaaggctgcctgtttccgctgaggtggtgggggcttccggtggggggactgttctgggacgggagtgagctgcatctcaggcagagggctgtccgaaggccctggctcaggtgcccaaccttctcacaccgtggctttctctgcacgtgtggtgat

SEQ ID NO: 4598 - DNA, 3925 bp, Homo sapiens
aacatcctgccgatttgaaccgaggatttgggcggtcaggaattttagcggcgtaacggcagccatcttgtttgtttgagtgaatcggaaaggaggcgccggctgtggcggcggcgggagctgctcggaagctacacctcgcaagggctcccccctttccccaccccctcccccgacccttttcccctccccgggccacccagcccgcccaactcccagcggagagcaaggttttcttctgttttcatagccagccagaacaatgttctacgcacattttgttctcagtaaaagagggcctctggccaaaatttggctagcggcccattgggataagaagctaaccaaagcccatgtgttcgagtgtaatttagagagcagcgtggagagtatcatctcaccaaaggtgaaaatggcattacggacatcaggacatctcttactgggagtagttcgaatctatcacaggaaagccaaataccttcttgcagactgtaatgaagcattcattaagataaagatggcttttcggccaggtgtggttgacctgcctgaggaaaatcgggaagcagcttataatgccattactttacctgaagaatttcatgactttgatcagccactgcctgacttagatgacatcgatgtggcccagcagttcagcttgaatcagagtagagtggaagagataaccatgagagaagaagttgggaacatcagtattttacaagaaaatgattttggtgattttggaatggatgatcgtgagataatgagagaaggcagtgcttttgaggatgacgacatgttagtaagcactactacttctaacctcctattagagtctgaacagagcaccagcaatctgaatgagaaaattaaccatttagaatatgaagatcaatataaggatgataattttggagaaggaaatgatggtggaatattagatgacaaacttattagtaataatgatggcggtatctttgatgatccccctgccctctctgaggcaggggtgatgttgccagagcagcctgcacatgacgatatggatgaggatgataatgtatcaatgggtgggcctgatagtcctgattcagtggatcccgttgaaccaatgccaaccatgactgatcaaacaacacttgttccaaatgaggaagaagcatttgcattggagcctattgatataactgttaaagaaacaaaagccaagaggaagaggaagctaattgttgacagtgtcaaagagttggatagcaagacaattagagcccaacttagtgattattcagatattgttactactttggatctggcaccgcccaccaagaaattgatgatgtggaaagagacaggaggagtagaaaaactgttttctttacctgctcagcctttgtggaataacagactactgaagctctttacacgctgtcttacaccgcttgtaccagaagaccttagaaaaaggaggaaaggaggagaggcagataatttggatgaattcctcaaagaatttgaaaatccagaggttcctagagaggaccagcaacagcagcatcagcagcgtgatgttatcgatgagcccattattgaagagccaagccgcctccaggagtcagtgatggaggccagcagaacaaacatagatgagtcagctatgcctccaccaccacctcagggagttaagcgaaaagctggacaaattgacccagagcctgtgatgcctcctcagcaggtagagcagatggaaataccacctgtagagcttcccccagaagaacctccaaatatctgtcagctaataccagagttagaacttctgccagaaaaagagaaggagaaagagaaggaaaaagaagatgatgaagaggaagaggatgaagatgcatcagggggcgatcaagatcaggaagaaagaagatggaacaaaaggactcagcagatgcttcatggtcttcagcgtgctcttgctaaaactggagctgaatctatcagtttgcttgagttatgtcgaaatacgaacagaaaacaagctgccgcaaagttctacagcttcttggttcttaaaaagcagcaagctattgagctgacacaggaagaaccgtacagtgacatcatcgcaacacctggaccaaggttccatattatataaggagctagaagcattatagctagtgtttgattcactagtgcttacaaattgcccccatgtgtaggggacacagaaccctttgagaaaacttagatttttgtctgtacaaagtctttgcctttttccttcttcatttttttccagtacattaaatttgtcaatttcatctttgagggaaactgattagatgggttgtgtttgtgttctgatggagaaaacagcaccccaaggactcagaagatgattttaacagttcagaacagatgtgtgcaatattggtgcatgtaataatgttgagtggcagtcaaaagtcatgatttttatcttagttcttcattactgcattgaaaaggaaaacctgtctgagaaaatgcctgacagtttaatttaaaactatggtgtaagtctttgacaagaaaaaaaaacaaacaaacacttctttccatcagtaacactggcaatcttcctgttaaccactctccttagggatggtatctgaaacaacaatggtcaccctcttgagattcgttttaagtgtaattccataatgagcagaggtgtacgcgaaattgtgttatgactgatagccttcagctacaaaaagataggactgacctggtttaaagtgttctattttgtaaatcattccatttgagtctttctgatgaacttggctatactgaaatctgttattttagtgaggctccaaaatgagcaaagctaggcctgattagagtagagtgactattaaaaaacataactttctaggagctataaatcaaagttttaaaaagatgtttggatatatttgagtattccgatcatgaaaacagaaattgccctgcctactacaaggacagactgatgggaaattatgcacctggtcaacttagcttttaagcagacgatgctgtaaaaactaacggcttctctgatatttattgtaagttttagtactgatctccttttccagtgctgcacactcctggtttggaactttaatagcgttgcaacgaaatcctatatccagtttcctgtaatttaattgaagaaaaatacatccaaataaagactttattattaacagaccagatagcatcagaaatcatgtgactgttatgattatcagaatatgtcttaactttttagggcaaagttaacactgaaagttctagcttaagtgttgaaacttttgtgggaaaaaaaaatcacttttgaaactcagacttcagtgtatacccaataatttaaaattatgtgaaatgttttaaatttgtgaactcgtaattactgttttaatgattcagtttcttcagagtggtaattgtataaaattgctattgcagctttatattcaatatgatgtgcctgtaaaccaaggagttttccccgtttgtaaaaagacattgtagataattgaatgtttgattttagaaaggtcattagtttcttgttacacattttgttagtctggtttttgttgcttatcgggtttaatattgttcttgaaaatagttgatgctatgttatgtataacttttctaataaaagttgtgttataagctgtaaaaaaaaaaaaaaaaaaaaaaaaaaaaaaaaaaaaaaatttttgggggggcgcgtggggcccggaaaaaatgttttaaaacactttgtggggggcgggggccaggggtattaggaaacagggcctaggggtccagaaaaaaccgggcttgtaagtggtgggttctccaaaaaaagccggggaggggttttaaaactccg

SEQ ID NO: 4599 - DNA, 4125 bp, Homo sapiens
  misc_feature (2127)..(2154): n is a, c, g, or t
  misc_feature (2182)..(2224): n is a, c, g, or t
agcggaggatacgtggctgagcgcgcgcgatgggtcgggatgtttggggtcaaggagcaaactctgcacaagatggcggcggtagcggcagtggcggcgcgtaggaggcggtcttgggcgtctttggtactggcttttttaggggtctgcctggggattacccttgctgtggatagaagcaactttaagacctgtgaagagagttctttctgcaagcgacagagaagcatacggccaggcctctctccataccgagccttgctggactctctacagcttggtcctgattccctcacggtccatctgatccatgaggtcaccaaggtgttgctggtgctagagcttcaggggcttcaaaagaacatgactcggttcaggattgatgagctggagcctcggcgaccccgataccgtgtaccagatgttttggtggctgatccaccaatagcccggctttctgtctctggtcgtgatgagaacagtgtggagttaaccatggctgagggaccctacaagatcatcttgacagcacggccattccgccttgacctactagaggaccgaagtcttttgcttagtgtcaatgcccgaggactcttggagtttgagcatcagagggcccctagggtctcgcaaggatcaaaagacccagctgagggcgatggggcccagcctgaggaaacacccagggatggcgacaagccagaggagactcaggggaaggcagagaaagatgagccaggagcctgggaggagacattcaaaactcactctgacagcaagccgtatggccccatgtctgtgggtttggacttctctctgccaggcatggagcatgtctatgggatccctgagcatgcagacaacctgaggctgaaggtcactgagggtggggagccatatcgcctctacaatttggatgtgttccagtatgagctgtacaacccaatggccttgtatgggtctgtgcctgtgctcctggcacacaaccctcatcgcgacttgggcatcttctggctcaatgctgcagagacctgggttgatatatcttccaacactgccgggaagaccctgtttgggaagatgatggactacctgcagggctctggggagaccccacagacagatgttcgctggatgtcagagactggcatcattgacgtcttcctgctgctggggccctccatctctgatgttttccggcaatatgctagtctcacaggaacccaggcgttgcccccactcttctccctcggctaccaccagagccgttggaactaccgggacgaggctgatgtgctggaagtggatcagggctttgatgatcacaacctgccctgtgatgtcatctggctagacattgaacatgctgatggcaagcggtatttcacctgggaccccagtcgcttccctcagccccgcaccatgcttgagcgcttggcttctaagaggcggaagctggtggccatcgtagacccccacatcaaggtggactccggctaccgagttcacgaggagctgcggaacctggggctgtatgttaaaacccgggatggctctgactatgagggctggtgctggccaggctcagctggttaccctgacttcactaatcccacgatgagggcctggtgggctaacatgttcagctatgacaattatgagggctcagctcccaacctctttgtctggaatgacatgaacgaaccatctgtgttcaatggtcctgaggtcaccatgctcaaggatgcccagcattatgggggctgggagcaccgggatgtgcataacatctatggcctttatgtgcacatggcgactgctgatgggctgagacagcgctctgggggcatggaacgcccctttgtcctggccagggccttcttcgctggctcccagcgctttggagccgtgtggacaggggacaacactgccgagtgggaccatttgaagatctctattcctatgtgtctcagcttggggctggtgggactttccttctgtggggcggatgtgggtggcttcttcaaaaacccagagccagagctgcttgtgcgctggtaccagatgggtgcttaccagccattcttccgggcacatgcccacttggacactgggcgacgagannnnnnnnnnnnnnnnnnnnnnnnnnnntcagcacaatgatataatccgagatgcnnnnnnnnnnnnnnnnnnnnnnnnnnnnnnnnnnnnnnnnnnncccttctggtacaccctcttatatcaggcccatcgggaaggcattcctgtcatgaggcccctgtgggtgcagtaccctcaggatgtgactaccttcaatatagatgatcagtacttgcttggggatgcgttgctggttcaccctgtatcagactctggagcccatggtgtccaggtctatctgcctggccaaggggaggtgtggtatgacattcaaagctaccagaagcatcatggtccccagaccctgtacctgcctgtaactctaagcagtatccctgtgttccagcgtggagggacaatcgtgcctcgatggatgcgagtgcggcggtcttcagaatgtatgaaggatgaccccatcactctctttgttgcacttagccctcagggtacagctcaaggagagctctttctggatgatgggcacacgttcaactatcagactcgccaagagttcctgctgcgtcgattctcattctctggcaacacccttgtctccagctcagcagaccctgaaggacactttgagacaccaatctggattgagcgggtggtgataataggggctggaaagccagcagctgtggtactccagacaaaaggatctccagaaagccgcctgtccttccagcatgaccctgagacctctgtgttggtcctgcgcaagcctggcatcaatgtggcatctgattggagtattcacctgcgataacccaagggatgttctgggttagggggagggaaggggagcattagtgctgagagatattctttcttctgccttggagttcggccctccccagacttcacttatgctagtctaagacccagattctgccaacatttgggcaggatgagagggctgaccctgggctccaaattcctcttgtgatctcctcacctctcccactccattgataccaactctttcccttcattcccccaacatcctgttgctctaactggagcacattcacttacgaacaccaggaaaccacagggcccttgtcgccccttctctttcccttatttaggagccctgaactcccccagagtctatccattcatgcctcttgtatgttgatgccacttcttggaagaagatgagggcaatgagttagggctccttttccccttccctcccaccagattgctctcccacctttcatttcttcctccaggctttactcccctttttatgccccaccgatacactgggaccaccccttaccccggacaggatgaatggatcaaaggagtgaggttgctaaagaacatccttttccctctcattctacccttttcctctccccgattccttgtagagctgctgcaattcttagaggggcagttctacctcctctgtccctcggcagaaagacgtttccacacctcttaggggatgcgcattaaacttcttttgcccccttcttgtcccctttgaggggcacttaagatggagaaatcagttgtggtttcagtgaatcatggtcacctgtatttattgctaggagaagcctgagggtggggggagatgatcatgtgtgctcggggttggctggaagccctgggtggggggttgggggaggactaatggggagtcggggaatatttgtgggtattttttttacttcctcttggttcccagctgtgacacgttttgatcaaaggagaaacaataaagggataaaccataaaaaaaaaaaaaaaaacggtgaaatatccgaagaggcccataccgtcccccctgtcacaaggccaatgagcaataaagaggcgccgaaagcgacgacaactgcggctaccgacacctgggccaggaccaccaagacacgaaaatgatttgatcgcgtcggtgactgtgatgtatccggcgcctcctgcgatgaccacttcccgctc

SEQ ID NO: 4600 - DNA, 4373 bp, Homo sapiens
  misc_feature (1376)..(1393): n is a, c, g, or t
agcgggctcgcgcggcagcggtggccgaggcctcttggttctgcggcacgtgacggtcgggccgcctccgcctctctctttactgcggcgcggggcaaggtgtgcgggcgggaaggggcacgggcacccccgcggtccccgggaggctagagatcatggaagggaagtggttgctgtgtatgttactggtgcttggaactgctattgttgaggctcatgatggacatgatgatgatgtgattgatattgaggatgaccttgacgatgtcattgaagaggtagaagactcaaaaccagataccactgctcctccttcatctcccaaggttacttacaaagctccagttccaacaggggaagtatattttgctgattcttttgacagaggaactctgtcagggtggattttatccaaagccaagaaagacgataccgatgatgaaattgccaaatatgatggaaagtgggaggtagaggaaatgaaggagtcaaagcttccaggtgataaaggacttgtgttgatgtctcgggccaagcatcatgccatctctgctaaactgaacaagcccttcctgtttgacaccaagcctctcattgttcagtatgaggttaatttccaaaatggaatagaatgtggtggtgcctatgtgaaactgctttctaaaacaccagaactcaacctggatcagttccatgacaagaccccttatacgattatgtttggtccagataaatgtggagaggactataaactgcacttcatcttccgacacaaaaaccccaaaacgggtatctatgaagaaaaacatgctaagaggccagatgcagatctgaagacctattttactgataagaaaacacatctttacacactaatcttgaatccagataatagttttgaaatactggttgaccaatctgtggtgaatagtggaaatctgctcaatgacatgactcctcctgtaaatccttcacgtgaaattgaggacccagaagaccggaagcccgaggattgggatgaaagaccaaaaatcccagatccagaagctgtcaagccagatgactgggatgaagatgcccctgctaagattccagatgaagaggccacaaaacccgaaggctggttagatgatgagcctgagtacgtacctgatccagacgcagagaaacctgaggattgggatgaagacatggatggagaatgggaggctcctcagattgccaaccctagatgtgagtcagctcctggatgtggtgtctggcagcgacctgtgattgacaaccccaattataaaggcaaatggaagcctcctatgattgacaatcccagttaccagggaatctggaaacccaggaaaataccaaatccagatttnnnnnnnnnnnnnnnnnnctttcagaatgactccttttagtgctattggtttggagctgtggtccatgacctctgacattttttttgacaactttatcatttgtgctgatcgaagaatagttgatgattgggccaatgatggatggggcctgaagaaagctgctgatggggctgctgagccaggcgttgtggggcagatgatcgaggcagctgaagagcgcccgtggctgtgggtagtctatattctaactgtagcccttcctgtgttcctggttatcctcttctgctgttctggaaagaaacagaccagtggtatggagtataagaaaactgatgcacctcaaccggatgtgaaggaagaggaagaagagaaggaagaggaaaaggacaagggagatgaggaggaggaaggagaagagaaacttgaagagaaacagaaaagtgatgctgaagaagatggtggcactgtcagtcaagaggaggaagacagaaaacctaaagcagaggaggatgaaattttgaacagatcaccaagaaacagaaagccacgaagagagtgaaacaatcttaagagcttgatctgtgatttcttctccctcctcccctgcaagagtggtcctaggagaggacctggcacaccttaggttgacattcagaaaacttcaagacatcaccatcagcaggctccagttgaacactagtctgtgtaactttaaacatctagcagtaaatacttgcagttgtgatataaaggaccctgtttctgtagaaaagaaaacatttaacataatggttgtgaaatgtaacatgaagcaaactaacttttttttttttaacatctttgtttttaaaatagaatgatagaactttgccagtctttaagatcttggcttaatttaatgtattaatctgtttgtgcaaacataataccaccatttaaaaatgttagggagatgagttgcagtttttataatagattttttttaaagtttggtattgtaaaacattcacacctctgtccctcaaaattgataattacgtttaaagtgcagtcatttgtggttagaatcttgttttgtttgcttccattattgagttcctcctaaggaaattgaggagagggactgaatagaagcccaaattcatataaaagttgcgtttaagttgtattaaaaatagatatataagaaaaaattctttcacttgatgtttgttagaccagaaagtgtgtgtgttctgtagctcagttcccagacagctttttaggtagtggaggaggtggcttcatgtggcacttgggcatttatattccacttgggagggtcaggctgtggccttctggagcaggtggcttgttaaggaacgctagcagggcatggcacgtgagctccggaatagatgtcttcatcacttcttccactgtgtgttgacactgttttccttacctatttcctcagatccccagctttctcctctgctatgcattttcttcacagtgcagcttgcagtccgttgctgaaaatgattataagccctgcataatgttaagctttattgtgattacgtgtatgtttcttctttcttttaagcagacccatacctttccagggtcaaagtacagaatagaatacattgatacaaagtacagaaaaatactttgatttttatccatttcttttactctgtgtaaagactttagaagtctaattcacaggcaaaccaatacagaattgactgcagttgaacagactagaagtatttgtgggaggagtgacatgaagcatgagttatctgattttttttgtagctgctatatattttaagccttcatttgcaattcatgtaacagttgtgtcataaattacacaataaagcagtcctgttcaaatttttttttaacgtggcttgtagaatttttaaaaaagtgatcttaggtttgttttttcatgcgggatgcagatgggtgctatcagagcctctcccacaccactatagtgtaataatgttattattactctacactgaaacgtattcagagttagatattattttagcttcagttgttctttagaggctttcaaatgtaccgatgatactgtttcttgcactgaatatataaacactccacagtgtttatattgggaagatattgggaaggaaatatatttgtaaaagatgaaggctgtatctatttttttttctttttaaactggttcacttaaattcttttgaggatgggatgtatttttcttgctgttcagtgctttttccttttcatctgttgttctgtggtcacagtgaccttagctacatagcagactttcccaaatgtattgattacaaataaacagttgttacttagcaagacctgaaaatatgtctgcaggtttctccttgaagcaaatgtgtgggatcattgcatttccagaaatctgcctccttcaccctccgttgacagtatatgtcatgcctcactttcttctagctgagctttaaatcattagagcttaaattgtcagatcgttcattgcctttccagggttatttagtaaagtttgttgaaaacaaaaacgccttttcttggttcttttttcagttattttgaaggtccagcatcctgattaaatgtctgacacttaatgaatgaccagcagcagctttcagctcttaaaaagacacttatattttgattttacatgctggttacctgttccattgttgtcaaatgcccagtgtccatcagatgtgttcctccattttcttatccacaaagtactcctcacttttcaatttgtcatgttactaaaccctgttacattaaagccctgtgttaagtgtcaaaaaaaaaaaaaaaaaaaaaagtggtttcaacaaagaggacccctccacgacaggctacaccacacggacaaaaaagggggcgcctaaaattcccagggcacataccaccttttaaaggcccaagaggaaaaaaaaggcgcccaaaaaggggaacatc

SEQ ID NO: 4601 - DNA, 3001 bp, Homo sapiens
agaaagatattttatggtaactgttgctcgtctatttaactatatatttatgtaatcaatatatgatgaacctaaccccattggcaccccccttagacttgtgtgctgtttccctatatcctcccatctgctggcagagtacccaccccacaaactgaccagatggagaggtggccccccccagccttggcagtatttccaccccaccccccaaacgagcactttttttttttcccagctcagctgtgaactattggatttgagacaggaacagaacaaatcagagggccaggggagggttgtgggggagacagagtggtttaaataggggaggaggggaagttcggtgatgggggagggaggcaggtatttacaagaaggctcagggggccagaggctcatcttggaatattttataacaatataaataagattctggtttgcttttccttttcgtctcgtaaaggagagagaagtgcagagttcgattctgtacaagggggcagcggcagaaggccggccgggcgggtcactgggcgtccacccggaaggacagcagcttctcggaatgcatgttgttcagggtccgcaggtccggcagcttgagcagcagcttggtgaagcgggaagtctccaagggccggttcttcagcaccagagcccgaagagcccgcagcagcgtctcctggagctgctccaccgaagcggaattctccatgcccgagcggtctgcagagacaagcaccaccgcggtgaagaggcccagctcctcctcggtaagcgccagggagttgagcttctcgctgaagtcgaacatggcactgagcaggtctcccatgcccatggcaccaagctcctgcaggctgtaggtggtgcggcttaggaacatcactgtctggtccttcacgttgaacaacgaagcaaagcgcaccatcagcacctcaaaggtgccagccttaagcagggtgacttggtcatgctgagaaaggtcacggaagcccgggatgtgtttggcaaactctaccacctcccgcacagcgggcgtgaagctcatggagaaatcctcccagatctcctgcaccgttcgcccactgcgtccatgcgggtacatgttcataggacatgccagcagaacattctttgagttgccctgccggggactgttggcaggtgccttgccttctggggctgcatacacgtgggtggggcatagacggtgcccgttgctgttggactggtggcagctgtggtgtgcagggccaggaggccaggtgggagggtaggaggagggagcctggcgcagaccatttagggcctcgttatgacgctgggcagccaaggtgttgttgtcattgggggcaggtgggcagccctgattttcccagcgatgtggggtggtggctggagggctacctgatgcatggttggcattgaagttgccaggtgagctgcccagcttgtcatgggcgtaggtgaagatctctcgatgggcccgggccacctgggatatcacatcctccactgtgggctcagggcttggggatctgggaggcgtcagctgttgtggaaactgggagaagcccaccaggggtgaggggaccggagcagggggtggcgaggggcccatggggcctggggtggggtgctgggtgggtgaagtctccagcgggcactggctgctcaactggttgttggccaggttcatggcactctgcatctcagcaagcatccgctgcttctctcgtttggggatgcgcccaaaacgcacagcgtctcgagacatgcccacagagagacacttcttgaagcgacattgctggcagcggttgcgattgatgcggacgatggagcaattctcattcttcagacaccttttgtactggatgttctgctggatgctccgacggaaaaagcccttgcagccctcgcaggcgtgcacaccgtagtggaagcccgaggcaacgtccccacacactttacacagtaacaccatgccattcagcttggtgatgttgctggtgctcttgctgggggacactcggctgctgtcctccatggccacttgtagactcccaggggggctcccattatagaaggaggaggaggatgacgacgaggaagatgaggaagaaggggagccgtcatcactcaggctgggtggaatgctcccaaaggagcgagccgggtcttgggtgagggagccagtgggggatggtgggaagtaggtgggacagccttgggtcagggactggaagctgccattggagttgtcactatagagggattcagggctggtgcggcttggggaggagccactggagccaatgtaggtgatgacgccacctgtgttgttgttggagtccagggtcgtcatgtcttcaccagctgagagcggtcattcaaactggaccttgactcaaactagaggttgcgatcgccgctgttgccccctgggcactggctaagggcggggagtggaccccgcgactcacgatcaggatccgaagcaccctgcagcaaggtcttggggtggccggactgcagccctgcagaagggttggacgttgaggcaacggagttctgctttgcatgggaagagcagagagagtgtgtagggggaatcagcctgcagtagttctggctagaaggtagcaaggagggtcgggtctctgcagtgtacggggtgcctctgcctgccggctccgcagcgctgcggggtagcgaatctggagctcccggtgcaaaagtcccagaggaagagaggttgcaaccaggaagtaagtaggtgatggggagaaacggggcaccgagtcgcaaagaggcgagacgtgtgccctgctacgttccctcggcagtaatatttcactctgccaatctcagccgccttttgcccgagcctttccctgggacagagggctctgcgcaggcgccagcagcccagggttcccgggccgcacgcggcactggagcaggtaccatgtgatcccagggagcgcctcgg

SEQ ID NO: 4602 - DNA, 3001 bp, Homo sapiens; identical to SEQ ID NO: 4601

SEQ ID NO: 4603 - DNA, 1996 bp, Homo sapiens
  misc_feature (1473)..(1473): n is a, c, g, or t
tgcccagatcagcccccagagcagcctcatggctggttaggagaaattgagcccgcagcctcccgcttcgctctctgctcctcctgttcgacagtcagccgcatcttcttttgcgtcgccagccgagccacatcgctcagacaccatggggaaggtgaaggtcggagtcaacggatttggtcgtattgggcgcctggtcaccagggctgcttttaactctggtaaagtggatattgttgccatcaatgaccccttcattgacctcaactacatggtttacatgttccaatatgattccacccatggcaaattccatggcaccgtcaaggctgagaacgggaagcttgtcatcaatggaaatcccatcaccatcttccaggagcgagatccctccaaaatcaagtggggcgatgctggcgctgagtacgtcgtggagtccactggcgtcttcaccaccatggagaaggctggggctcatttgcaggggggagccaaaagggtcatcatctctgccccctctgctgatgcccccatgttcgtcatgggtgtgaaccatgagaagtatgacaacagcctcaagatcatcagcaatgcctcctgcaccaccaactgcttagcacccctggccaaggtcatccatgacaactttggtatcgtggaaggactcatgaccacagtccatgccatcactgccacccagaagactgtggatggcccctccgggaaactgtggcgtgatggccgcggggctctccagaacatcatccctgcctctactggcgctgccaaggctgtgggcaaggtcatccctgagctgaacgggaagctcactggcatggccttccgtgtccccactgccaacgtgtcagtggtggacctgacctgccgtctagaaaaacctgccaaatatgatgacatcaagaaggtggtgaagcaggcgtcggagggcccccctcaaagggcatcctggggctacactgagcaccaggtggtctcctctgacttcaacagcgacacccactcctccacctttgacgctggggctggcattgccctcaacgaccactttgtcaagctcatttcctggtatgacaacgaatttggctacagcaacagggtggtggacctcatggcccacatggcctccaaggagtaagacccctggaccaccagccccagcaagagcacaagaggaagagagagaccctcactgctggggagtccctgccacactcagtcccccaccacactgaatctcccctcctcacagttgccatgtagaccccttgaagaggggaggggcctagggagccgcaccttgtcatgtaccatcaataaagtaccctgtgctcaaccaaaaaaaaaaaaaaaaaaaaaaaaaaaaaaaaaaaaaaaaaaaaaaaggccgggcgtggcggaaaaaaaagcgcgcaacaggaatgggcgcaagcggcgccataaagcgtggttctncgtggacccaacggttcctgtggtccccacagggggggacacctcagcgcagcgggtaccctcctaatatagggaggagccgcggaaatacactgttccggaaaaaaaccccggggtgtcaccccggtggagatttacggaactgctcgggcaaaaaccgacgcagacgacgacaacgcaagcacgcacgaaggagatggaacgaacgcgcagcagacgacacacgcagggaagaacatcaacacaaagggcaaacacacaaacaaagacaggaggggcgaaacgcagaagagacaagagagaagaaaaacgaggcggtagagcacaaagaaaagagcacaggacgagtacagagcgccagagcacgaacgaaaaaaagaaggcggtcgaccaaaaaaagacaacgaaggaaaagcaagaatacaaggtaggagaggagaggagaggacgcacgaacaagcgaacgtcggagcaaggcgctgaaggaagacacgaagagagaagagagagacgagcgaaagga

SEQ ID NO: 4604 - DNA, 4897 bp, Homo sapiens
  misc_feature (66)..(85): n is a, c, g, or t
  misc_feature (205)..(250): n is a, c, g, or t
  misc_feature (4852)..(4883): n is a, c, g, or t
ttacgtcaagcgtagcctcttctcctttaccaagatggcggcttgtccctgtttttccacagttcnnnnnnnnnnnnnnnnnnnnggttttcttatgcttataagagtggaacagcagttccaccttttcatggttgaggagcacatgtggtcgccagcctcccatctccagagtcccctaaggcaagatccccagtggattagnnnnnnnnnnnnnnnnnnnnnnnnnnnnnnnnnnnnnnnnnnnnnngtagcctcttctcctttaccaagatggcggcttgtccctgtttcgccagaattcggggggcgagtaagccagcggcaggaccagcgggcgggggccacagcaaaagctggcaggctgacagaggcggcctcaggacggaccttctggctactgaccgttttgctgtggttttcccggattgtgtgtaggtgtgagatcaaccatgagttccgttgcagttttgacccaagagagttttgctgaacaccgaagtgggctggttccgcaacaaatcaaagttgccactctaaattcagaagaggagagcgaccctccaacctacaaggatgccttccctccacttcctgagaaagctgcttgcctggaaagtgcccaggaacccgctggagcctgggggaacaagatccgacccatcaaggcttctgtcatcactcaggtgttccatgtacccctggaggagagaaaatacaaggatatgaaccagtttggagaaggtgaacaagcaaaaatctgccttgagatcatgcagagaactggtgctcacttggagctgtctttggccaaagaccaaggcctctccatcatggtgtcaggaaagctggatgctgtcatgaaagctcggaaggacattgttgctagactgcagactcaggcctcagcaactgttgccattcccaaagaacaccatcgctttgttattggcaaaaatggagagaaactgcaagacttggagctaaaaactgcaaccaaaatccagatcccacgcccagatgaccccagcaatcagatcaagatcactggcaccaaagagggcatcgagaaagctcgccatgaagtcttactcatctctgccgagcaggacaaacgtgctgtggagaggctagaagtagaaaaggcattccaccccttcatcgctgggccgtataatagactggttggcgagatcatgcaggagacaggcacgcgcatcaacatccccccacccagcgtgaaccggacagagattgtcttcactggagagaaggaacagttggctcaggctgtggctcgcatcaagaagatttatgaggagaagaaaaagaagactacaaccattgcagtggaagtgaagaaatcccaacacaagtatgtcattgggcccaagggcaattcattgcaggagatccttgagagaactggagtttccgttgagatcccaccctcagacagcatctctgagactgtaatacttcgaggcgaacctgaaaagttaggtcaggcgttgactgaagtctatgccaaggccaatagcttcaccgtctcctctgtcgccgccccttcctggcttcaccgtttcatcattggcaagaaagggcagaacctggccaaaatcactcagcagatgccaaaggttcacatcgagttcacagagggcgaagacaagatcaccctggagggccctacagaggatgtcaatgtggcccaggaacagatagaaggcatggtcaaagatttgattaaccggatggactatgtggagatcaacatcgaccacaagttccacaggcacctcattgggaagagcggtgccaacataaacagaatcaaagaccagtacaaggtgtccgtgcgcatccctcctgacagtgagaagagcaatttgatccgcatcgagggggacccacagggcgtgcagcaggccaagcgagagctgctggagcttgcatctcgcatggaaaatgagcgtaccaaggatctaatcattgagcaaagatttcatcgcacaatcattgggcagaagggtgaacggatccgtgaaattcgtgacaaattcccagaggtcatcattaactttccagacccagcacaaaaaagtgacattgtccagctcagaggacctaagaatgaggtggaaaaatgcacaaaatacatgcagaagatggtggcagatctggtggaaaatagctattcaatttctgttccgatcttcaaacagtttcacaagaatatcattgggaaaggaggcgcaaacattaaaaagattcgtgaagaaagcaacaccaaaatcgaccttccagcagagaatagcaattcagagaccattatcatcacaggcaagcgagccaactgcgaagctgcccggagcaggattctgtctattcagaaagacctggccaacatagccgaggtagaggtctccatccctgccaagctgcacaactccctcattggcaccaagggccgtctgatccgctccatcatggaggagtgcggcggggtccacattcactttcccgtggaaggttcaggaagcgacaccgttgttatcaggggcccttcctcggatgtggagaaggccaagaagcagctcctgcatctggcggaggagaagcaaaccaagagtttcactgttgacatccgcgccaagccagaataccacaaattcctcatcggcaaggggggcggcaaaattcgcaaggtgcgcgacagcactggagcacgtgtcatcttccctgcggctgaggacaaggaccaggacctgatcaccatcattggaaaggaggacgccgtccgagaggcacagaaggagctggaggccttgatccaaaacctggataatgtggtggaagactccatgctggtggaccccaagcaccaccgccacttcgtcatccgcagaggccaggtcttgcgggagattgctgaagagtatggcggggtgatggtcagcttcccacgctctggcacacagagcgacaaagtcaccctcaagggcgccaaggactgtgtggaggcagccaagaaacgcatcaggggatcactggggacctggaagctcaggtgacattagaatgtgctataccccagaaattccatcgatctgtcatgggccccaaaggttccagaatccagcagattactcgggatttcagtgttcaaattaaattcccagacagagaggagaacgcagttcacagtacagagccagttgtccaggagaatggggacgaagctggggaggggagagaggctaaagattgtgaccccggctctccaaggaggtgtgacatcatcatctctgggcccggaaaaaaaaaagtgtgaggctgccaaggaagctctggaggcattggttcctgtcaccattgaagtagaggtgccctttgaccttcaccgttacgttattgggcagaaaggaagtgggatccgcaagatgatggatgagtttgaggtgaacatacatgtcccggcacctgagctgcagtcttgcatcatcgccatcacgggcctcgctgcaaatttggaccgggccaaggctggactgctggagcgtgtgaaggagctacaggccgagcaggaggaccgggctttaaggagttttaagctgagtgtcactgtagaccccaaataccatcccaagattatcgggagaaagggggcagtaattacccaaatccggttggagcatgacgtgaacatccagtttcctgataaggacgatgggaaccagccccaggaccaaattaccatcacagggtacgaaaagaacacagaagctgccagggatgctatactgagaattgtgggtgaacttgagcagatggtttctgaggacgtcccgctggaccaccgcgttcacgcccgcatcattggtgcccgcggcaaagccattcgcaaaatcatggacgaattcaaggtggacattcgcttcccacagagcggagccccagaccccaactgcgtcactgtgacggggctcccagagaatgtggaggaagccatcgaccacatcctcaatctggaggaggaatacctagctgacgtggtggacagtgaggcgctgcaggtatacatgaaacccccagcacacgaagaggccaaggcaccttccagaggctttgtggtgcgggacgcaccctggaccgccagcagcagtgagaaggctcctgacatgagcagctctgaggaatttcccagctttggggctcaggtggctcccaagaccctcccttggggccccaaacgataatgatcaaaaagaacagaaccctctccagcctgctgacccaaacccaaccacacaatggtttgtctcaatctgacccagcggctggaccctccgtaaattgttgacgctcttcccccttcccgaggtcccgcagggagcctagcgcctggctgtgtgtgcggccgctcctccaggcctggccgtgcccgctcaggacctgctccactgtttaacactaaaccaaggtcatgagcattcgtgctaagataacagactccagctcctggtccacccggcatgtcagtcagcactctggccttcatcacgagagctccgcagccgtggctaggattccacttcctgtgtcatgacctcaggaaataaacgtccttgactttataaaagccaaaaaaaaaaaaaaaaaaaaaaaaaaaaaaaaaaaaaaaaaaaaaaaaaaaaaaaaaaaaagaaacaggtaatggaaggggaacataggacgtatggtgttgcctgaccgcgcctttcctgttccaagagcgcagatctgtcggacaacccgaatagagagcccgttacctcccgataaggcccggttaccctggcataaaggcatnnnnnnnnnnnnnnnnnnnnnnnnnnnnnnnnccgccccacccggg

SEQ ID NO: 4605 - DNA, 3348 bp, Homo sapiens
gcacagcggcagcggagggagtctatgcgagctggacagcagtgggaggtttgtgaggctcgcactggccgcagaccctcgggctcgatcgcccgggagccaggactcggcgacgcgaggctgccgggctacccggccgaggcttcgggggcgcaaactaatgggactggctcgctcggcagcatctccccgctcttctaagtacactgagcagggcccgcgctgaagtagaagctgtccgggggcgcgtagcccggagtcccagtgtggcccggaggaacggagcccgtgccagggcggcccagtcgggagcccggggaccgagcttgtgctgtggggaaacccccacttcttccaagggacagcgatcccgggacggtcgaggcgtcggggcggtcaccgagacctctgcgggaagaccccgtcggggagagggcgcgcagccccgaagcgtctcgggaagtcgagcggaatcgggcgggatcacccgggggcgcagagcccccgtcgcgcctcgtgcggcagcggagagcccaggagaacgagccctcgggggccgaagcccatgcccgggttgggggcggctgcccagtgagtcctcctggccggccgggcggagaagagcgacaccgaagccggcgggaggggagcacttcaaggccggcggctgcggaggatgggcgcctgagcggctccgagcgcagcgcggcagaggaaggcgaggcgagctttggtgaggaggcgccaagggatcccgaagtgcagtctgcccccgggaagatggctcggcctgggcagcgttggctcggcaagtggcttgtggcgatggtcgtgtgggcgctgtgccggctcgccacaccgctggccaagaacctggagcccgtatcctggagctccctcaaccccaagttcctgagtgggaagggcttggtgatctatccgaaaattggagacaagctggacatcatctgcccccgagcagaagcagggcggccctatgagtactacaagctgtacctggtgcggcctgagcaggcagctgcctgtagcacagttctcgaccccaacgtgttggtcacctgcaataggccagagcaggaaatacgctttaccatcaagttccaggagttcagccccaactacatgggcctggagttcaagaagcaccatgattactacattacctcaacatccaatggaagcctggaggggctggaaaaccgggagggcggtgtgtgccgcacacgcaccatgaagatcatcatgaaggttgggcaagatcccaatgctgtgacgcctgagcagctgactaccagcaggcccagcaaggaggcagacaacactgtcaagatggccacacaggcccctggtagtcggggctccctgggtgactctgatggcaagcatgagactgtgaaccaggaagagaagagtggcccaggtgcaagtgggggcagcagcggggaccctgatggcttcttcaactccaaggtggcattgttcgcggctgtcggtgccggttgcgtcatcttcctgctcatcatcatcttcctgacggtcctactactgaagctacgcaagcggcaccgcaagcacacacagcagcgggcggctgccctctcgctcagtaccctggccagtcccaaggggggcagtggcacagcgggcaccgagcccagcgacatcatcattcccttacggactacagagaacaactactgcccccactatgagaaggtgagtggggactacgggcaccctgtctacatcgtccaagagatgccgccccagagcccggcgaacatctactacaaggtctgagtgcccggcacggcctcaggcccccgagggacagtcggcctggaccggacctctcctttcgcccccacaccccctccccttgccagctgtgcccacctttgtatttagttttgtagtttcttggcttttataatccccctttttccctgccccctgggcttcggaggggggtgcttgtgcccctaacccccatgctcttgtgccttccccctctggccaggcctctgggctccgtgggggcgccccttcttggaaggcagggctggacactgatggacagcaggcagggagacagtcccctggccctgcccctccctcgccccccttgccaccttcccaggactgcttgtccgctatcatcactgtttttaatgcttttgtgttcattttttagctgtcaactcattttcatctgttttttgaagaaaaatggaaaaatgtaaaaggcagcccctccccaggctttgtgagcctggcccaagccagtacaagagggcctggggcacgatgtggtcagccaggaagcataggatgccatttcttttatagattccttggtatttctggtggggtaaggggcaggccagggctgttcacgcccatgagggaagaggaaagtgccactgggcaaggtgtcccaccctcccctcctgaccctcctacgaggcttatcctggcaatggggtagtcactgccacccttccacacacacacacacacacacacacacacacaaaaatcccttccttgtgggattcttgggcatctcctgcctccctcactctcacggtaattaatgtcttaattggctgttgcctggggaacaggagagctgctgcaggcagatgacctcatggggggtggagggaggtgaggtgcccaggtggctatttgccctgcagagctgggagtttcacccccaccccccaccctgttctctccttacctttggcatcctttggcctggtggggaaacagaggcccagggtggagacctaagcgggtataagaccaggtggcctgctccttttctgggccctagcacaggtgggtaacccccacccaacccagctcctgctgctgtcccagtcttgggctggggcctggaaagaggaagaggctgcctggggctgggccagcccgctgtgcactttgaccccagttccttgccagcacggctgctaacagactgccacttgagtgcgccttgcaggcactcccagagcagccatggaaggagctggccctcacaccatccacctccacactgcctcctggccagctgcccaccccagtgccaggtgggagagggagcagaacagccagccccttccaggtggcagtcggaagggtttttgtttttgtttctgttgccatttgtgtaaatactagtctttttggaaaaaaaataatgtaaagatgttttgtataaactctgaattattttcttgttgcttttttcttagaaaaaaatgagaactaaaaaaaaaaaaaaaaccacatggaaaaaaaaaaaaaaaaaaaaaa

SEQ ID NO: 4606 - DNA, 6717 bp, Homo sapiens
  misc_feature (1632)..(1657): n is a, c, g, or t
  misc_feature (1900)..(1915): n is a, c, g, or t
  misc_feature (2018)..(2081): n is a, c, g, or t
  misc_feature (2875)..(2928): n is a, c, g, or t
  misc_feature (3012)..(3044): n is a, c, g, or t
  misc_feature (3301)..(3364): n is a, c, g, or t
gggaggaaacgaaagcgaaattgaaccggagccatcttgggcccggcgcgcagacccgcggagtttcccgtgccgacgccccggggccacttccagtgcggagtagcggaggcgtgggggcctcgaggggctggcgcggtccagcggtcgggccagggtcgtgccgccggcgggtcgggccgggcaatgcctcgcgggcgcaatgaatccgcggcaggggtattccctcagcggatactacacccatccatttcaaggctatgagcacagacagctcagataccagcagcctgggccaggatcttcccccagtagtttcctgcttaagcaaatagaatttctcaaggggcagctcccagaagcaccggtgattggaaagcagacaccgtcactgccaccttccctcccaggactccggccaaggtttccagtactacttgcctccagtaccagaggcaggcaagtggacatcaggggtgtccccaggggcgtgcatctcggaagtcaggggctccagagagggttccagcatccttcaccacgtggcaggagtctgccacagagaggtgttgattgcctttcctcacatttccaggaactgagtatctaccaagatcaggaacaaaggatcttaaagttcctggaagagcttggggaagggaaggccaccacagcacatgatctgtctgggaaacttgggactccgaagaaagaaatcaatcgagttttatactccctggcaaagaagggcaagctacagaaagaggcaggaacaccccctttgtggaaatcgcggtcttcactcaagcttggaaccagcacagcggagtggtaagaccagacggtcatagccaaggagccccaaactcagacccgagtttggaaccggaagacagaaactccacatctgtctcagaagatcttcttgagccttttattgcagtctcagctcaggcttggaaccagcacagcggagtggtaagaccagacagtcatagccaaggatccccaaactcagacccaggtttggaacctgaagacagcaactccacatctgccttggaagatcctcttgagtttttagacatggccgagatcaaggagaaaatctgcgactatctcttcaatgtgtctgactcctctgccctgaatttggctaaaaatattggccttaccaaggcccgagatataaatgctgtgctaattgacatggaaaggcagggggatgtctatagacaagggacaacccctcccatatggcatttgacagacaagaagcgagagaggatgcaaatcaagagaaatacgaacagtgttcctgaaaccgctccagctgcaatccctgagaccagaagaaacgcagagttcctcacctgtaatatacccacatcaaatgcctcaaataacatggtaaccacagaaaaagtggagaatgggcaggaacctgtcataaagttagaaaacaggcaagaggccagaccagaaccagcaagactgaaaccacctgttcattacaatggcccctcaaaagcagggtatgttgactttgaaaatggccagtgggccacagatgacatcccagatgacttgaatagtatccgcgcagcaccaggtgagtttcgagccatcatnnnnnnnnnnnnnnnnnnnnnnnnnncatggcttgccacggtgttcaccctacaagaaactgacagagtgccagctgaagaaccccatcagcgggctgttagaatatgcccagttcgctagtcaaacctgtgagttcaacatgatagagcagagtggaccaccccatgaacctcgatttaaattccaggttgtcatcaatggccgagagtttcccccagctgaagctggaagcaagaaagtggccaagcaggatgcagctatgaaagcnnnnnnnnnnnnnnnngaggaagccaaagccaaggacagtggaaaatcagaagaatcatcccactattccacagagaaagaatcagagaagactgcagagtcccagacccccacccctnnnnnnnnnnnnnnnnnnnnnnnnnnnnnnnnnnnnnnnnnnnnnnnnnnnnnnnnnnnnnnnntggggaactcctgcgaattccgtctcctgtccaaagaaggccctgcccatgaacccaagttccaatactgtgttgcagtgggagcccaaactttccccagtgtgagtgctcccagcaagaaagtggcaaagcagatggccgcagaggaagccatgaaggccctgcatggggaggcgaccaactccatggcttctgataaccagcctgaaggtatgatctcagagtcacttgataacttggaatccatgatgcccaacaaggtcaggaagattggcgagctcgtgagatacctgaacaccaaccctgtgggtggccttttggagtacgcccgctcccatggctttgctgctgaattcaagttggtcgaccagtccggacctcctcacgagcccaagttcgtttaccaagcaaaagttgggggtcgctggttcccagccgtctgcgcacacagcaagaagcaaggcaagcaggaagcagcagatgcggctctccgtgtcttgattggggagaacgagaaggcagaacgcatgggtttcacagaggtaaccccagtgacaggggccagtctcagaagaactatgctcctcctctcaaggtccccagaagcacagccaaagacactccctctcactggcagcaccttccatgaccagatagccatgctgagccaccggtgcttcaacactctgactaacagcttccagccctccttgctcggccgcaagattctggccgccatcattatgaaaaaagactctgaggacatgggtgtcgtcgtcagcttgggaacaggnnnnnnnnnnnnnnnnnnnnnnnnnnnnnnnnnnnnnnnnnnnnnnnnnnnnnncaatgactgccatgcagaaataatctcccggagaggcttcatcaggtttctctacagtgagttaatgaaatacaactcccagannnnnnnnnnnnnnnnnnnnnnnnnnnnnnnnngggaggagaaaagctccaaataaaaaagactgtgtcattccatctgtatatcagcactgctccgtgtggagatggcgccctctttgacaagtcctgcagcgaccgtgctatggaaagcacagaatcccgccactaccctgtcttcgagaatcccaaacaaggaaagctccgcaccaaggtggagaacggagaaggcacaatccctgtggaatccagtgacattgtgcctacgtgggatggcattcggctcggggagnnnnnnnnnnnnnnnnnnnnnnnnnnnnnnnnnnnnnnnnnnnnnnnnnnnnnnnnnnnnnnnntgctgggcctgcaaggggcactgttgacccacttcctgcagcccatttatctcaaatctgtcacattgggttaccttttcagccaagggcatctgacccgtgctatttgctgtcgtgtgacaagagatgggagtgcatttgaggatggactacgacatccctttattgtcaaccaccccaaggttggcagagtcagcatatatgattccaaaaggcaatccgggaagactaaggagacaagcgtcaactggtgtctggctgatggctatgacctggagatcctggacggtaccagaggcactgtggatgggccacggaatgaattgtcccgggtctccaaaaagaacatttttcttctatttaagaagctctgctccttccgttaccgcagggatctactgagactctcctatggtgaggccaagaaagctgcccgtgactacgagacggccaagaactacttcaaaaaaggcctgaaggatatgggctatgggaactggattagcaaaccccaggaggaaaagaacttttatctctgcccagtatagtatgctccagtgacagatggattagggtgtgtcatactagggtgtgagagaggtaggtcgtagcattcctcatcacatggtcaggggatttttttttctccttttttttttctttttaagccataattggtgatactgaaaactttgggttcccatttatcctgctttctttgggattgctaggcaaggtctggccaggccccccttttttcccccaagtgaagaggcagaaacctaagaagttatcttttctttctacccaaagcatacatagtcactgagcacctgcggtccatttcctcttaaaagttttgttttgatttgtttccatttcctttccctttgtgtttgctacactgacctcttgcggtcttgattaggtttcagtcaactctggatcatgtcagggactgataatttcatttgtggattacgcagacccctctacttcccctctttcccttctgagattctttccttgtgatctgaatgtctccttttccccctcagagggcaaagaggtgaacataaaggatttggtgaaacatttgtaagggtaggagttgaaaactgcagttcccagtgccacggaagtgtgattggagcctgcagataatgcccagccatcctcccatcctgcactttagccagctgcagggcgggcaaggcaaggaaagctgcttccctggaagtgtatcactttctccggcagctgggaagtctagaaccagccagactgggttaagggagctgctcaagcaatagcagaggtttcacccggcaggatgacacagaccacttcccagggagcacgggcatgccttggaatattgccaagcttccagctgcctcttctcctaaagcattcctaggaatattttccccgccaatgctgggcgtacaccctagccaacgggacaaatcctagagggtataaaatcatctctgctcagataatcatgacttagcaagaataagggcaaaaaatcctgttggcttaacgtcactgttccacccggtgtaatatctctcatgacagtgacaccaagggaagttgactaagtcacatgtaaattaggagtgttttaaagaatgccatagatgttgattcttaactgctacagataacctgtaattgagcagatttaaaattcaggcatacttttccatttatccaagtgctttcatttttccagatggcttcagaagtaggctcgtgggcagggcgcagacctgatctttatagggttgacatagaaagcagtagttgtgggtgaaagggcaggttgtcttcaaactctgtgaggtagaatcctttgtctatacctccatgaacattgactcgtgtgttcagagcctttggcctctctgtggagtctggctctctggctcctgtgcattctttgaatagtcactcgtaaaaactgtcagtgcttgaaactgtttcctttactcatgttgaagggactttgttggcttttagagtgttggtcatgactccaagagcagagcagggaagagcccaagcatagacttggtgccgtggtgatggctgcagtccagttttgtgatgctgcttttacgtgtccctcgataacagtcagctagacacactcaggaggactactgaggctctgcgaccttcaggagctgagcctgcctctctcctttagatgacagaccttcatctgggaacgtgctgagccagcaccctcagatgatttccctccaaactgctgactaggtcatcctctgtctggtagagacattcacatctttgcttttattctatgctctctgtacttttgaccaaaaattgaccaaagtaagaaaatgcaagttctaaaaatagactaaggatgcctttgcagaacaccaaagcatcccaaggaactggtagggaagtggcgcctgtctcctggagtggaagaggcctgctccctggctctgggtctgctgggggcacagtaaatcagtcttggcacccacatccagggcagagaggtctgtggttctcagcatcagaaggcagcgcagcccctctcctcttcaggctacagggttgtcacctgctgagtcctcaggttgtttggcctctctggtccatcttgggcattaggttctccagcagagctctggccagctgcctcttctttaactgggaacacaggctctcacaagatcagaacccccactcacccccaagatcttatctagcaagcctgtagtattcagtttctgttgtaggaagagagcgaggcatccctgaattccacgcatctgctggaaacgagccgtgtcagatcgcacatccctgcgcccccatgcccccatgcccctctgagtcacacaggacagaggaggcagagcttctgcccactgttatcttcactttctttgtccagtcttttgtttttaataagcagtgaccctccctactcttctttttaatgatttttgtagttgatttgtctgaactgtggctactgtgcattccttgaataatcacttgtaaaaattgtcagtgcttgaagctgtttcctttactcacattgaagggacttcgttggttttttggagtcttggttgtgactccaagagcagagtgaggaagacccccaagcatagactcgggtactgtgatgatggctgcagtccagttttatgattctgcttttatgtgtcccttgataacagtgacttaacaatatacattcctcataaataaaaaaaaaacaagaatctgaaaaaaaaaaaaaaaaaaaaaaaaaaaaaaaagctaatttagtagtagtagtagtcggc

SEQ ID NO: 4607 - DNA, 6717 bp, Homo sapiens; identical to SEQ ID NO: 4606
  misc_feature (1632)..(1657): n is a, c, g, or t
  misc_feature (1900)..(1915): n is a, c, g, or t
  misc_feature (2018)..(2081): n is a, c, g, or t
  misc_feature (2875)..(2928): n is a, c, g, or t
  misc_feature (3012)..(3044): n is a, c, g, or t
  misc_feature (3301)..(3364): n is a, c, g, or t

SEQ ID NO: 4608 - DNA, 2212 bp, Homo sapiens
ggcctcctgaggtggtttggtggccccctcctcgcgagttggtgccgctgccacctccgattccgagctttcggcacctctgccgggtggtaccgagccttcccggcgccccctcctctcctcccaccggcctgcccttccccgcgggactatcgcccccacgtttccctcagcccttttctctcccggccgagccgcggcggcacagcagcagcagcaggagcaggaggaggagcccggtggcggcggtggccggggagcccatggcgtacagtcaaggaggcggcaaaaaaaaagtctgctactactacgacggtgatattggaaattattattatggacagggtcatcccatgaagcctcatagaatccgcatgacccataacttgctgttaaattatggcttatacagaaaaatggaaatatataggccccataaagccactgccgaagaaatgacaaaatatcacagtgatgagtatatcaaatttctacggtcaataagaccagataacatgtctgagtatagtaagcagatgcagagatttaatgttggagaagattgtccagtgtttgatggactctttgagttttgtcagctctcaactggcggttcagttgctggagctgtgaagttaaaccgacaacagactgatatggctgttaattgggctggaggattacatcatgctaagaaatcagaagcatcaggattctgttacgttaatgatattgtgcttgccatccttgaattactaaagtatcatcagagagtcttatatattgatatagatattcatcatggtgatggtgttgaagaagctttttatacaacagatcgtgtaatgacggtatcattccataaatatggggaatactttcctggcacaggagacttgagggatattggtgctggaaaaggcaaatactatgctgtcaattttccaatgagagatggtatagatgatgagtcatatgggcagatatttaagcctattatctcaaaggtgatggagatgtatcaacctagtgctgtggtattacagtgtggtgcagactcattatctggtgatagactgggttgtttcaatctaacagtcaaaggtcatgctaaatgtgtagaagttgtaaaaacttttaacttaccattactgatgcttggaggaggtggctacacaatccgtaatgttgctcgatgttggacatatgagactgcagttgcccttgattgtgagattcccaatgagttgccatataatgattactttgagtattttggaccagacttcaaactgcatattagtccttcaaacatgacaaaccagaacactccagaatatatggaaaagataaaacagcgtttgttgaaaatttggcgcatgttacctcatgcacctggtgtccagatgcaagctattccagaagatgctgttcatgaagacagtggagatgaagatggagaagatccagacaagagaatttctattcgagcatcagacaagcggatagcttgtgatgaagaatctcagattctgaggatgaaggagaaggaggtcgaagaaatgtggctgatcataagaaaggagcaaagaaagctagaattgaagaagataagaaagaaacagaggacaaaaaaacagacgttaaggaagaagataaatccaaggacaacagtggtgaaaaaacagataccaaaggaaccaaatcagaacagctcagcaacccctgaatttgacagtctcaccaatttcagaaaatcattaaaaagaaaatattgaaaggaaaatgttttctttttgaagacttctggcttcattttatactactttggcatggactgtatttattttcaaatggctttttcgtttttgtttttcttggcaagttttattgtgagtttttctaattatgaagcaaaatttcttttctccaccatgctttatgtgatagtatttaaaattgatgtgagttattatgtcaaaaaaactgatctattaaagaagtaattggcctttctgagctgatttttccatcttttgtaattatctttattaaaaaattgtacttggaaaaaaaaaaaaaaaaaaaaaaagaaaaccaatgtcgggggccgaaaaaaaaggtaatggaaatgggcccagggcccctaaactgttttcctgacccacctttttttggaacaaagggggaaaaatttgcgggttccccctaa

SEQ ID NO: 4609 - DNA, 3653 bp, Homo sapiens
atggcagtagccccgcgactgtttggggggctctgcttccgtttccgggaccagaatccggaagtggctgttgaggggcgtcttccaatctcgcacagctgcgttggctgtagaagagaacggacggcgatggcgacggtcgcagcaaatccagctgctgctgcggcggctgtggcggcggcagcggcggtgactgaggatagagagccacagcacgaggagctgccaggcctggacagccagtggcgccagatagaaaacggcgagagtgggcgagaacgtccactgcgggccggcgaaagctggttccttgtggagaagcactggtataagcagtgggaggcatacgtgcagggaggggaccaggactccagcaccttccctggctgcatcaacaatgccacactctttcaagatgagataaactggcgcctcaaggagggactggtggaaggcgaggattatgtgctgctcccagcagctgcttggcattacctggtcagctggtatggtctagagcatggccagccacccattgaacgcaaggtcatagagctgcccaacatccagaaggtcgaagtgtacccagtagaactgctgcttgtccggcacaatgatttgggcaaatctcacactgttcagttcagccataccgattctattggcctagtattgcgcacagctcgggagcggtttctggtggagccccaggaagacactcggctttgggccaagaactcagaaggctctttggataggttgtatgacacacacatcacggttctcgatgcggcccttgagactgggcagttgatcatcatggagacccgcaagaaagatggcacttggcccagcgcacagctgcatgtcatgaacaacaacatgtcggaagaggatgaggacttcaagggtcagccaggcatctgtggcctcaccaatctgggcaacacgtgcttcatgaactcggccctgcagtgcctcagcaatgtgccacagctcaccgagtacttcctcaacaactgctacctggaggagctcaacttccgcaacccactgggcatgaagggtgagatcgcagaggcctatgcagacctggtgaagcaggcgtggtctggccaccaccgctccattgtgccacatgtgttcaagaacaaggttggccattttgcatcccaatttctgggctaccagcagcatgactctcaggagctgctgtcattcctcctggacgggctgcatgaggaccttaatcgggtgaagaagaaggagtatgtggagctgtgcgatgctgctgggcgaccggatcaggaggtggcacaggaggcatggcaaaaccacaaacggcggaacgattctgtgatcgtggacactttccacggcctcttcaagtccacgctggtgtgccccgattgtggcaatgtatctgtgaccttcgaccccttctgctacctcagtgttccactgcctatcagccacaagagggtcttggaggtcttctttatccccatggatccgcgccgcaagccagagcagcaccggctcgtggtccccaagaaaggcaagatctcggatctatgtgggggctcctgtccaaacacacggggcatctcgccagagaggatgatggtggctgatgtcttcagtcaccgcttctataagctctatcagctagaggagcctctgagcagcatcttggaccgtgatgatatcttcgtctatgaggtgtcaggtcgcattgaggccattgagggctcaagagaggacatcgtggttcctgtctacctgcgggagcgcacccctgcccgtgactacaacaactcctactacggcctgatgctttttggacaccccctcctggtatcagtgccccgggaccgcttcacctgggagggcctgtataacgtcctgatgtaccggctctcacgctacgtgaccaaacccaactcagatgatgaggacgatggggatgagaaagaagatgacgaggaggataaagatgacgtccctgggccctcaactgggggcagcctccgagaccctgagccagagcaggctgggcccagctctggagtcacgaacaggtgcccgttcctcctggacaattgccttggcacatctcagtggcccccaaggcgacgacgcaagcagctgttcaccctgcagacggtgaactccaatgggaccagcgaccgcacaacctcccctgaagaagtccatgcccagccgtacattgctatcgactgggagccagagatgaagaagcgttactatgacgaggtagaggctgagggctacgtgaagcatgactgcgtcgggtacgtgatgaagaaggctcccgtgcggctgcaggagtgcattgagctcttcaccactgtggagaccctggagaaggaaaacccctggtactgcccttcctgcaagcagcaccagctggcaaccaagaagctggacctgtggatgctgccggagattctcatcatccacctgaaacgcttttcctacaccaagttctcccgagagaagctggacaccctcgtggagtttcctatccgggacctggacttctctgagtttgtcatccagccacagaatgagtcgaatccggagctgtacaaatatgacctcatcgcggtttccaaccattatgggggcatgcgtgatggacactacacaacatttgcctgcaacaaggacagcggccagtggcactactttgatgacaacagcgtctcccctgtcaatgagaatcagatcgagtccaaggcagcctatgtcctcttctaccaacgccaggacgtggcgcgacgcctgctgtccccggccggctcatctggcgccccagcctcccctgcctgcagctccccacccagctctgagttcatggatgttaattgagagccctgggtcctgccacagaaaaaaaaaaaaaaaagccctctctgcaatctcgcttctcgtgtccgccccgcttctcttattcgtgttaggtgcccccgccaggcattgcaggcttagtcgtggctactgttctcctgtgccgctgcatcgctctctcccgggaaagaacaggtcgtgtctcctcctagcagtgcgcgccccgcctgtgtttgcccttccagcagtgaccctcccttctagtctttatttatggtcgtgcccttccctctcctcagcccagagtgttctgcgtgggtggtgatgggggttcacctgaacacagagtgtattttcttattgaggccctgtaccttctgctgtgtgtgtgtatatataaagcaccagtctgctccccaaaaaaaaaacggaattcaaaaaaaaaaaaaaaaaaaaaaaaaaaaaaaaaaaaaaaaaaaataaaaaaaacaacagagaaaaaaagatcaaacaaatacacaatccaacaacaacacaccaacactctaacaaaaacatacactcaacttctctaccatcctctctatatcaacttaagcacctctttaatcatccatataccccaaaacatataaactcacaacacgactcactctgatacctaatccaacactatcatcaccatacacactcacaactcatctatacacacaaccaccacctcacaaaactatcattctaattatatcacattcccaactcatctactaaacaatttc

SEQ ID NO: 4610 - DNA, 1737 bp, Homo sapiens
atggtccgtccgcgccgtgccccgtaccgctccggcgccgggggccccctcgggggtcgcggccgccctccgcggcccctcgtggtgcgcgccgtccgctcgcgctcctggcctgccagcccccgaggcccgcagcctccgcggatccgggcccgctcggcccctcccatggaaggtgctcgggtcttcggggcactgggtcccatcggtccctcctcacctgggctcaccctcgggggtctggccgtgagcgagcaccggctcagcaacaagctgctggcttggagcggcgtcctcgagtggcaggagaagcgcagaccctactctgactccactgcaaagctgaagcggaccctgccctgccaagcctacgtgaaccaaggcgagaacctggagaccgaccagtggccgcagaagctgatcatgcagctgatccctcagcagctgctgaccaccctgggccccctgttccggaactcccagttggcacagttccacttcaccaacagagactgcgactcgctcaaggggctctgccgcatcatgggcaacggcttcgcgggctgcatgctgttcccccacatctccccctgtgaggtgcgcgtgctcatgctcctgtactcgtccaagaagaagatcttcatgggcctcatcccctacgaccagagcggcttcgtcagtgccatccggcaggtcatcaccacccgcaagcaggcagtgggacctggtggtgtcaactcaggcccagtccagatcgtcaacaacaagtttctggcatggagtggtgtcatggagtggcaggagcccaggcctgagcccaacagtcggtccaagaggtggctgccatcccacgtctacgtgaaccagggggagatcctgaggaccgagcagtggccaaggaagctgtacatgcagctcatcccgcagcagctgctgaccaccctagtgccgctgttccggaactcgcgcctggtccagttccacttcaccaaggacctggagacactgaagagcctgtgccggatcatggacaatggcttcgccggctgcgtgcacttttcctacaaagcatcgtgtgagatccgcgtgcttatgctcctgtactcttcagagaagaaaatcttcattggcctcatcccccatgaccagggcaactttgtcaacggcatccggcgtgtcattgccaaccagcagcaggtcctgcagcggaacctggagcaggagcaacagcaacgagggatgggggggtagtggttaccccgggctgggcccctccaggagtcacagatgaggcccccgcagagactggtgacacgcttctgagcaggggcccctggggacttcaactgcccagcaacatggaggatggtgtcctgaggcctccaaggacggtccccacccctctacgtttccccaataaagccttttaaaaacctgaaaaaaaaaaaaaaaaaaaaaaaaaaaaaaaaaaaaaaaaaaaaaaaaaaaaaaagcggagaccagggccgtttatggggaggggggggggcccggaggcacccctgccggcgggcgcggcgcagggcggggcgcgtcctccccttgagcgccctgtcctccggttgcggggggggccgctgtgcgcgacgcgggttggggagcgcaggcctcccgggtgggcggccccgtgtccttgcgtgggtgtcccgtggcgtgttcgccccgcgtagtggtggcgtgttgtccccgcccggcgct

SEQ ID NO: 4611 - DNA, 1356 bp, Homo sapiens
tgaactcattctgaagaggctgacgattttactgtctcatttttttcctttctccagaatgggttctgggtgggtcccctgggtggtggctctgctagtgaatctgacccgactggattcctccatgactcaaggcacagactctccagaagattttgtgattcaggcaaaggctgactgttacttcaccaacgggacagaaaaggtgcagtttgtggtcagattcatctttaacttggaggagtatgtacgtttcgacagtgatgtggggatgtttgtggcattgaccaagctggggcagccagatgctgagcagtggaacagccggctggatctcttggagaggagcagacaggccgtggatggggtctgtagacacaactacaggctgggcgcacccttcactgtggggagaaaagtgcaaccagaggtgacagtgtacccagagaggaccccactcctgcaccagcataatctgctgcactgctctgtgacaggcttctatccaggggatatcaagatcaagtggttcctgaatgggcaggaggagagagctggggtcatgtccactggccctatcaggaatggagactggacctttcagactgtggtgatgctagaaatgactcctgaacttggacatgtctacacctgccttgtcgatcactccagcctgctgagccctgtttctgtggagtggagagctcagtctgaatattcttggagaaagatgctgagtggcattgcagccttcctacttgggctaatcttccttctggtgggaatcgtcatccagctaagggctcagaaaggatatgtgaggacgcagatgtctggtaatgaggtctcaagagctgttctgctccctcagtcatgctaaggtcctcactgaagcttctctctctggagcctgaagtagtgatgagtagtctgggccctgggtgaggtaaaggacattcatgaggtcaatgttctgggaataactctcttccctgatccttggaggagcccgaactgattctggagctctgtgttctgagatcatgcatctcccacccatctgcccttctcccttctacgtgtacatcattaatccccattgccaagggcattgtccagaaactcccctgagaccttactccttccagccccaaatcatttacttttctgtggtccagccctactcctataagtcatgatctccaaagctttctgtcttccaactgcagtctccacagtcttcagaagacaaatgctcaggtagtcactgtttccttttcactgtttttaaaaaccttttattgtcaaataaaatggagatacaaaaaatgtaaaaaaaaaaaaaaaaaaaaaaaa

SEQ ID NO: 4612 - DNA, 4807 bp, Homo sapiens
agcggtgtcttcggcacgaggcgccgccatcctcggcgcgactcgcttctttcggttctacctgggagaatccaccgccatccgccaccatggttaattttacggtggatcagatccgcgccatcatggacaagaaggccaacatccgcaacatgtctgtcatcgcccacgtggaccatggcaagtccacgctgacagactccctggtgtgcaaggcgggcatcatcgcctcggcccgggccggggagacacgcttcactgatacccggaaggacgagcaggagcgttgcatcaccatcaagtcaactgccatctccctcttctacgagctctcggagaatgacttgaacttcatcaagcagagcaaggacggtgccggcttcctcatcaacctcattgactcccccgggcatgtcgacttctcctcggaggtgactgctgccctccgagtcaccgatggcgcattggtggtggtggactgcgtgtcaggcgtgtgcgtgcagacggagacagtgctgcggcaggccattgccgagcgcatcaagcctgtgctgatgatgaacaagatggaccgcgccctgctggagctgcagctggagcccgaggagctctaccagactttccagcgcatcgtggagaacgtgaacgtcatcatctccacctacggcgagggcgagagcggccccatgggcaacatcatgatcgatcctgtcctcggtaccgtgggctttgggtctggcctccacgggtgggccttcaccctgaagcagtttgccgagatgtatgtggccaagttcgccgccaagggggagggccagttggggcctgccgagcgggccaagaaagtagaggacatgatgaagaagctgtggggtgacaggtactttgacccagccaacggcaagttcagcaagtcagccaccagccccgaagggaagaagctgccacgcaccttctgccagctgatcctggaccccatcttcaaggtgtttgatgcgatcatgaatttcaagaaagaggagacagcaaaactgatagagaaactggacatcaaactggacagcgaggacaaggacaaagaaggcaaacccctgctgaaggctgtgatgcgccgctggctgcctgccggagacgccttgttgcagatgatcaccatccacctgccctcccctgtgacggcccagaagtaccgctgcgagctcctgtacgaggggcccccggacgacgaggctgccatgggcattaaaagctgtgaccccaaaggccctcttatgatgtatatttccaaaatggtgccaacctccgacaaaggtcggttctacgcctttggacgagtcttctcggggctggtctccactggcctgaaggtcaggatcatggggcccaactatacccctgggaagaaggaggacctctacctgaagccaatccagagaacaatcttgatgatgggccgctacgtggagcccatcgaggatgtgccttgtgggaacattgtgggcctcgtgggcgtggaccagttcctggtgaagacgggcaccatcaccaccttcgagcacgcgcacaacatgcgggtgatgaagttcagcgtcagccctgttgtcagagtggccgtggaggccaagaacccggctgacctgcccaagctggtggaggggctgaagcggctggccaagtccgaccccatggtgcagtgcatcatcgaggagtcgggagagcacatcatcgcgggcgccggcgagctgcacctggagatctgcctgaaggacctggaggaggaccacgcctgcatccccatcaagaaatctgacccggtcgtctcgtaccgcgagacggtcagtgaagagtcgaacgtgctctgcctctccaagtcccccaacaagcacaaccggctgtacatgaaggcgcggcccttccccgacggcctggccgaggacatcgataaaggcgaggtgtccgcccgtcaggagctcaagcagcgggcgcgctacctggccgagaagtacgagtgggacgtggctgaggcccgcaagatctggtgctttgggcccgacggcaccggccccaacatcctcaccgacatcaccaagggtgtgcagtacctcaacgagatcaaggacagtgtggtggccggcttccagtgggccaccaaggagggcgcactgtgtgaggagaacatgcggggtgtgcgcttcgacgtccacgacgtcaccctgcacgccgacgccatccaccgcggagggggccagatcatccccacagcacggcgctgcctctatgccagtgtgctgaccgcccagccacgcctcatggagcccatctaccttgtggagatccagtgtccagagcaggtggtcggtggcatctacggggttttgaacaggaagcggggccacgtgttcgaggagtcccaggtggccggcacccccatgtttgtggtcaaggcctatctgcccgtcaacgagttcctttggcttcaccgctgacctgaggtccaacacgggcggccaggcgttcccccagtgtgtgtttgaccactggcagatcctgcccggagaccccttcgacaacagcagccgccccagccaggtggtggcggagacccgcaagcgcaagggcctgaaagaaggcatccctgccctggacaacttcctggacaaattgtaggcggcccttcctgcagcgcctgccgccccggggactcgcagcacccacagcaccacgtcctcgaattctcagacgacacctggagactgtcccgacacagcgacgctcccctgagaggtttctggggcccgctgcgtgccatcactcaaccataacacttgatgccgtttctttcaatatttatttccagagtccggaggcagcagacacgccctcttagtagggacttaatgggccggtcggggagggggaggcgggatgggacacccaacactttttccatttcttcagagggaaactcagatgtccaaactaattttaacaaacgcattaagaggtttatttgggtacatggcccgcagtggcttttgccccagaaaggggaaaggaacacgcgggtagatgatttctagcaggcaggaagtcctgtgcggtgtcaccatgagcacctccagctgtactagtgccattggaataataaatttgataaggtggtgaaaaaaaaaaaaaaaaaaaaaaaaaaaaaacaatttggggcggcaggcttgggccttcgagaaaacgtttttaaaacctcaccggtgggaggcgcccggggacccatacagaggcaacgcgcaacaacgtgggccaaaaccgcgtgtcccacaaagcgacaaccccgggcacgtacacagaggaggcgaggacctctaccccaacatctaaaacagcgcccggggagaaccccagacggcttctgaagacaactccccacgtgggcagccggacggcgacaacacgagggatccaataaaacagggaagcacaaaccgagagaccgcaaaaaataaaatacacccccgacccggcgagtacccaacaacgacaaccccagcccccaccacaacacacaccacaccaaccaccccaacacgcgacaaccatgcgacgcacacccaacaacaccgaagcaaaaacagcaccacaccagggagaagagaaggcaggctaggagccgaagcaagggcgagacacagccacgacgccgaggggcgaagaggcagccccgcaggcgacgcgcacaagagggagcaggcgcgccctcatggaacctgcagaatgggagagctagcgcgagccgaggaggagacgcagggccggaggaagagcggttcgcccgtacggcgacacgcagaggagaacaagacgagaagagggcgagagagagagaaagcacgggggaggcagagaggaaaggaggaaagagggggaggaagcaccgacgagagaaagagagaggcagaaggcgagaagagagggcgaagcaggagcaagagaggaagatgcagaaggaaacggcaagagaaggaacgccaagcaaaacaggagagaagcgatcacgggagacaggagctgactaggagtagcgggcgagagtagggggcgaggagaggggagagagaaggcaaggacggggaagcgaggaagagcagagcaagagagagcgcgaggacggcgcgccagaccgagcgaccgagagccagaggacggcacacacaggaggacaggtggcacgagcaaacaaaaggaacagcaacggaaagggaggtgaccacaagacgacacatcacaaacaacatcacaaaacgaagcacaaacaggcacaacaacagaacagcacggagaacatgaggcatcgagcaggagacggcacacaacaactcaacagacaggcatacaaggaagtagggaacacgagaagtaacggaaggtgggagagcgcatgtcacgacacgacacattcgaatagcatgacagaacaggaccgaacaccggcagacgatacagactgcgcggagagatctgagctgagcggcagcaacgacgcgacgggacaacgataccggtggacgacaacagactgccggacgcgcagaggggaggaagcagagtgaaagaggcagagcgacactcggagcgcggcgccccgggaacgcacgccagccgacgaccatccgagtcctcacacccgaactccatcacagacgagcagacaaccgcatcgagtaccagagaggacggagacggcacgcgcacgacgcatgacaggccgaacgatacgaggaactatataaccagcaagtcagctagcacaata

SEQ ID NO: 4613 - DNA, 4807 bp, Homo sapiens; identical to SEQ ID NO: 4612

SEQ ID NO: 4614 - DNA, 4606 bp, Homo sapiens
agtccagacaaccggcttccagctggggctggggaaagggggttggaggggtgcgccccccccccacgccccttaggggtgggggacgcgggctcagagttccagggacccaggaatgcccccccgccagccccctcggcaggcggggggagggctcagccgggagtttggcaaactcctccccgcgttgagtcattcggcacgagggtttaggaagcggctccgggtcggtggccccaggacagggaagagcgggcgctatggggagccggacgccagagtcccctctccacgccgtgcagctgcgctggggcccccggcgccgacccccgctgctgccgctgctgttgctgctgctgccgccgccacccagggtcgggggcttcaacttagacgcggaggccccagcagtactctcggggcccccgggctccttcttcggattctcagtggagttttaccggccgggaacagacggggtcagtgtgctggtgggagcacccaaggctaataccagccagccaggagtgctgcagggtggtgctgtctacctctgtccttggggtgccagccccacacagtgcacccccattgaatttgacagcaaaggctctcggctcctggagtcctcactgtccagctcagagggagaggagcctgtggagtacaagtccttgcagtggttcggggcaacagttcgagcccatggctcctccatcttggcatgcgctccactgtacagctggcgcacagagaaggagccactgagcgaccccgtgggcacctgctacctctccacagataacttcacccgaattctggagtatgcaccctgccgctcagatttcagctgggcagcaggacagggttactgccaaggaggcttcagtgccgagttcaccaagactggccgtgtggttttaggtggaccaggaagctatttctggcaaggccagatcctgtctgccactcaggagcagattgcagaatcttattaccccgagtacctgatcaacctggttcaggggcagctgcagactcgccaggccagttccatctatgatgacagctacctaggatactctgtggctgttggtgaattcagtggtgatgacacagaagactttgttgctggtgtgcccaaagggaacctcacttacggctatgtcaccatccttaatggctcagacattcgatccctctacaacttctcaggggaacagatggcctcctactttggctatgcagtggccgccacagacgtcaatggggacgggctggatgacttgctggtgggggcacccctgctcatggatcggacccctgacgggcggcctcaggaggtgggcagggtctacgtctacctgcagcacccagccggcatagagcccacgcccacccttaccctcactggccatgatgagtttggccgatttggcagctccttgacccccctgggggacctggaccaggatggctacaatgatgtggccatcggggctccctttggtggggagacccagcagggagtagtgtttgtatttcctgggggcccaggagggctgggctctaagccttcccaggttctgcagcccctgtgggcagccagccacaccccagacttctttggctctgcccttcgaggaggccgagacctggatggcaatggatatcctgatctgattgtggggtcctttggtgtggacaaggctgtggtatacaggggccgccccatcgtgtccgctagtgcctccctcaccatcttccccgccatgttcaacccagaggagcggagctgcagcttagaggggaaccctgtggcctgcatcaaccttagcttctgcctcaatgcttctggaaaacacgttgctgactccattggtttcacagtggaacttcagctggactggcagaagcagaagggaggggtacggcgggcactgttcctggcctccaggcaggcaaccctgacccagaccctgctcatccagaatggggctcgagaggattgcagagagatgaagatctacctcaggaacgagtcagaatttcgagacaaactctcgccgattcacatcgctctcaacttctccttggacccccaagccccagtggacagccacggcctcaggccagccctacattatcagagcaagagccggatagaggacaaggctcagatcttgctggactgtggagaagacaacatctgtgtgcctgacctgcagctggaagtgtttggggagcagaaccatgtgtacctgggtgacaagaatgccctgaacctcactttccatgcccagaatgtgggtgagggtggcgcctatgaggctgagcttcgggtcaccgcccctccagaggctgagtactcaggactcgtcagacacccagggaacttctccagcctgagctgtgactactttgccgtgaaccagagccgcctgctggtgtgtgacctgggcaaccccatgaaggcaggagccagtctgtggggtggccttcggtttacagtccctcatctccgggacactaagaaaaccatccagtttgacttccagatcctcagcaagaatctcaacaactcgcaaagcgacgtggtttcctttcggctctccgtggaggctcaggcccaggtcaccctgaacggtgtctccaagcctgaggcagtgctattcccagtaagcgactggcatccccgagaccagcctcagaaggaggaggacctgggacctgctgtccaccatgtctatgagctcatcaaccaaggccccagctccattagccagggtgtgctggaactcagctgtccccaggctctggaaggtcagcagctcctatatgtgaccagagttacgggactcaactgcaccaccaatcaccccattaacccaaagggcctggagttggatcccgagggttccctgcaccaccagcaaaaacgggaagctccaagccgcagctctgcttcctcgggacctcagatcctgaaatgcccggaggctgagtgtttcaggctgcgctgtgagctcgggcccctgcaccaacaagagagccaaagtctgcagttgcatttccgagtctgggccaagactttcttgcagcgggagcaccagccatttagcctgcagtgtgaggctgtgtacaaagccctgaagatgccctaccgaatcctgcctcggcagctgccccaaaaagagcgtcaggtggccacagctgtgcaatggaccaaggcagaaggcagctatggcgtcccactgtggatcatcatcctagccatcctgtttggcctcctgctcctaggtctactcatctacatcctctacaagcttggattcttcaaacgctccctcccatatggcaccgccatggaaaaagctcagctcaagcctccagccacctctgatgcctgagtcctcccaatttcagactcccattcctgaagaaccagtccccccaccctcattctactgaaaaggaggggtctgggtacttcttgaaggtgctgacggccagggagaagctcctctccccagcccagagacatacttgaagggccagagccaggggggtgaggagctggggatccctcccccccatgcactgtgaaggacccttgtttacacataccctcttcatggatgggggaactcagatccagggacagaggcccagcctccctgaagcctttgcattttggagagtttcctgaaacaacttggaaagataactaggaaatccattcacagttctttgggccagacatgccacaaggacttcctgtccagctccaacctgcaaagatctgtcctcagccttgccagagatccaaaagaagcccccagctaagaacctggaacttggggagttaagacctggcagctctggacagccccaccctggtgggccaacaaagaacactaactatgcatggtgccccaggaccagctcaggacagatgccacacaaggatagatgctggcccagggcccagagcccagctccaaggggaatcagaactcaaatggggccagatccagcctggggtctggagttgatctggaacccagactcagacattggcacctaatccaggcagatccaggactatatttgggcctgctccagacctgatcctggaggcccagttcaccctgatttaggagaagccaggaatttcccaggaccctgaaggggccatgatggcaacagatctggaacctcagcctggccagacacaggccctccctgttccccagagaaaggggagcccactgtcctgggcctgcagaatttgggttctgcctgccagctgcactgatgctgcccctcatctctctgcccaacccttccctcaccttggcaccagacacccaggacttatttaaactctgttgcaagtgcaataaatctgacccagtgcccccactgaccagaactagaaaaaaaaaaaaaaaaaaaaaaaaacaaaatctttgtgggacggcattgccctcgaaaaaggttttaaaaacccatgtttgggggcggggcccaatggggtaagtagacagggcatagggtgcccaagaacacggggccggaaaggtgtggttctccataaaaaacg

SEQ ID NO: 4615 - DNA, 1936 bp, Homo sapiens
  misc_feature (1775)..(1779): n is a, c, g, or t
  misc_feature (1791)..(1792): n is a, c, g, or t
  misc_feature (1813)..(1813): n is a, c, g, or t
  misc_feature (1856)..(1856): n is a, c, g, or t
  misc_feature (1901)..(1902): n is a, c, g, or t
ggcacgaggacaaagaaggtaagggcagtgagaatgatgcatcttgcattccttgtgctgttgtgtctgccagtctgctctgcctatcctctgagtggggcagcaaaagaggaggactccaacaaggatcttgcccagcaatacctagaaaagtactacaacctcgaaaaggatgtgaaacagtttagaagaaaggacagtaatctcattgttaaaaaaatccaaggaatgcagaagttccttgggttggaggtgacagggaagctagacactgacactctggaggtgatgcgcaagcccaggtgtggagttcctgacgttggtcacttcagctcctttcctggcatgccgaagtggaggaaaacccaccttacatacaggattgtgaattatacaccagatttgccaagagatgctgttgattctgccattgagaaagctctgaaagtctgggaagaggtgactccactcacattctccaggctgtatgaaggagaggctgatataatgatctctttcgcagttaaagaacatggagacttttactcttttgatggcccaggacacagtttggctcatgcctacccacctggacctgggctttatggagatattcactttgatgatgatgaaaaatggacagaagatgcatcaggcaccaatttattcctcgttgctgctcatgaacttggccactccctggggctctttcactcagccaacactgaagctttgatgtacccactctacaactcattcacagagctcgcccagttccgcctttcgcaagatgatgtgaatggcattcagtctctctacggacctccccctgcctctactgaggaacccctggtgcccacaaaatctgttccttcgggatctgagatgccagccaagtgtgatcctgctttgtccttcgatgccatcagcactctgaggggagaatatctgttctttaaagacagatatttttggcgaagatcccactggaaccctgaacctgaatttcatttgatttctgcattttggccctctcttccatcatatttggatgctgcatatgaaggttaacagcagggacaccgtttttatttttaaaggaaatgagttctgggccatcagaggaaatgaggtacaagcaggttatccaagaggcatccataccctgggttttcctccaaccataaggaaaattgatgcagctgtttctgacaaggaaaagaagaaaacatacttctttgcagcggacaaatactggagatttgatgaaaatagccagtccatggagcaaggcttccctagactaatagctgatgactttccaggagttgagcctaaggttgatgctgtattacaggcatttggatttttctacttcttcagtggatcatcacagtttgagtttgaccccaatgccaggatggtgacacacatattaaagagtaacagctggttacattgctaggcgagatagggggaagacagatatgggtgtttttaataaatctaataattattcatctaatgtattatgagccaaaatggttaatttttcctgcatgttctgtgactgaagaagatgagccttgcagatatctgcatgtgttatgaagaatgtttctggaattcttcacttgcttttgaattgcactgaacagaattaagaaatactcatgtgcaataggtgagagaatgtattttcatagatgtgttattacttcctcaataaaaagttttattttgggcctgttccttaaaaaaaaaaaaaaaaaaannnnncccacccccccnncccccggggggccgccccccnggacaaccccgcaggccccacaaacgcagcgcaaccccgccanctccgcacaaaagggcgcctcacaaaggagcccacaacaaacgcnncgcccggggggggggccgccctctaaatcactcc

SEQ ID NO: 4616 - DNA, 1111 bp, Homo sapiens
tttttttttttttttttttttttttttccaaggggagaatgaagccattttatttaggggaatgttaaaacaaagccatatacaatctgtaacaaatacaatacaattgtttgttccctagtcctgaataattacagtatatacaaaatctgtaaggcactggttcccccaaaagaacaaatgagtcttcttgtgaaacagacaacgaaacccctatattgccaacttttctccaaaaaatatggcattgtttttttgttttgttttacaagaggaatcacaattgctaaattaagtcacttctgatgccatttctttcatttccactgctatgtgtctgggttttctaaggcaatgtaactactgaacatgttcaagtttaaaaaactatacttctctcagtgccgttccacccacaaacaaagaagaatcagatcagaccaacaacataaaacttctaatgaatatgtatgactgtaggaacatgaaattcagtcattattaagtacttgctatacttgactacacaccaattgaaatgtgtcaaagaattccctgtaaataaaatctcagcgtgttttctaagaagctttctgtttggggaattcaaaaatgggcactaatgacttttgagcagtgctttccaggaggtcaaaggcctgtttcctcatacataatggtcatagcactctttttgtgatttaacaatctacacacttttataaataaatattatgtttcatttagtactttatcatccataatatcttactctctaatccacataatggagttgtgccagactccaaactgaacataatatttatatatacatatatatttatatatatacacacatacataaactataaacctgaatatcttagcatacaaaacttatctaacaactaataatttaggattcctttgagagggaggggttagaagaaactcttcttagtcttcgaaatagtcctgacagtaagcaataaacaacattattaatttctgggttctcatttattcaagtgaaagacaaataaaataacattcacttctgagccactagaaattttgaaatcataaaggattattgggaaatgagtagtct

SEQ ID NO: 4617 - DNA, 546 bp, Homo sapiens
gactccgaggttacaggcgttgtcaagtgatcaatgagttgagcgccttgccttctcttaggcctttgaagcatttttgtctgtgctccctgatcttcaggtcaccaccatgaagttcttagcagtcctggtactcttgggagtttccatctttctggtctctgcccagaatccgacaacagctgctccagctgacacgtatccagctactggtcctgctgatgatgaagcccctgatgctgaaaccactgctgctgcaaccactgcgaccactgctgctcctaccactgcaaccaccgctgcttctaccactgctcgtaaagacattccagttttacccaaatgggttggggatctcccgaatggtagagtgtgtccctgagatggaatcagcttgagtcttctgcaattggtcacaactattcatgcttcctgtgatttcatccaactacttaccttgcctacgatatcccctttatctctaatcagtttattttctttcaaataaaaaataactatgagcaacaaaaaaaaaaaaaaaaaaaa

SEQ ID NO: 4618 - DNA, 1600 bp, Homo sapiens
attgccttatgttggttttctcgaacacattggccgaatattggatcttcagttggaggacaacaaatgggcctgcaattgtgacttattgcagttaaaaacttggttggagaacatgcctccacagtctataattggtgatgttgtctgcaacagccctccattttttaaaggaagtatactcagtagactaaagaaggaatctatttgccctactccaccagtgtatgaagaacatgaggatccttcaggatcattacatctggcagcaacatcttcaataaatgatagtcgcatgtcaactaagaccacgtccattctaaaactacccaccaaagcaccaggtttgataccttatattacaaagccatccactcaacttccaggaccttactgccctattccttgtaactgcaaagtcctatccccatcaggacttctaatacattgtcaggagcgcaacattgaaagcttatcagatctgagacctcctccgcaaaatcctagaaagctcattctagcgggaaatattattcacagtttaatgaagtccatcctttggtccaaagcatctggaagaggaagaagagaggaatgagaaagaaggaagtgatgcaaaacatctccaaagaagtcttttggaacaggaaaatcattcaccactcacagggtcaaatatgaaatacaaaaccacgaaccaatcaacagaatttttatccttccaagatgccagctcattgtacagaaacattttagaaaaagaaagggaacttcagcaactgggaatcacagaatacctaaggaaaaacattgctcagctccagcctgatatggaggcacattatcctggagcccacgaagagctgaagttaatggaaacattaatgtactcacgtccaaggaaggtattagtggaacagacaaaaaatgagtattttgaacttaaagctaatttacatgctgaacctgactatttagaagtcctggagcagcaaacatagatggagagtttgagggctttcgcagaaatgctgtgattctgttttaagtccataccttgtaaataagtgccttacgtgagtgtgtcatcaatcagaacctaagcacagcagtaaactatggggaaaaaaaaagaagaagaaaagaaactcagggatcactgggagaagccatggcattatcttcaggcaatttagtctgtcccaaataaaataaatccttgcatgtaaatcattcaagggttatagtaatatttcatatactgaaaagtgtctcataggagtcctcttgcacatctaaaaaggctgaacatttaagtatcccgaattttcttgaattgctttccctatagattaattacaattggatttcatcatttaaaaaccatacttgtatatgtagttataatatgtaaggaatacattgtttataaccagtatgtacttcaaaaatgtgtattgtcaaacatacctaactttcttgcaataaatgcaaaagaaactggaaaaagagagataaagaaacaagcacgcaagaaagaggaagacaaaaagaagaaaaggggaaaaacaagagtgaaagatggcaaagaaaaaacagg

SEQ ID NO: 4619 - DNA, 5125 bp, Homo sapiens
  misc_feature (1769)..(1783): n is a, c, g, or t
  misc_feature (2386)..(2410): n is a, c, g, or t
  misc_feature (2460)..(2505): n is a, c, g, or t
  misc_feature (2681)..(2683): n is a, c, g, or t
  misc_feature (3156)..(3203): n is a, c, g, or t
  misc_feature (4857)..(4890): n is a, c, g, or t
aaggggaggtaaccctggccccttaattctcgagctcgtcgaccggtcgacgagctcgagggtcgacgagctcgagggcgcgcgcccggcccccacccctcgcagcaccccgcgccccgcgccctcccagccgggtccagccggagccatggggccggagccgcagtgagcaccatggagctggcggccttgtgccgctgggggctcctcctcgcccaagaagatatgccccgggggtccacccaagtgtgcaccggcacagacatgaagctgcggctccctgccagtcccgagacccacctggacatgctccgccacctctaccagggctgccaggtggatgcaggcaaacctggaactcacctacctgcccagcatgccagcctgtccttcctgcaggatatccaggaggtgcagggctacgtgctcatcgctcacaaccaagtgaggcaggtcccactgcagaggctgcggattgtgcgaggcacccagctctttgaggacaactatgccctggccgtgctagacaatggagacccgctgaacaataccacccctgtcacaggggcctccccaggaggcctgcgggagctgcagcttcgaagcctcacagagatcttgaaaggaggggtcttgatccagcggaacccccagctctgctaccaggacacgattttgtggaaggacatcttccacaagaacaaccagctggctctcacactgatagacaccaaccgctctcgggcctgccacccctgttctccgatgtgtaagggctcccgctgctggggagagagttctgaggattgtcagagcctgacgcgcactgtctgtgccggtggctgtgcccgctgcaaggggccactgcccactgactgctgccatgagcagtgtgctgccggctgcacgggccccaagcactctgactgcctggcctgcctccacttcaaccacagtggcatctgtgagctgcactgcccagccctggtcacctacaacacagacacgtttgagtccatgcccaatcccgagggccggtatacattcggcgccagctgtgtgactgcctgtccctacaactacctttctacggacgtgggatcctgcaccctcgtctgccccctgcacaaccaagaggtgacagcagaggatggaacacagcggtgtgagaagtgcagcaagccctgtgcccgagtgtgctatggtctgggcatggagcacttgcgagaggtgagggcagttaccagtgccaatatccaggagtttgctggctgcaagaagatctttgggagcctggcatttctgccggagagctttgatggggacccagcctccaacactgccccgctccagccagagcagctccaagtgtttgagactctggaagagatcacaggttacctatacatctcagcatggccggacagcctgcctgacctcagcgtcttccagaacctgcaagtaatccggggacgaattctgcacaatggcgcctactcgctgaccctgcaagggctgggcatcagctggctggggctgcgctcactgagggaactgggcagtggactggccctcatccaccataacacccacctctgcttcgtgcacacggtgccctgggaccagctcttcggaacccgcaccaagctctgctccacactgccaaccggccagaggacgagtgtgtgggcgagggcctggcctgccaccagctgtgcgcccgagggcactgctggggtccagggcccacccagtgtgtcaacgtctcnnnnnnnnnnnnnnnggccaggagtgcgtggaggaatgccgagtactgcaggggctccccagggagtatgtgaatgccaggcactgtttgccgtgccaccctgagtgtcagccccagaatggctcagtgacctgttttggaccggaggctgaccagtgtgtggcctgtgcccactataaggaccctcccttctgcgtggcccgctgccccagcggtgtgaaacctgacctctcctacatgcccatctggaagtttccagatgaggagggcgcatgccagccttgccccatcaactgcacccactcctgtgtggacctggatgacaagggctgccccgccgagcagagagccagccctctgacgtccatcgtctctgcggtggttggcattctgctggtcgtggtcttgggggtggtctttgggatcctcatcaagcgacggcagcagaagatccggaagtacacgatgcggagactgctgcaggaaacggagctggtggagccgctgacacctagcggagcgatgcccaaccaggcgcagatgcggatcctgaaagagacggagctgaggaaggtgaaggtgcttggatctggcgcttttggcacagtctacaagggnnnnnnnnnnnnnnnnnnnnnnnnnagaatgtgaaaattccagtggccatcaaagtgttgagggaaaacacatcnnnnnnnnnnnnnnnnnnnnnnnnnnnnnnnnnnnnnnnnnnnnnncaacgcatgtgccgctcccaacgcatgtgccgctctctgggcatctgcctgacatcccaacgcatgtgccgctcccaacgcatatggcgctcccaacgcatgtgtccgggaaaaccgcggacgcctgggctcccaggacctgctgaactggtgtatgcagattgccaaggggatgnnncttcctggaggatgtgcggctcgtacacaggcacttggccgctcggaacgtgctggtcaagagtcccaaccatgtcaaaattacagacttcgggctggctcggctgctggacattgacgagacagagtaccatgcagatgggggcaaggtgcccatcaagtggatggcgctggagtccattctccgccggcggttcacccaccagagtgatgtgtggagttatggtgtgactgtgtgggagctgatgacttttggggccaaaccttacgatgggatcccagcccgggagatccctgacctgctggaaaagggggagcggctgccccagccccccatctgcaccattgatgtctacatgatcatggtcaaatgttggatgattgactctgaatgtcggccaagattccgggagttggtgtctgaattctcccgcatggccagggacccccagcgctttgtggtcatccagaatnnnnnnnnnnnnnnnnnnnnnnnnnnnnnnnnnnnnnnnnnnnnnnnnctcactgctggaggacgatgacatgggggacctggtggatgctgaggagtatctggtaccccagcagggcttcttctgtccagaccctgccccgggcgctgggggcatggtccaccacaggcaccgcagctcatctaccaggagtggcggtggggacctgacactagggctggagccctctgaagaggaggcccccaggtctccactggcaccctccgaaggggctggctccgatgtatttgatggtgacctgggaatgggggcagccaaggggctgcaaagcctccccacacatgaccccagccctctacagcggtacagtgaggaccccacagtacccctgccctctgagactgatggctacgttgcccccctgacctgcagcccccagcctgaatatgtgaaccagccagatgttcggccccagcccccttcgccccgagagggccctctgcctgctgcccgacctgctggtgccactctggaaagggccaagactctctccccagggaagaatggggtcgtcaaagacgtttttgcctttgggggtgccgtggagaaccccgagtacttgacaccccagggaggagctgcccctcagccccaccctcctcctgccttcagcccagccttcgacaacctctattactgggaccaggacccaccagagcggggggctccacccagcaccttcaaagggacacctacggcagagaacccagagtacctgggtctggacgtgccagtgtgaaccagaaggccaagtccgcagaagccctgatgtgtcctcagggagcagggaaggcctgacttctgctggcatcaagaggtgggagggccctccgaccacttccaggggaacctgccatgccaggaacctgtcctaaggaaccttccttcctgcttgagttcccagatggctggaaggggtccagcctcgttggaagaggaacagcactggggagtctttgtggattctgaggccctgcccaatgagactctagggtccagtgggatgccacagccccagcttggccctttccttccagatcctgggtactgaaagccttagggaagctggcctgagaggggaagcggccctaagggagtgtctaagaacaaaagcgacccattcagagactgtccctgaaacctagtactgccccccatgaggaaggaacagcaatggtgtcagtatccaggctttgtacagagtgcttttctgtttagtttttactttttttgttttgtttttttaaagacgaaataaagacccaggggagaatgggtgttgtatggggaggcaagtgtggggggtccttctccacacccactttgtccatttgcaaatatattttggaaaacagctaggcaccggcctatgtctgggggtggctctgtgcaatcccttcctgctcaccttacactcaattcctcttttcctggagggagtggctgggaatcttcagaaagcttggatgaggagccagacatccagttctccagcttcagggttgggggagatcgggaagctggattcagatctgagagccctttgacgaccagatcattcttatttagaacgaactaattcctaaggccactcaccagaatggggttatttcctccttgtgagtgacggagaaggtgggtnnnnnnnnnnnnnnnnnnnnnnnnnnnnnnnnnntgggactcattttcctttgctttgggttatgccagaggaactccatggactaagagtaagttggcagaaggccaaccaggcaagaaagcacctggggtccaaaggtgggtgaccgaactttgtgcccccaattccagactggagtttaacaccctattactttggggcccctttggcaaaatgaatgcacggaagggacaaaaactcggcgaagtgcccacaaggcgccgcaccg

SEQ ID NO: 4620 - DNA, 117 bp, Homo sapiens
atcacagctgagatggcttgtttcatgttccctcaggaggatatcatagcagctgtcaggtcacatagtgctgatggggctgagcaaagtgacagttgtctctttcctacgtcctag

SEQ ID NO: 4621 - DNA, 876 bp, Homo sapiens
atggaggcgcccgccagcgcgcagaccccgcacccgcacgagcccatcagcttcggcatcgaccagatccttaacagcccggaccaggacagcgcacccgccccgcggggccccgacggcgccagctacctgggagggccccccgggggccgtccgggcgccacatacccgtctctgcccgcctcctttgcgggccccggcgcgcccttcgaggacgcgggatcttacagtgtcaacctgagcctagcgcccgcaggcgtgatccgggtgccggcgcacaggccgctgcccggggccgtgccgccgcctctgcctagcgcgctgcccgctatgccctcggtgcccacggtctccagcctagggcgtctcaatttcccctggatggagagcagtcgccgctttgtgaaagaccgcttcacagcggcggccgcactcacgcccttcaccgtgacccggcgcatcggccacccctaccagaaccggacgccgcccaagcgtaagaagccgcgcacgtccttttcccgggtgcagatctgcgagctggaaaagcgcttccatcgccagaagtacctggcctctgccgagagggcggcgctcgccaagtccctcaaaatgacggacgcgcaggtcaagacctggttccaaaaccggaggaccaagtggcggcggcagacggcggaggagcgggaggcggacgggcagcaggcgagccggctcatgctgcagctgcaacacgacgccttccaaaagagcctcaacgactccatccagcctgacccgctctgtctgcacaactcgtcactctttgctctgcagaatctgcagccctgggaggaggatagttccaaggttcccgctgtcacctctctggtgtga

SEQ ID NO: 4622 - DNA, 957 bp, Homo sapiens; identical to SEQ ID NO: 14

SEQ ID NO: 4623 - DNA, 124 bp, Homo sapiens; identical to SEQ ID NO: 16

SEQ ID NO: 4624 - DNA, 3146 bp, Homo sapiens
gcacattgagcggatccttgggaacgagagaaaaaagaaacccaaactcacgcgtgcagaagatctccccccccttcccctcccctcctccctcttttcccctccccaggagaaaaagacccccaagcagaaaaaagttcaccttggactcgtctttttcttgcaatattttttgggggggcaaaactttgagggggtgattttttttggcttttcttcctcctttttttttcttccaaaattgctgctggtgggtgaaaaaaaaatgccgcagctgaacggcggtggaggggatgacctaggcgccaacgacgaactgatttccttcaaagacgagggcgaacaggaggagaagagctccgaaaactcctcggcagagagggatttagctgatgtcaaatcgtctctagtcaatgaatcagaaacgaatcaaaacagctcctccgattccgaggcggaaagacggcctccgcctcgctccgaaagtttccgagacaaatcccgggaaagtttggaagaagcggccaagaggcaagatggagggctctttaaggggccaccgtatcccggctaccccttcatcatgatccccgacctgacgagcccctacctccccaagcgatccgtctcgcccaccgcccgaaccctccattttcagtccggcagcacacattactctgcgtacaaaacgattgaacaccagattgcagttcagtatctccagatgaaatggccactgcttgatgtccaggcagggagcctccagagtagacaagccctcaaggatgcccggtccccatcaccggcacacattgtctctaacaaagtgccagtggtgcagcaccctcaccatgtccaccccctcacgcctcttatcacgtacagcaatgaacacttcacgccgggaaacccacctccacacttaccagccgacgtagaccccaaaacaggaatcccacggcctccgcaccctccagatatatccccgtattacccactatcgcctggcaccgtaggacaaatcccccatccgctaggatggttagtaccacagcaaggtcaaccagtgtacccaatcacgacaggaggattcagacacccctaccccacagctctgaccgtcaatgcttccatgtccaggttccctccccatatggtcccaccacatcatacgctacacacgacgggcattccgcatccggccatagtcacaccaacagtcaaacaggaatcgtcccagagtgatgtcggctcactccatagttcaaagcatcaggactccaaaaaggaagaagaaaagaataagccccacataaagaaacctcttaatgcattcatgttgtatatgaaggaaatgagagcaaaggtcgtagctgagtgcacgttgaaagaaagcgcggccatcaaccagatccttgggcggaggtggcatgcactgtccagagaagagcaagcgaaatactacgagctggcccggaaggagcgacagcttcatatgcaactgtaccccggctggtccgcgcgggataactatggaaagaagaagaagaggaaaagggacaagcagccgggagagaccaatgaacacagcgaatgtttcctaaatccttgcctttcacttcctccgattacaggagaaaaaaaaagtgcgttcgctacatacaaggtgaaggcagctgcctcagcccaccctcttcagatggaagcttactagattcgcctcccccctccccgaacctgctaggctcccctccccgagacgccaagtcacagactgagcagacccagcctctgtcgctgtccctgaagcccgaccccctggcccacctgtccatgatgcctccgccacccgccctcctgctcgctgaggccacccacaaggcctccgccctctgtcccaacggggccctggacctgcccccagccgctttgcagcctgccgccccctcctcatcaattgcacagccgtcgacttcttccttacattcccacagctccctggccgggacccagccccagccgctgtcgctcgtcaccaagtctttagaatagctttagcgtcgtgaaccccgctgctttgtttatggttttgtttcacttttcttaatttgccccccacccccaccttgaaaggttttgttttgtactctcttaattttgtgccatgtggctacattagttgatgtttatcgagttcattggtcaatatttgacccattcttatttcaatttctccttttaaatatgtagatgagagaagaacctcatgattctaccaaaatttttatcaacagctgtttaaagtctttgtagcgtttaaaaaatatatatatatacataactgttatgtagttcggatagcttagttttaaaagactgattaaaaaacaaaaagaaaaaaaaagcaatttttaaacagccctccaaaaggagttggttctggattatttggattaaatacgagctttcgaaccaatcattttacatctggtttttaaaccgtaagggccccatgaatgcagtgccggtacttttttttttttttttctgtgtgaaacaactcttattgtgatgtaacttgatattgtttaaatgttcagatgcagagggtaaaaatgtgttaatataccttgttccatggtgttgttcttttgcggggaggggccgctactcagcacttaatagaatcacaacgctgttgggccagtagtatttattgctttagagattgcttgtcgtacctgtatgtcgtccctttttaaatatgttttccattttcttgaaactgtataaagtttttttcccccttagcataagcatcttatatataacaactcatttgtacaaggtttttaagtttatatataaaatgtgtatatatatttttgtttcccctttttgacgtttttttttctgtatgaaacccagatgtcaccaaatggacattaatagttgcattaaggatcagtagcattaacaaaagttgctttaaaagccattatgtaaatcaagacttgaaaatgagtgagggaattttagcgacactgtctgagcagcagtgggagccatcttcgtttcgcctttgaactcccagtgggatgccctaccctgcgcccttaggacgcggactgaccgtgtacataact

SEQ ID NO: 4625 - DNA, 213 bp, Homo sapiens
atgtccaacaacatggccaagattgccgaggcccgcaagacggtggaacagctgaagctggaggtgaacatcgaccgcatgaaggtgtcgcaggcagcagcggaactcctggctttctgcgagacgcatgccaaagatgacccgctggtgacgccagtacccgccgcggagaaccccttccgcgacaagcgcctcttttgtgttctgctctga

SEQ ID NO: 4626 - DNA, 232 bp, Homo sapiens; identical to SEQ ID NO: 22

SEQ ID NO: 4627 - DNA, 20846 bp, Homo sapiens
  misc_feature (7800)..(7816): n is a, c, g, or t
  misc_feature (12278)..(12327): n is a, c, g, or t
  misc_feature (15073)..(15116): n is a, c, g, or t
  misc_feature (15656)..(15656): n is a, c, g, or t
  misc_feature (16692)..(16738): n is a, c, g, or t
ttttttttttttgcagaattagaggttttattagttgctggtttgtattgattataagtttataacttcagaactgaattagaaataataagcattagcaatcagcaaggaaaaggtgaacatctctgctatttttcctttaatgtgtttggcatattcaaaatccctgttttagaaaagaaataatgttaaaacatgtttataatggagaaagactctaggcacagaaataatattgcagaagcttttaaagtgtctgttctgcaacttattttaaaacccaaaggagaaaggatggtactaccataaatcacattgacacagaaaaaccataggcagcttgagaacttaggtaacagtggagagtctaaaccgaaacattgactgcaggatctgtaagtcctgcagacaagtgtgatgctttgaaatgcctaaatagcttcaacgtagttggctgggagcattccggtcctgccagtcctctgcacagtgccatacatccagcctcatcaattgcttgacacatttatgatggcatctccatccttgaaggacacctcatctgcatcagcagccatatagtcatacatggcacggaagatttttccagcagtagatggatgagatgggatggaagataccgttgtctgttgggtagcaactgaagatgatcgttgttgtgggagctctgtggtttttgcatgtttgtaagctgttgagactgcaaagacacccccgtcgctgtaagtcgaaaggtggtggtctggtgcttctgaatgctcagacttctcctcacccccactgacgcttagtgcactggcagatcgtgactgctcccggctccggcgctgagcttggacattaatcatgtgtaagcttcgggactggatgttgtcttctgctggatcatagtcaaaaaccgaaccaggattagtacgccagacacgtaaacctgtaatagtctcctgatcttggtcattccgtttttgttccatttctaccactttcctctgaatacctcggtagttaatgtcactgaagtcctgcatgttcttctttactcgttcagtgataggatctgtcaccactggtgtgaagcaacccttgtgtttctcaaagtcttcatgatatttcaccgttgagatgtgccgttgggtctccctcacccgtctcatctcgggggtatccaatacataggcagctttgccttgtatttgtttccggaaactatcagaataaagaaccgagctaatgttttcttggttgcgcttagctctctccatctctggagtaacaggtgtcggagttgcttttctcatgttctctttgtacaataccgagctaaagttttcttgattgcgtttcactctttccatctcaggagtaaagggtgtgggggttgctttccccaggttctctttgtataacaccgagctaatgttttcttgattgcgtttgactctctgcatctcaggagtgacaggggttgcggtggctttccccacattttctttgtacaaaaccgagctaatattttcttgattgtgtttgactcgctccatctcgggagtgacaggtaaaggagttcccttgcccatgttttctttgtataacaccgagctaaagttctcttgattgcgtttgactctctccatctctggagtgataggtgttgggattcctttccccaaattttctttgtacaaaaccgagctaaagttctcttgattgcgtttgactctctcaatctctggagtcacagtggttggaatgcctgttcccaagttttctttgtacataaccgagctaatgtgcttctgcgtctccttcacacgtttcacttcaggcaggtcagggattggagttccttgtcctattgcttccttatacttcaccgagctaatgtggtcctgtgtttgtttcactctcatcatctcaggtgtctttccgatagccgttcctggtgagacatcctctttatataaaaccgagctgaaattcttctgattttcttttacacgcagtatttctggcgtgtcttgaacaactgtaatttttcctttactgtttttaaggtcacactggtattggagaaggctgaagttcttttggttctcccggactctctgtatctctggggtgtccaaaacagtctcataatacgacatggacttctcagcatcttccttgtactttttctggcttgaaagattcttgacttgttgggcatgaatgatctctggagtatcaaccacagaagtgaaattggctttctccatttctgctgattgcttatacttaatctgactggcaatatcagtagcattcctggccctcataaaatccggagtttcattggccatggcattcaggcctcttcctttgacttccagttccaggtctcgcttatattctttctcattgaggatttgagtggcattctttgctcttagcatgtcaggtgtatcttccatttcagtgaggcccttcccacggatgctttcctctagatctttcctgtactctttctcgcttgctattttagttgcatatttgacatgtaacaaagctggcgtgacctccaggccagtcaggtttctgcctttaatggactcttcataatctttcctatattctttcccactctgcatctgctgagactctttggcagtgatgtacgttggtgtttcaaagtccagcatgggttttcctcgttccttttcatacttttctttgtatttcactatactctgtaattctgtggcctcttttaggtgaagctgctccagattatcgggtatggtgtggtagtggcctttactcttctcatacttcttcttgtactggtaagaactggcaagttggcttgtattcaggacatgattcatgatcagagactccttcatgtcagtcacgggtttgtgaagtttcttcaggtcagccttgtatttaacctcacttgcaagattattagcatctttcatgactttgtagagctggctgtcttttggattgtattttggtgtcttgcccttttctttatcgaaattttctcggtatttaacctggctgctcagcttggctgccttcttggccatttctatgtctgggcgaccgagcatgcttaagccatggctgccttccttgcggtgcttggctctgtactccacctcactggcctgtttggctgcctgtgtggccttcttgatgtctggtcgatcagccactgtggtgtaatgcaggttctctttggcatcttttctgtaagcgacatcactttgcttcttggccacttccatagcatgtttcacctctggtggctccagcatgatggagtagttggattttcctttctccttgacaaacttctttttgtaatttgtatcactgacatgcttggtcacttccttgacgtgaacagtgtcccgggtctctggtagtgttgtgtatgagccctgtgccaagtgcttcttgacatggtccttgtacttgttctcagacaccaggttgctgacagtcttcgccagcaggatctgaggcgtgtcaggtacggcatggcaggttcctctttccttgacatgtttctctttgtatttcagatcactttctattaaagtattcctgagggcgagcaccgtgtttttgtcatcagtgacagaaagcttgcaacccttgaggaactcccggtccagcttatattcaaaatcgctttgctgcagggatgacttggcagcctggaggaagtccggtcggtcaggagtccacttccagtgggctttgttggcttcgtactgtttcttatagtccagattggtgttgactttgtaggcgtccttggctgctttgatatgaacagcatctggctcaatggtgcagttggatttatttctttggtatacttctttgtatttcagatcactgacttcatctttaaccttgcggacatgcagcaacatgggcgtgtcgtggattgtggtgtagcctctgggtttggccttgttgtattccaatttataaaggatatcgctgatttgtttgttgacttttgtagtacgcaggtgttctggagtatccacaattgaggtaaatttgtcctttgatttttcatagtttttcctgtatttgatctgactgatctggtcgctgcgggtcttagccagcagatgtctaggctcatcgactaccaggtggtatttatctttccgctgctcataatcagctctgtattttttctcattcatcaattgagttgcatacttgaaatgcctattgatcggagagtcggcaacatacttgaaatctgactttgtcctttcaaatacttctttatacttatacttgctgtagagagtcttgttcttttcagccagagtgaaatcaggggtatcataggcatagcaaccaatgcctttaagccaagtcaagtcttctttatattttacatcactgactgtgtcagtgactgctcggtggtggaaatgctctggacgatcaggaatggacctccagatacccaactggctcatgtagttctccttgtattttattttactgatgtcatctgtgactttgcgatgatagacaatgtctagggcatctttcaccgtgtggtatttccctttggtcttttgaaatgtttctttgtagcgtagatcactggcattccagtaagccctcttggctctgatgaggattggcgtatctggaaccggagtgtacttgtctttcatcttttcatattgaatcttgtactttttctcactgaccatgtccttcacgtctttagcatgcttcaaggctgtggtctggtttccagcgtgatgatggggtctctctttggtggcaagttcaacatacagatactgactctgaagcttctgccctcgcttggctcttaaaagatcaggagtatcaggaactgaagtaaagattgacttctgcttcttgcctgcagctctgtagaccagctcactcagatgtgtcttcagttcttgcacttttctgtattctggagtgtcaagcaccactttgtatttgtctcgcatctcccttgccttatcagtgtataggtaattagaccagagcttccgcaggtgccgggagcggaccatgtcaggagtgtcatacaggaagcagccaaatcccttcaggacctgcaagtcctctttgtatttaatatcactggtgatgtctcccacatagcggcaatggatcacttggggtgtgtatggcagagagatcatgtggccctgcatcttgaagaagtctgatttgtagatcaactcactgacagcctcttgtgtcttcttgacttggcggatctcagggggatcgggagttgtatggatcttgtctttcagtttgtggtacaattcccgatacagtctctcgctggtaacattgttgactctccggacgtggacaaatggaacatctttggggccaagtgtatacccatatgccttggtgtgttcataggcttctttgtacttgaaataactgctcatgtaacgggtgtccttgatgtgtttgaagtgaggagtgtcacctggaagtctatatccagtgggcagggtgcgcaggctggttttgtatagattcgaactctggagcttgtatgcatgaagggcccggtccagatccacggttttggtagttggagccactttgcctctgacactgtgcacatagtcatagtggtagacagcgtcacttagctgtttcccacttttgacagcctgcacgtagactggtgtatctgtgacaagcttgtagtcattccttgttttcaacatgtgagctttatacttgatatcatcacgtagatcataagcatgcttggcatggaggatttcaggagtgtcccagacgtagcaaccaatgcctttcagccagttgaggtcatccttgtatacaatatcgctgatctgatctgtgactttcctgacgtgatcattgacttgcaagtcggggtggcaaatccattcgtggaggcgcaggcggtaatcaatctcactgactttcttctgggaatccttggcagtaaccatctctaccatgtcgggcacgatgtggattttcatcttgttcttttcataaactgatctgtacaggcgatcgatgttaagcttgccaactcggaggcaccgtgctgtgttcggatcatcgtcaacacttcttggtaacgtataaagagctttgaacttttcatattcttcccgatatttgatatggctggccagatgcttctggttcttggcgtgtgtcagggacaaggtgctggaaggcaggatgtagctggtggctttcactctatcccaggcctccttgtacaggttactgctgtaaagattcttcaggtttctggttctgtcataatccactgtttctagaactgttgtgtatttgtccttaatctgatgataattttctttatattttacctcactggcattaatgccactctgaacagcagtcacatagaggggcgtgtctgtgaccagattatagttttgtagattttctttacctgctgctgtatattgtagctgactctgaaggtcgtatgatttcttggcatggaggatttggggtgtatcccaaacgtagcaaccaatgcctttcaaccaattcaggtcatctttatacacattatcactcaagatctcctgggcgtttcggacgcgtataacattgggttcttccagaagagacgtccactggtggaaatagtgtcgatactccaggtcactgaggatgtactggcaccttttagccagcacgtgattcatcatgtcattggggatatgaacatttgctttggtatcctcataatgttttctgtagttcaacgcactcctcatcttttggaaatccagacagtgaaccacaccagggaattcaccgatcacttttccagccaggtagtgacctttctgcttctcatatgtctctttgtatttaagctcactgttcaccagatcagcatgcttggctccaacaatgggaatgtagcgctcatccagggtgtagccataggccttggtgccctcccacgcccctttatacagtatagtactgtagagttttcccatgtctttggagtgggagatatgtggtgtatctggtgaaaacgtatatttgccctttgctttattaaatgtttctttatattttacatcactttgattgacagaattaatcttggctaaaacaatctctggaggatccaccacacttgtaaagttaggatagttttcaagggcatttttcttatatttgatctgactcatcatttcctggttcttagtaacccttacatggtccacagaatccagtgggatccagccaatgcctcggagccactccaggtcagctctgtagacattatcactctgtaggtcataggcctttcttgcctgaataacatcgttctggtcaggatgacacatccattggtgcaagtaattacgataatcaatatcactgacaagggtctgcccctgcttggcggccaagactgacaccatatcagcaggtatattgattttggcctttgttttgtgatagtcctctttgtatagtctctcattctgaatctggcctgcatgctcaaaccaaaccagcttaggatcatctctcatcgtcgggacaccaacataatgacctttttgcttcacatgttcagctttgtatttcagctcactctgaacgtcattgcagtgatgggcatgaacaaatggcacagcatctggaggcaaaatgtaacctgtggctttttgtctctcccagccttccttnnnnnnnnnnnnnnnnngtatcctagcagcctcctgggcagtgtgcagcaggggggtttctgtgagggtgtactttgatttggtggcattccagtctttccggtatttaatatcatcgaggatctcgccactttgtttcgctgtcacataatcaactctgtcatccacaggcgtaaagttgagagtttctatttttgtgcgatattttttctcactgaagatgtccgcggcatgtttggcatgattgacggacacggagtcatttggcatccacccaattccacgcaaccattccaagtcagccttgtaaacattatcgctctgcagttcgtaggccttcttggcctgaatcacatcgttctggtcgggcatgcaggtccactggtgcaggtaattgcggtaatccatgtcactgaccagagcctgggaatttttagagtgcaggatggaaagcatgtccacagggctctggatcttggccttccatttggcccagtccagccggtactctcgttcattctggagcttgtcagctatgagggcccagcggatcttgttgtcatccctggctgtgagggtgcccacgtagtgtcccttctgcttctcatggtcaagcttatatttatagtcactggcaatctccctggaggccttggcagcctggatggggatggcatccagccggacatcacagcccgccttcatttcatcccagccctcacggtaaagtttattgctcacattaagagcatttgctctagcgagattaatttctggagtatctggcattatgtgtattgaagttttatccttgtcccaaacctctctgtactttggaatactaatattttcagcatttgatttagcaaggaccacttcaggtgtgtcaacaatgcttgtgtacttaaggttcaccacaggcgtccgatagacactgtcacaaaagatattctgggcgtttttgactctcaacacttcaggagacccttggggcatccagccaatgccacgcaaccactccaagtcagccttgtagagggcatcactctgcaggtcataggccttttttgcttggataatgtcgttttgatccggcatgcatgtccattcatgcaggtaattgcgataataaatgtcagtgaccaaagtctgacatttcttggccagcaagatgcttaacatgtccactgggctagagaacttggttttccacttttggaattccttcttgtactccctttcactttgaattttttctgcatgtatggcacacataatcttgggatcatcttcaatgctctgggctccaatgtggtggcctttctgtttctcataggcttccttgtatttgtagtcactggcgatgtccctggaggccttggcacttttgatggaaatagcatctgctctcagatcatagtccttcatctttgattcatcccatcccttggtgtaaagtttttggctgatattggcagaattactcttggccagcaggatatctggggtgtctggcatcacgtggatggaggttttgtcagcatcccaagcttctgtgtataaatgcttgctcattgtcagggcattattctttgctaggacaatttccggagtgtcggtaatgcatgtgaatttgagctggtctgcaggctggcgatacttcctgtcactcaggatttctccagctctcttcactttctcgacctctacagagccaatgggaacccatcctatgcctctcagccactcaagatcagatttgtaaatagcatcactctgcaggtcataggccttccgagcctgaatgacgtcattctgatcaggcaggcaggtccattcatgcaggggatgcttgtagtctatgtcgcttacaaggatctgacacttcttggccagcaccacccccagcatgtccactgggctgctgaacttggtcttccacttctcaaactccttcttgtactccctgtcactctggatcttggccacatggatggaccacatcatcttcgggtcatccttaatgttccgggccccaatatggtggccaagctgtttgcggtagccttccttgtacttgtaatcactagcaatatctcttgaagccttggctgcttggattggaatggcatccagacgcaagtcatagccttccttcttggactcttccaaagcaagtttatagagtttatcactgtagtttattcggttgagtttggctaacatgatttctggtgtatcaggcatgacatgaatagttttcttgtcattgtcccaggcttcagtatataagcgcttattcatgtttaaagcattgttttttgccagcacctgctccggagtgtccgttatactggtaaatttcagcgtttctggacgctgacggtagatagtatcactaagtaattctccagctctcttggccctaacaacttccaaggaatcaatcggaacccagccaatgcctttcatccattcaaggtctgacttatacaaattgtcactctggaggtcataggctttccgtgcatgaatgatgtcattctggtcgggcaggcagatgcattcatgcagaggatgtttatagtccacatcgctgaccaaggtctgacacttcttggccaaaacgataccaagcatgtccactgggctgctgtaccttgtcttgtatttctcaaaatctttcttgtactcacggtcactctgcactttggcaatgtggagggaccacattatcttggggtcatcgtgtactgctcgggcgccaatgtggtgacccaactgcttacgatatgcttctttgtatttgtaatcactggcaatatcccgagaggccttggcagccacaatgggaatggcatcacttctcaagtcatagccttctttcttggcttcttccatggcctgacgatagaggctctcactataatttattttattttgtcttgccaacatgatttcaggtgtatcaggcataatatggacttgggtcttgtctttgtcccaggcttctgtgtataagcgcttgttcatattgagagcattgttcttggccagcacctgctctagagagtcagtcacactggtaaatttcagcttgtccggaggctggcggtagatgttatcactcagtatttcagcagctctcttgcacttgaccacatccatagacccaatggggacccagccaatgcctctcagccactggagatcagatttgtaaatgttatcgctctggaggtcataggcctgccgagcatggatgacatcattctggtcgggcaggcacgtccactcgtgcaggtagttcttgtagtccacatcgctgactaaggtctggcacttcttggctaacaccactcccagcatgtccactgggctgctgaacttggtcttccacttctcaaagtccttcttatactccctgtcactctggatcttggccacatgcatggaccacatcatcttggggtcatcttcaatgttccgggctccaatgtggtggccgagctgcttgcggtaaccatctttgtatttgtaatcactgataacgtccctggaggccttggcagccacgatggggatggcgtcacttcgcaagtcgtagcctttcttttttgcttcttcattggcaagtttgtatagagtctcactgtagttgattttgttctgccttgccaacataatctctggtgtatcaggcattatgtgaatttgagtcttgtctttgtcccaggcctctgtgtataaacgcttattcatgttgagagcattgttcttggccagcacttgttccagagagtcagtcacactggtaaatttgaatctgtctggaggctggcgatagattttatcactcaaaatttcagttgcccttttgcatttttccacatccaaagagccaatggacacccagccaatgcctctcatccactggagatcagacttgtacatattatcgctctggaggtcataggcctgccgagcatggatgacgtcgctctggtcgggcaggcatgtccactggtgcaggtagttcttgtagtccacatcgctgactaaggtctggcacttcttggccagcaccacccccagcatgtccactgggctgctgaacttggtcttccacttctcaaagtccttcttgtactccctgtcactctggatcttggccacgtgcatggaccacatcatcttggggtcatcacgtatagctcgggcaccaatgtggtggccgagctgcttacgatagccttctttgtacttgaattcacttgcaatatctctggaggccttggctgccttgataggaatggcatctacccgcatgtcataacctttcctcttggcttcttctaggccaagcttatacaatttctcactgtaatttactttgttttgtttagctaataaaacttcaggggtatctggcataatgtggacagtggttttatctttatcccaagcttctgtatagannnnnnnnnnnnnnnnnnnnnnnnnnnnnnnnnnnnnnnnnnnnnnnnnnggaatccataaggctggaaaacttaaattgatctgggtgctgacggtaaacatggtcactcaaaatctgggtggctcgtttatttttctcatcctcgagagaaccactagtcatccagccaatgccttttagccactgaaggtctgacttgtacaaattatcgctctggaggtcataggcctgccgagcatggatgacatcgctctggtcgggcaggcatgtccactggtgcaggtagttcttgtagtccacgtcgctgactaaggtctggcacttataggccaacaccacccccagcatgtccactgggctgctgaacttggtcttccacttctcaaagtccttcttgtactccctgtcactctggatcttggccacatgcatggaccacatcatcttggggtcatcttcaatgttccgggcaccaatgtggtggccgagctgcttgcgaaagccttccttgtacttgtattcactggcaatttcccgggaggcttttgctgctttgattggtatggcatcaacaggaagatcgtaaccttttctcttcagctcctcataacccattcggtagagtttatcacttgtgttgattaagtttgctttagccagaacaatgtcaggtgtatcaggcatgatgtggatctgagtcttgtctttgtcccaagcttctctataaagtctatcactcctatttttggcatttgtctttgccagaactatatccatggcatcaggaatgctggtgaacttgtttctgtctggaggctgacgatatttcttctcactgatgatttccgaagcccgcttgttcttttctgcctctaaagaacccaagggactccatcctatgcctctcagccactcaaggtcagatttatatagattctcactttgcagttcataaactttcttagcttgcacaacatcgttctgatcaggcagacatgtccactgatgcaggtagttcttgtagtccacgtcactaaccaactcctgacacttcttggccagtaccactcccaacatgtccactgggctggagaacttagttttccacttctcaaagtccttcttgtattctctttcactctgcattttggctacattcatggacaacacaagttttgggtcatcttgcagactccggaatccaacatggtggccaagttgctttcggtagccttgtttgtatttataatcactagcaatgtctcttgaagctttagctagctgtacagaaattgcatcaactgggagatcatagcctttcttcaaagcttcttcccatccaagtttatagagtttctgactatacagtgtttgattctgcttggcttgtaaaatatctggtgtatcaggcatcacatgaatcttggtcttatctttattccaatcaatggtgtataaatgcttgttcatggtatgtgcattctgcttggcaagcaccatgtccatggaatcagtcagcttcttaaactggaagttgctcgggtgctggcggtatttctgatcactggcatattcagttgctttcttggccttctccacttccagagaacctgctggactccagccaagccctttgtaccattcattgtaatcttgcttatattcattatcactctgtatgcgattcatattcctggtcagctcaatgttcattgcatctggaaggaggatgtacttgtgaatcaggtgcttgtagttagtgttggtgatgttggcttgggcatcctttgcagccgtgacactgagcatgtcggcaggggtgtggtagctggtctttgtgttctcatagtttttcttgtactcccgatcagattgcatcttagccacttgcatggaatggactaatttgggatcatcctcgagactgcggaaaccaaccattttccccttccctttttcataattgtacttgtatttataatcacttgcaatatctctggaagccttggcagctttgataggaattgcatcaggtctgagatcatagcctttctttttagactcttccaaggaaagtttgtagagtttatcacttatattaattgcatttgcctttgccaaaataatctgggggatatcaggcatgatgtggactttggttttgtcagcctcccatgcttgtttgtagagatgttcgttcataatttttgcattattctgggccaaaaccatgttcatcgagtccatgagtgtggaatacttcaaagtgtctgggtgctggcggtacttcttttcactaataatctccatggctttcttgtttttctctgcttccagggagcccagagggagccatccaatgcccttcatgaagtcagcatagtcagccttgtactgattatcactttgaatctgcatcatatttttggccaattcaaagctcatggcatcaggaagcatgttgtaggtatggatcacgttcctgtagttggcattggtggccacttcctgagacttcttggctgccaccacactgagcatgtccaccggggtgtggaaggaggtcttggatttctcatatcccttcttgtattcccggtctgactgcatcttggccacttgcatgaagtgcaccagcttggggtcatcttccaggctccggaagccaatgtgtttccctttggcttgttcataggctttcttgtatttgtaatcactggcaatgtctctagaggctcttgcagcctttattgcaatggcatcaggcctcaggtcatatcctttctttttcctnnnnnnnnnnnnnnnnnnnnnnnnnnnnnnnnnnnnnnnnnnnnggtttactctggagagtaaaatatccggtgtgtcaggcatgacatgaatggtggtcttgtccttgttccatttttcagtgtagagcctcttgtccatgttcagtttgttactcttgttaagtgcctgttccattgtgtccatggcgtaagtgaacttcagcttctcggggtgctggcgatacttcttctcactaagaatctctcctgctttctttgccttctccacctccagggactctatgggcacccagccgatccctttcatccaattggtgaagtcagatttgtacagattatcactctgaatctgcatggcattcctggagtgctccacattcaaggcatcgggcaggagagtgtagtggtggtatgactgtctgtagttggcgttggtggcaacctcctgagatttctttgcagctgtcacactgaccatatccagaggtgtgtggtacttggtcttgctggcttcatagccctttttgtactcacgatcagactggattttggccacattcatgtagtgaaccagtttaggancatcctgaagactgagaaatccaacttgcttgcctttggctttctcgtaggcctccttatatttgcaatcactagcaatattccttgaactttttgcagcaacaattgggatggcatctggtctcaaatcatagcccttgcgaatggttttcttccaatctgctttataatgagcatcactcatgttgagggcgttgactttggcttgaataaactgaggcaattcagggtcaatagtatacttgtgcttcagtttctctccctctaccttgtagttcaaatcacttagctgctttgtgttatgctgagccaacatcatgcccatggaatcaggcacacttgtgaacttgacggtatctgggtgctgtcgatacttcctctcatttaatgcatcgcctgctttcttgaccttctccacctccagggaaccaatagggatccatccgatgcccttcaagaagctgttatactcgtctttatacacattatcactctgaatttgattgacattcctcgtatgctcaagactcatggcgtcaggtaggtatgtgtaatgatgcaatggctgtttgtagttgacattggtagcgacatcctgggccatctttgcagctgtgatcgtaaccatgtccccaggggtatggtagctggttttggtgttctcatagttcttcttgtattcacgatcagactgcagctttgccacattcatatagtggaccagcttgggatcatcctggaggcttctgaaacccacatgctttccctttgacttctcataagcttccttgtatttataatcactggcaatgtttctcgatgccttggctgcagtgatgggaatagcatcgcccagcacattgttgcccttgcgtattaagtcatgccaatcccgtttataacagacgtcacttatactgtaagcattgcacttggcctggagaaactgaggaagatcaggactcatggtgtatttatgtttcacatcttctcctttagccttgtataagatatcactgacttgcttcgtgttctnnnnnnnnnnnnnnnnnnnnnnnnnnnnnnnnnnnnnnnnnnnnnnnagggtgtctggatgttgcctgtacttcttttcattcagagcatcaccggcctttttaactttttcgacgtcgagactgccaataggaatccagccaatgcctttcatccagttgttgtagtcttccttgtagacgttatcactctgtatctgcatcatgttcttagacagctccaggtccatggcgtcaggcaagtaggtgtaatgatggagagaatgcttatagttgacattgctgaccacatcctgggctttcttagccgccacgacattgaacatatcatggggcgtgttgtatttggactttgtcttctcatagtcttttttatactcccgatctgattgtatcttggccacgttcatataatgaaccagtttagggtcatcttgaagactttggaagccaaccattttccctttagccttttcatagtcttttttgtactgaacgtcactcgccgcctgcctggcagctttggcagctctgatgggaatcgcatcagttctcaggtcatatcccttcttgctcaagtctttcaagtctgctttgtacatattctcactgatattgtaggcattaactttagcctggatgaactggggcaggtctggtggcaggttgtaattgtgaataatttcctctcctttggctttgtaagcgatatcactcctctgggcctggttaattttagactgtactgtaattggagcatcttcaatcgaggtaaacttgagggtgtctggatgttggcgatattttttctcattgaggatgtctgaagctcgctttgccttttccatttctaaggacccaaaaggcacccagccacaacctttcatccagctattgtagtcagctttgtattcaacatcgctctgcagcgcatatgccttcttggcaaggtccacattgatgctatcaggggggtagctgtaactgtgtaagatgtgcttataatcaacgtcgctggcaattgcctgagatttcttagcttgagtgacttggagcatatcaagaggtgccgtgtagatagtttttgacttttcataatcttttcgatattcgcgatcactctggtttttggctgtcttcaaggagtgcagcatctttggatcgtcattaatgctgagggctccaatcattttccctttgctcttttcatagtctttcttgtacatcacatcgctggtgttcttggtgttggctttggctgccaacaggggaatggcgtccactttaatgtcaaacttcttggctttgctcttctcccagtcttgcttataaacattatcactcagattataggcattgactctgtgttggataaactgtggagcatctgctggtatatggcacttgaacctctcaccttcatgttttgctttgtaattcagatcactaagctgtttcgtgttgagctgggcttgcaacagtacaggagaatcagtgactgccgtgaatttggtcttatctggatgaactttgtaggtatgatctttacactggtccagcttcttgattgcgtcatattcttgtgttattgtctgagggaaatagcattttcctttatcttcttcatattctgctttgtaacttttatcactgttttgagctgcaactttcatgcagtgtgtgtgatatgggtcctccatgctgcctacataatgtcccaaaacatcctttacatataagtctttatatctagcctcactgaagttcttcagctgagtatcaagttgatattttggggtctcacagtaattcatactctttgcctttgtcttctcatagttttccttgtataatctatcactctggtttttggccaccttcaaggagtgcagcatcttgggatcgtcattaatgctgaggactccaatcattttccctttgtttttttcatagtctttcttgtacatcacatcgctggtgttcttggtgttggctttggctgccagcaggggaatggcatccactttaatgtcaaactttttggctttgctcttctcccagtcttgcttataaagattatcactcaagttataggcattgactttgtgctggataaaagcaggagtatcaggggggatatggcacttgaacttttcactttcatgttttgctttgtaatttaagtcactcagttgtttggaattgacttgggcttgtagcagaacaggagagtctgtaacttgggtgaattttgtcttatctggatggactttgtaggtgtggtctttacactgatctagtttcttaattgcttcatattcttgagttatggtctgagggaagaagcctttgcctctgtcttcttcgtattctgctttgtagtttttatcactgttttgagctgtgactttcatgcagtgtgaatggtatggatcctcgaagctgcctacataatgtcccaaaatatcttttaagtaggaatctttatattttttatcactactgaagttctgcagaacagtatcgagcttgaatttgggggtctcgcagtaatttatgctctttgcttttgtcttttcatagttttccttgtatagtttgtcacttagggcatctcctgctgccttcagctgcctaagctgtgggttctctgaagcaggaagcacattataatctgcttttcctttattcttttcatagtcttctttgtattttaccttgctagctgccacaccagcttttttattcattttatactctggtgtttcggtctgcatgaagtagatctggtctttcatgttttcaaaatcttcctggtatttccttgtgctaatgttatcagcattcattctggcatttgcaacttcaaagcaaggtgtctcactccatttgcctttgatttttttttcttattttttttgtatttttgcttgctcacttgattggttactttcttggcaaattctatatctggaggatcggccagaggcgtgaattgagcttgctgttcagcgagaccttttttgtaggcaacatcactgagagctttctgggcctgggcaactctcctcagttccgggctatcattataggggtaaaacaaacttttgtctgcttcccagtcttcagtgtacagtttcttgctgaacatggcggtgttcttaacggcctggacaagttcaggggcatcaggaggaagcaggtacttatccttggtgtcttcccagttctgcttgtataaaaccttactgacttgctgcgacactttctttgcatgttcaatatcctttgctttttcatctacgtgacatatagtcttagcaacatcaccatccattcgatacttaacctcactgagttgatcttgtacttttttgattctgcgaagttctggagtatctgttgtgctggcgtatggctgtccttttgttttctcaaacttctccttgtatttatttgggctaaaaagatcctgcattttctgactgtgtgcaatgtagggggtcatgaactttgaaggatccactttcttccggatgaccttcctcctctccaccggctttgctgatgctggctgtgccagtgctggctgtgccagagctggtttggaagtttctgattgctcatagtcagatgtccttgttgtcgtagtctcataaatttttgttattgtctctcccggcacctcttcgtaaaccacttcttctgtgtagtactccaccacctcctcatagtcttcgtcatctgccatttttccagagtagtagtggcacctacaaactcaaggcaatggggttattttcttcccgaacaccattggcttatacagactttttctttcgtttctgtagctctcgttcaaaccttcaatctaccaaataaatttcctcagcagcaaagcctctcccaactctcccctcctgagaaccccaggcaaaagcagattataatgtgcttcctgcttcagagaacccacagcttaggcagctgaaggcagcaggagatgccctaagtgacaaactatacaaggaaaactatgaaaagacaaaagcaaagagcataaattactgcgagacccccatattcttgagttatggtctgagggaagaagcctttgcctctgtcttcttcgtattctgctttgtagttttatcac

SEQ ID NO: 4628 - DNA, 312 bp, Homo sapiens
ttccggtacaaagaggctttcctgcgggaccgaggcctgcagatcgggtaccgcagtgtcgacgatgacccaaggatgaagcatttcctcaacgttggcaggctccagagtgacaatgagtacaagaaggactttgccaagagtcggtcccagtttcacagcagcacagaccagcccggcctccttcaggccaagaggagccagcagctggccagtgatgtgcactacaggcagcccctgccccagcccacctgcgacccggagcagctgggcctcaggcatgctcagaaggcccaccagctgcagagtgat

SEQ ID NO: 4629 - DNA, 705 bp, Homo sapiens
atgactcacgctcaagaagagtatccccgcgaatgctgtggggtagttacccaaaagggacgagtgcaaaaataccatagagtcgataatgttcatcgcgatcctgaaaatcacttcatgatggacgcagtgcaatacgcatgtattgaggacgacgcagactcaaccacgattgcgatcgttcacagccacacaggagatggggctacaacgctaccaagcgctcacgatacgtgcatgtgcaatgagatggaagtgacttggattattgttagcgtaccggaaggagatatgcgatttgtgaagccggagaaattacctctgattggtcgtccgtggtcattaggatcattcgactgttacggtcttgttatggcgtggcacaaagagcacggcgtagaattacgcgatcgacgattgaattttgaatggtggaaacctgagtatggaattaatctctatcaggattattacaagcaagatggcttcgttgagattccagatcagaataatccgtcattaggtgatatggtaatcatgcagatagggcaaaacgttccggtatggaaccacgcagggatttacctcggtgataatcagatcttgcatcacgccttcggtaagctgtcgcgacgtgatatctattccggctggtatcaggatcacactgttttaattgttcgccataaggatctcaaactatga

SEQ ID NO: 4630 - DNA, 351 bp, Homo sapiens
agtccagacttctggcttaacaagattgaagatggaaatgattttggggtagcaatccaggataaggtgttggagagggtgaatgccatcaagaccaaagtggaagctttccagacaaccatttccaagtatttctcagaacgtggggatgcagtggccaaggcctccaaggagactcatgtaatggattaccgggtcttggtgcatgagcgagatgaggcagcctatgcggagctcagggccatggtgctggacctgagggccttctatgctgagctttatcatatcatcagcagcaacttggagaaaactgtccacccaaagggtgaagagaagccatctatgtactga

SEQ ID NO: 4631 - DNA, 338 bp, Homo sapiens
gcccgctcctcctcatcgtggagtacgccaaatacggctccctgcggggcttcctccgcgagagccgcaaagtggggcctggctacctgggcagtggaggcagccgcaactccagctccctggaccacccggatgagcgggccctcaccatgggcgacctcatctcatttgcctggcagatctcacaggggatgcagtatctggccgagatgaagctcgttcatcgggacttggcagccagaaacatcctggtagctgaggggcggaagatgaagatttcggatttcggcttgtcccgagatgtttatgaagaggattcctacgtgaagaggagccag

SEQ ID NO: 4632 - DNA, 739 bp, Homo sapiens
aactgggtttataggcccaaaaggtcaacgaattttcctcattctcagaggagtccttggttctaccgccatgatgcttatatactatgcttaccagacaatgtccctcgctgatgccacagttatcacgtttagcagtccagtgtttacgtccatatttgcttggatatgtctcaaggaaaaatatagcccttgggatgctcttttcaccgtgttcacaatcactggagtgatccttatcgtgagaccaccatttttgtttggttccgacacttcggggatggaagaaagctattcaggccaccttaagggaacattcgcagcaattggaagtgccgtatttgctgcatcgactctagttatcctaagaaaaatgggaaaatctgtggactactttctgagcatttggtattatgtagtacttggcctcgttgaaagtgtcatcatcctctctgtattaggagagtggagtctgccttactgtgggttggacaggctatttctcatattcattgggctctttggtttggggggtcagatatttatcacaaaagcacttcaaatagaaaaagcagggccagtagcaataatgaagacaatggatgtggtctttgcttttatctttcagattattttctttaataatgtgccaacgtggtggacagtgggtggtgctctctgcgtagtagccagtaatgttggagcggccattcgtaaatggtaccaaagttccaaatga

SEQ ID NO: 4633 - DNA, 803 bp, Homo sapiens
gctatggctacatctaccccgtcaccaggcttggcaagtacttgtgcatgctctatgctctctttggtatccccctgatgttcctcgttctcacggacacaggcgacatcctggcaaccatcttatctacatcttataatcggttccgaaaattccctttctttacccgccccctcctctccaagtggtgccccaaatctctcttcaagaaaaaaccggaccccaagcccgcagatgaagctgtccctcagatcatcatcagtgctgaagagcttccaggccccaaacttggcacatgtccttcacgcccaagctgcagcatggagctgtttgagagatctcatgcgctagagaaacagaacacactgcaactgcccccacaagccatggagaggagtaactcgtgtcccgaactggtgttgggaagactctcatactccatcatcagcaacctggatgaagttggacagcaggtggagaggttggacatccccctccccatcattgcccttattgtttttgcctacatttcctgtgcagctgccatcctccccttctgggagacacagttggatttcgagaatgccttctatttctgctttgtcacactcaccaccattgggtttggggatactgttttagaacaccctaacttcttcctgttcttctccatttatatcatcgttggaatggagattgtgttcattgctttcaagttggtgcaaaacaggctgattgacatatacaaaaatgttatgctattctttgcaaaagggaagttttaccaccttgttaaaaagtga

SEQ ID NO: 4634 - DNA, 258 bp, Homo sapiens
ccactccgtgcatcaaggccatcagtcccagtgaaggctggaccacggggggtgccaccgtcatcataattggcgacaacttctttgacgggctgcaagttgtattcggaactatgttggtgtggagcgagctgataactccccatgccatccgagtccagaccccgccgaggcacattcctggcgtcgtcgaagtgaccctctcctacaaatccaagcagttctgcaaaggtgctcctgggcgctttgtctacaccg

SEQ ID NO: 4635 - DNA, 552 bp, Homo sapiens
ggtgccggacacaagccctggacctcgtcttcatgttggacacctctgcctcagtagggcccgagaattttgctcagatgcagagctttgtgagaagctgtgccctccagtttgaggtgaaccctgacgtgacacaggtcggcctggtggtgtatggcagccaggtgcagactgccttcgggctggacaccaaacccacccgggctgcgatgctgcgggccattagccaggccccctacctaggtggggtgggctcagccggcaccgccctgctgcacatctatgacaaagtgatgaccgtccagaggggtgcccggcctggtgtccccaaagctgtggtggtgctcacaggcgggagaggcgcagaggatgcagccgttcctgcccagaagctgaggaacaatggcatctctgtcttggtcgtgggcgtggggcctgtcctaagtgagggtctgcggaggcttgcaggtccccgggattccctgatccacgtggcagcttacgccgacctgcggtaccaccaggacgtgctcattgagtggctgtgtggag

SEQ ID NO: 4636 - DNA, 159 bp, Homo sapiens
ggggaagtggagtttgctcgcatcatgaccatggtggaccccaacgcagctggggtggtgaccttccaggccttcatagacttcatgacccgagagacagccgagactgacacgactgagcaagttgtagcttccttcaagatcttggcaggagacaag

SEQ ID NO: 4637 - DNA, 231 bp, Homo sapiens
ctgctggagtggatccgccgcactgtcccatggctggagaaccgtgtgggtgagcccagcatgagtgccatgcagcgcaaactagaggactttcgggactaccggcgtctgcacaagccgccccgcattcaggaaaagtgccagctggagatcaacttcaacacactgcagaccaagttgcggctcagccaccggcctgccttcatgccctccgagggcaagctggtctcg

SEQ ID NO: 4638 - DNA, 286 bp, Homo sapiens
atgagcccagcggtctcaggactgtccagggcccatctgcttccctccgtcaccctgtccacccacagatttgtcatgttgagcctggagtttgactacatgtgccagtatgactatgttgaggttcgtgatggagacaaccgcgatggccagatcatcaagcgtgtctgtggcaacgagcggccagctcctatccagagcataggatcctcactccacgtcctcttccactccgatggctccaagaattttgacggtttccatgccatttatgaggagatcacag

SEQ ID NO: 4639 - DNA, 441 bp, Homo sapiens
gccgggcagcacgagccacagtgcacgtgcagctgcaggaccagaacgaccacgccccgagcttcacattgtacaactaccgtgtggctgtgactgaagacctgccccctggctccactctgctcaccctggaggctacagatgctgatggaagccgcagccatgccgctgtggactacagcatcatcagtggcaactggggccgagtcttccagctggaacccaggctggctgaggctggggagagtgctggaccaggcccccgggcactgggctgcctggtgttgcttgaacctctagactttgaaagcctgacacagtacaatctaacagtggctgcagctgaccgtgggcagccaccccaaagctcagtcgtgccagtcactgtcactgtactagatgtcaatgacaacccacctgtctttacccgagcatcctacc

SEQ ID NO: 4640 - DNA, 386 bp, Homo sapiens
gtatgattttgtggaagttgaagatatatccgaaaccagtaccattattagaggacgatggtgtggacacaaggaagttcctccaaggataaaatcaagaacgaaccaaattaaaatcacattcaagtccgatgactactttgtggctaaacctggattcaagatttattattctttgctgagagcaatcacctcacagacttgtaccgaagagatgagaccatccaggtgaaaggaaacggctacgtgcagagtcctagattcccgaacagctaccccaggaacctgctcctgacatggcggcttcactctcaggagaatacacggatacagctagtgtttgacaatcagtttggattagaggaagcagaaaatgatatctgtag

SEQ ID NO: 4641 - DNA, 124 bp, Homo sapiens
tttcccttcagagcactttggcaagctctttgggctggtgatggccttgtcggctgtggtgtctctgctccagttccccatcttcaccctcatcaaaggctcccttcagaatgacccattttac

SEQ ID NO: 4642 - DNA, 802 bp, Homo sapiens
aacaacgactacctcgcgaaagttgcattccagaaccagaccagcacacagaacgcgatcatcaacgttgcggcctatcggtatttcgctaaacccagctcagaagctggcttccctggtcccgggtaaaggggctatttggctcgacatcaggtacatgggcctgatgcacatcgcgcagcagtctggcgccattaagtggtgccagtcggctattgttggaagaaacgcccagttccgccgcgaggggctcgataagccgccgatccacatctacaaggactttgatactgaagagcagcgcggggacattgtaggggcgtatgtaacggtaaaaactgacgatggtgattaccttacccatacgatgggcatcgatgccatctactccatccgtgaccggtctgaagcatggaagaagtacaaatctgacaacagcaagaagtgtccatgggtcaccgatgaagagcagatgatcctaaagacggtcgtgaagcaggcagcaaaatactggcctcgacgtgagcgcctggatgccgccatcgaccatgttaataccgagggtgaggaaggtatcaacttctcagcagaacgccagccagaacgcgatgtaaccccagcaggagacgaaattatcaaggagattaacgacgtccttatcgcaatggataagacatgggaagaaaacctgctcccagtctgttcgcaaattttccgtcgtgatattcgcgattcatccgagcttacccaagccgaggcagttaaggccttaggcttcctcaagaagaaggcggcagcatga

SEQ ID NO: 4643 - DNA, 348 bp, Homo sapiens
gtccgggccagcgccattgctcaggacgcggaccagaactacgactacgccagcaacagcgtcattctgcacctggacgtgggcgacgaggtcttcatcaagctggacggcgggaaagtgcacggcggcaacaccaacaagtacagcaccttctccggcttatcatctaccccgactgagccggccccgccccgtgcccccgctcgccccttctctcccgtcctcacccacctcctgcccggcccacccgaggcgccaccccaccctttgagagccctgcggtggggtggacccttccgttcccgttggcggcctaaatgggcgaactcttggtgctcaagggtataa

SEQ ID NO: 4644 - DNA, 582 bp, Homo sapiens
gttttctgggtagggcccatcgtgggggcggtcctggctgccatcctttacttctacctgctcttccccaactccctgagcctgagtgagcgtgtggccatcatcaaaggcacgtatgagcctgacgaggactgggaggagcagcgggaagagcggaagaagaccatggagctgaccacccgctgactcaacaacaacacaacgcagggccaggccatggtggtggagctgattctgaccttccagctggcactctgcatcttcgcctccactgactcccgccgcaccagccctgtgggctccccagccctgtccattggcctgtctgtcaccctgggccaccttgtcggaatcgcgctggcgtttggcctggccataggcacgctggcccaggccctgggacccgtgagcggcggccacatcaaccccgccatcaccctggccctcttggtgggcaaccagatctcgctgctccgggctttcttctacgtggcggcccagctggtgggcgccattgccggggctggcatcctctacggtgtggcaccgctcaatgcccggggcaatctggccgtcaacgcg

SEQ ID NO: 4645 - DNA, 220 bp, Homo sapiens
gcagtgactggctgtgaggactgcctggctgccctgctggaccacgacgcatttgtgctgtgccgagactttaagggccgcacgcccattcacctggcctcagcctgtggccacactgcagtactgcggaccctgctgcaggctgccctttccacagatcccctggatgccggggtggattacagcggatactcgcccatgcactgggcctcctacactg

SEQ ID NO: 4646 - DNA, 260 bp, Homo sapiens
acggtcctgctcaccttccaggcccaacctcgtctccctggacctgggcttcaacgacctgacagacctgcagagcatggtcaccagcctgaggaccctccggcacctgcgactcctggtgctgcagggaaacccactggccttggtgccctactaccgcggcctcaccatcgacagcctggcccagctctgcgtgctggacgacatcaccgtgtctcccaatgagaagcatctcttccgggggctcagcctcaatggcg

SEQ ID NO: 4647 - DNA, 157 bp, Homo sapiens
gacgtggacaatgcctacatgataaaggtggagttgcagtccaaggtggacctgctgaaccaggaaattgagtttctgaaagttctctatgatgcggtatgaggatgaaatcaataagcgcacagctgctgagaatgattttgtgacgcttaaaaag

SEQ ID NO: 4648 - DNA, 115 bp, Homo sapiens
gtttgatgggtacttgtttctacttaaatgtctgtatcatattgcacctggccaagttcactgctatatctgtcccggaaggggaaaaaacagagtccttcacttctagtacaag

SEQ ID NO: 4649 - DNA, 326 bp, Homo sapiens
gtatttgcctggggttataataactctgggcaggtaggatctggatcaacagttaatcagccaatccctcgaagagtcactggctgcctacaaaataaagtagttgtgaccatagcatgtgggcagatgtgctgcatggcagtagtagacacgggggagaaggagaagtctttacctggggtcataatgcttatagccagctgggcaatgggacaactaatcatggtttagtgccctgtcatatctctactaatctgtcaaacaaacaagtcattgaagttgcctgtgggtcttaccattctttggtgctaacatctgatggagag

SEQ ID NO: 4650 - DNA, 131 bp, Homo sapiens
gactgctagacttggctacattttatagagaaaatcgtttgaaaaagctctgccaacaaactatcaagcaaggcatctgcgaggagaatgccatcgctctgctctcggctgcggtgaagtatgatgcacag

SEQ ID NO: 4651 - DNA, 115 bp, Homo sapiens
actctgttacggcatggtgcaaatccagatctgagagatgaagatgggaaaactccattagataaagctcgagaaaggggccatagtgaagtggtagctattcttcagtctccag

SEQ ID NO: 4652 - DNA, 124 bp, Homo sapiens
accacagctgagagttttagagaaaaggcgctttcggcaagtgcaaagtggtattgtcatgttgctactggagctgtctgtgacagccaagaaaataggacagaatcaaaaggaagtaaaataa

SEQ ID NO: 4653 - DNA, 180 bp, Homo sapiens
gtccctgcagtccccagcggcttctgaactggatgctggccttggcttgccagcgagggcacctgggggttgtgaagctcctggtcctgacgcacggggctgacccggagagctacgctgtcaggaagaatgagttccctgtcatcgtgcgcttgcccctgtatgcggccatcaagtcag

SEQ ID NO: 4654 - DNA, 326 bp, Homo sapiens
attattgctccccctgagcgtaaatactctgtctggattgggggctccatcctggcctctctgtccaccttccagcaaatgtggattagcaagcaagagtacgatgaggcaggcccatccattgtccaccgcaaatgcttctaagtatggaatctgctggcatccatgaaacaacttacaatagcatcatgaagtgtgacattgatatccgcaaggacctgtatgccaacaatgtcttatctggaggcaccactatgtaccctggtattgctgatcgtatgcagaaggaaatcactgctctggctcctagcaccatgaagattaag

SEQ ID NO: 4655 - DNA, 220 bp, Homo sapiens
gtatatgatcgagatttaaccacatctgatttcatgggttctgcatttgtcattctcagtgatcttgagcttaacaggcacaagtgatccttatgtgaaatttaagctgaatgggaagacgctgtacaaaagtaaagtcatatataagaacttgaacccagtatgggatgagatagttgtattgccaatccaaagccttgatcaaaagctacgtgtgaag

SEQ ID NO: 4656 - DNA, 416 bp, Homo sapiens
gcaatgttgcctggatgcacgtgctggcagcccgggagctggagcagcgggcaaccctgatgggcggccaggtatacttctgctacgatggatcaccctacaggagctacgaggatttcaacatggagttcctgggcccctgcggactgcggctggtgggcgcccgcccattgctgccctactggctgctggtgttcctggctgccctcaatgccctgctgcagtggctgctgcggccactggtgctctacgcacccctgctgaacccctacacgctggccgtggccaacaccaccttcaccgtcagcaccgacaaggctcagcgccatttcggctatgagcccctgttctcgtgggaggatagccggacccgtaccattctctgggtacaggccgctacgggttcagcccagtga

SEQ ID NO: 4657 - DNA, 180 bp, Homo sapiens
tacgacaggacagaaaccgcgatcaacaacctcaaccccgccttctccaagaagttcgtgcttgactaccacttcgaggaggtacagaagctcaagttcgcgctctttgaccaggacaagtccagtatgcggctggacgagcatgacttcctgggccagttctcctgcagcctgggcacg

SEQ ID NO: 4658 - DNA, 402 bp, Homo sapiens
tcgaagaggcaaagtacaacctgtgcaaagtgaggaaggtgactatggggatgaagggaatccaacgcctggtgactcatgatactggaactatccactacccagatcctgtcatcaagatggcctggggccctaaggagcacttgaagcgtgctgcagtgccgaagcattggatgctcgacaaactaaagggtatatttgcacctcgtccatcgacaggtccccacaagctgagggaatgtcttccgctgatcgtcttcctcaggaatagactcaagtatgcattgaccggagatgacgtaaaggagatatgtatgcaatgcttcattaaaattgatggcaaggttcgagtggctatcacataccctgctggattcacggatgtcatcggcatcaagacag

SEQ ID NO: 4659 - DNA, 340 bp, Homo sapiens
ggccaggcctgcaggctgcaaggcaaggaggatgcccaggactttgaggggctgctgaaggcactgcaggggctcggcttgtgcccagaggagttgaatgccgtctgggctgtgctggccgccatcctgcagctgggcaacatctgcttctcctcctcagaggcccaggctgagcggagcttccatgttttttacaagctgctggcagggctggactccatagagcgggagcggctctccctgcagggaccggagacttactactacctcaaccagaggggtcatcgtgggagcctctgtgtctcattatctacttgagacctccagggtggtgtttcag

SEQ ID NO: 4660 - DNA, 203 bp, Homo sapiens
gaacaaggctggcgggctgcccggaacctgggcccgtgtagtggcagccctgctgctgctggctgttggctgctccctggctgtgaggcagctccagaatcagggcaggtcgacaggaagcttgggctctgtggcccctccacccggcggacactcccacggccctggcgtataccaccacggtgccatcatcagccctgcag

SEQ ID NO: 4661 - DNA, 512 bp, Homo sapiens
gagatgcttgctctgagaggtcagaccggcggagatgtgaacgtggagatggatgctgcacctggcgtggacctgagccgcatcctgaatgagatgcgtgaccagtacgagcagatggcagagaaaaaccgcagagacgctgagacctggttcctgagcaagcatgcgggctggggggcggctatggcggtggcttcagcagcagcagcagctttggtagtggcttcaggggaggatatggtggtggccttggtgctggcttcggtggtggcttgggtgctggctttggtggtggttttgctggtggtgatgggcttctggtgggcagtgagaaggtgaccatgcagaacctcaatgaccgcctggcctcctacctggacaaggtgcgtgctctggaggaggccaacgccgacctggaagtgaagatccgtgactggtaccagaggcagcggcccagtgagatcaaagactacagtccctacttcaagaccatcgaggacctgaggaacaag

SEQ ID NO: 4662 - DNA, 608 bp, Homo sapiens
attctcacagccacagtggacaatgccaatgtccttctgcagattgacaatgcccgtctggccgcggatgacttccgcaccaaatgaccacctgcagccgccagttcacctcctccagctccatgaagggctcctgcggcatcgggggcggcatcgggggcggctccagccgcatctcctccgtcctggccggagggtcctgccgcgcccccagcacctacgggggcggcctgtctgtctcatcctcccgcttctcctctgggggagcctgcgggctggggggcggctatggcggtggcttcagcagcagcagcagcagctttggtagtggctttgggggaggatatggtggtggccttggtgctggcttgggtggtggctttggtggtggctttgctggtggtgatgggcttctggtgggcagtgagaaggtgaccatgcagaacctcaatgaccgcctggcctcctacctggacaaggtgcgtgctctggaggaggccaacgccgacctggaagtgaagatccgtgactggtaccagaggcagcggcctgctgagatcaaagactacagtccctacttcaagaccattgaggacctgaggaacaag

SEQ ID NO: 4663 - DNA, 146 bp, Homo sapiens
ctatgatcgcaacaccttggtggccatcgtggtgggtgtggggcgcctcatcactggcatggaccgaggcctcatgggcatgtgtgtcaacgagcggcgacgcctcattgtgcctccccacctgggctatgggagcatcggcctgg

SEQ ID NO: 4664 - DNA, 345 bp, Homo sapiens
  misc_feature (5)..(5): n is a, c, g, or t
ccgtncaagttcaagaccacccacgcgccgcctggggacacgctggtgcacctcggcgacgtgctctccaccctctacttcatctcccgaggctccatcgagatcctgcgcgacgacgtggtcgtggccatcctaggaaagaatgacatctttggggaacccgtcagcctccatgcccagccaggcaagtccagtgcagacgtgcgggctctgacctactgcgacctgcacaagatccagcgggcagatctgctggaggtgctggacatgtacccggcctttgcggagagcttctggagtaagctggaggtcaccttcaacctgcgggacgtgagtcagggccag

SEQ ID NO: 4665 - DNA, 233 bp, Homo sapiens
ggcgagctgcatgtctccaaactcttcaaccatcccaatatcgtgccatatcgagccacttttattgcagacaatgagctgtgggttgtcacatcattcatggcatacggttctgcaaaagatctcatctgtacacacttcatggatggcatgaatgagctggcgattgcttacatcctgcagggggtgctgaaggccctcgactacatccaccacatgggatatgtacacag

SEQ ID NO: 4666 - DNA, 411 bp, Homo sapiens
ggctcggtgaaagaccagttgaaggcttacggtgctctgacagagagcgtgacccgaaagtacacgcggcagatcctggagggcatgtcctacctgcacagcaacatgattgttcaccgggacattaagggaggtgagtgctctggagtgcgagatccagttgctaaagaacttgcagcatgagcgcatcgtgcagtactatggctgtctgcgggaccgcgctgagaagaccctgaccatcttcatggagtacatgccagggctcccagtgcccccatcaactggcgccggggaaagctcctgggccagggtgccttcggcagggtctatttgtgctatgacgtggacacgggacgtgaacttgcttccaagcaggtccaatttgatccagacagtcctgagacaagcaag

SEQ ID NO: 4667 - DNA, 563 bp, Homo sapiens
aggagcacctagtgctgctgaccaaggcccccctgaaccccaaggtcaacagagagaagataactcagatcatgtttgagacctttaacacctgggccatgtacgtggccatccaggccatgctgtccctctacacctctgggcacaccactggcattgtcctggactctggagatggggtcacccacatggtgcccatctacaagggctataccctcccccatggcatcctgtgtcgacctggctggccaggacctgactaccccatgaaaatcctcaccaagcttggctacagcttgatcaccacggccgagtgggagatcatgcatgacaaggagaagctgtgttgcccttcgagcaggagatggccaccgccgcatcctcctcctccctggagaatagctgtgaggatgcagaaggagatcactgccctggtgcccagcaccacgaagatcaagatcattgtgccccgccccaagcacaggtactcagtgtggatcggcagttccatcctggcctcactgtctaccttccagcagatgtggatcagcaagcaggagtaa

SEQ ID NO: 4668 - DNA, 215 bp, Homo sapiens
gcaggcaatccaggcagtcgttaaaaacacagagagaggtgtcctcctgaccacccataacctggctgaggcggaagccttgtgtgaccgtgtggccatcatggtgtctggaaggcttagttgtgttttgtgctgagcctcctgggaaactcacctgtcttgctcctggatgaaccatctacgggcatagaccccacagggcagcagcaaatgtg

SEQ ID NO: 4669 - DNA, 156 bp, Homo sapiens
ctccaggctgccagtctcctatttgtggataatcccgtgggcactgggttcagttatgtgaatggtagtggtgcctatgccaaggacctggctatggtggcttcagacatgatggttctcctgaagaccttcttcagttgccacaaagaattccag

SEQ ID NO: 4670 - DNA, 381 bp, Homo sapiens
gaacgcatcttcctgaccctctccaattacatcttcaccgcagtctttctggctgaaatgacagtgaaggtggtggcactgggctggtgcttcggggagcaggcgtacctgcggagcagttggaacgtgctggacgggctgttggtgctcatctccgtcatcgacattctggtgtccatggtctctgacagcggcaccaagatcctgggcatgctgagggtgctgcggctgctgcggaccctgcgcccgctcagggtgatcagccgggcgcaggggctgaagctggtggtggagacgctgatgtcctcactgaaacccatcggcaacattgtagtcatctgctgtgccttcttcatcattttcggcatcttgggggtgcag

SEQ ID NO: 4671 - DNA, 445 bp, Homo sapiens
attctggatgaggctctgaagatctgcaactacatcttcactgtcatctttgtcttggagtcagttttcaaacttgtggcctttggtttccgtcggttcttccaggacaggtggaaccagctggacctggccattgtgctgctgtccatcatgggcatcacgctggaggaaatcgaggtcaacgcctcgctgcccatcaaccccaccatcatccgcatcatgagggtgctgcgcattgcccgaggtggggaacctgggacttctcttcatgttgttgtttttcatctttgcagctctgggcgtggagctctttggagacctggagtgtgacgagacacacccctgtgagggcctgggccgtcatgccacctttcggaactttggcatggccttcctaaccctcttccgagtctccacaggtgacaattggaatggcattatgaag

SEQ ID NO: 4672 - DNA, 354 bp, Homo sapiens
gacaccctccgggactgtgaccaggagtccacctgctacaacacggtcatctcgcctatctactttgtgtccttcgtgctgacggcccagttcgtgctagtcaacgtggtgatcgccgtgctgatgaagcacctggaggagagcaacaaggaggccaaggaggaggccgagctagaggctgagctggagctggagatgaagaccctcagcccccagccccactcgccactgggcagccccttcctctggcctggggtcgagggccccgacagccccgacagccccaagcctggggctctgcacccagcggcccacgcgagatcagcctcccacttttccctggagcaccccacg

SEQ ID NO: 4673 - DNA, 172 bp, Homo sapiens
gcatcaagcatgatggaaccatgtgtgatacctgccgccagcaaccaatcattggcattcgatggaagtgtgcagagtgtacaaattatgatttgtgcacagtgtgttatcatggagataaacatcatttaagacatcgcttttaccgaattactacaccgggaagtgagag

SEQ ID NO: 4674 - DNA, 1197 bp, Homo sapiens
atggagtcggggctgctgcggccggcgccggtgagcgaggtcatcgtcctgcattacaactacaccggcaagctccgcggtgcgcgctaccagccgggtgccggcctgcgcgccgacgccgtggtgtgcctggcggtgtgcgccttcatcgtgctagagaatctagccgtgttgttggtgctcggacgccacccgcgcttccacgctcccatgttcctgctcctgggcagcctcacgttgtcggatctgctggcaggcgccgcctacgccgccaacatcctactgtcggggccgctcacgctgaaactgtcccccgcgctctggttcgcacgggagggaggcgtcttcgtggcactcactgcgtccgtgctgagcctcctggccatcgcgctggagcgcagcctcaccatggcgcgcagggggcccgcgcccgtctccagtcgggggcgcacgctggcgatggcagccgcggcctggggcgtgtcgctgctcctcgggctcctgccagcgctgggctggaattgcctgggtcgcctggacgcttgctccactgtcttgccgctctacgccaaggcctacgtgctcttctgcgtgctcgccttcgtgggcatcctggccgctatctgtgcactctacgcgcgcatctactgccaggtacgcgccaacgcgcggcgcctgccggcacggcccgggactgcggggaccacctcgacccgggcgcgtcgcaagccgcgctcgctggccttgctgcgcacgctcagcgtggtgctcctggcctttgtggcatgttggggccccctcttcctgctgctgttgctcgacgtggcgtgcccggcgcgcacctgtcctgtactcctgcaggccgatcccttcctgggactggccatggccaactcacttctgaaccccatcatctacacgctcaccaaccgcgacctgcgccacgcgctcctgcgcctggtctgctgcggacgccactcctgcggcagagacccgagtggctcccagcagtcggcgagcgcggctgaggcttccgggggcctgcgccgctgcctgcccccgggccttgatgggagcttcagcggctcggagcgctcatcgccccagcgcgacgggctggacaccagcggctccacaggcagccccggtgcacccacagccgcccggactctggtatcagaaccggctgcagactga

SEQ ID NO: 4675 - DNA, 867 bp, Homo sapiens
atgaagcgctatctaattgctcatcagcgaactcatagtggagagaaaccttatgtgtgcaaagaatgtggaaaaggtttcactgtgaagagcaatctcattgtacatcagcgaactcatacaggggagaaaccctatatatgcagtgaatgtggaaaaggcttcaccatgaagcgctatcttgttgtacatcagcgaactcatactggagagaaaccctatatgtgcagtgaatgtggaaaaggctttaccgtgaagagcaatctcattgtacatcagcgctcccacacaggagaaaaatcttacatatgcagcgaatgtggaaaaggcttcactgtcaaacgcactctcgttatacatcagcgaactcatacaggagagaaatcttacatatgcaatgaatgtggtaaaggcttcaccacaaagcgcactcttattatacatcagcgaactcatacaggagaaaaaccctatgaatgcaatgaatgtggtaaagccttcagccagaaaatatgcctcatacaacatgagagatgtcatacaggaaagactccctttgtatgtaccgagtgcggaaaatcctattcacacaaatatggcctcattacccatcagagaattcacacaggagagaaaccttatgagtgcaatgaatgtggaaaagccttcaccacaaagtcagtactcaatgtacatcaaagaacgcatacaggagagaggccgtatggatgcagtgattgtgagaaagccttctcccacttatcaaaccttgtcaaacataagaaaatgcacacaagagaaatgggtagaatcagtcaagttgaaaactcctgtaatggagagtcacagctccttccttataagtga

SEQ ID NO: 4676 - DNA, 392 bp, Homo sapiens
gccaactgcattgactccacagcctcagccgaggccgtgtttgcctccgaagtgaaaaagatgcaacaggagaacatgaagccgcaggagcagttgacccttgagccatatgaaagagaccatgccgtggtcgtgggagtgtacagcaatggtggatgtgatctttgctgatgtggcccagccagaccagacccggattgtggccctgaatgcccacaccttcctgcgtaatggaggacactttgtgatttccattaaggatggtctagtctatgcagtcgagttctcccaccgctctggccgtgacctcattaacttggccaagaagaggaccaacatcattcctgtgatcgaggatgctcgacacccacacaaataccgcatgctcatcg

SEQ ID NO: 4677 - DNA, 249 bp, Homo sapiens
gtgttcgaggaggccaacacgctggaccaggacttggaggtcgagggagactcggactggccaggacctggtggggtctgggggccctgggcacccagtagcctccccacttccacagagttggagtgggatccggcgggggacattgggggccttgggcccttgggacaaaagacagcccggacactaggagtgccctgtgagctgtgtggccagagggggccccagggcaggggacaaggccttgag

SEQ ID NO: 4678 - DNA, 235 bp, Homo sapiens
gcatcgcccacagggacctaaagccggaaaacatcctctgtgagcaccccaaccaggctccatcctgagccacatccacaagcgccggcacttcaacgagctggaggccagcgtggtggtgcaggacgtggccagcgccttggactttctgcataacaaaggaacgtcctagagctgattgagttcttcgaggaggaggaccgcttctacctggtgtttgagaagatgcggggag

SEQ ID NO: 4679 - DNA, 279 bp, Homo sapiens
atggtcctgaccaagtgcacatcaccagggagtcggcatctgagatgatcagcaccatagaggcagagctcaactccagcctgaccctgcagtgttgggccgagtccaagccaggtgctgagtatcgctggactcttgaacactccaccggggagcacctgggtgagcagctgattatcagggctctgacctgggaacacgacgggatctacaactgcacagcctccaactctctcactggcctggcccgctccacttcagtcctggtcaaggtggtag

SEQ ID NO: 4680 - DNA, 116 bp, Homo sapiens
ggcaggcatccctcatcgacctcctggtttccaagggcgccatggtaaatgccacagactaccatggagccactccgctccacctggcctgtcagaagggctaccagagcgtgacg

SEQ ID NO: 4681 - DNA, 166 bp, Homo sapiens
caaaatcttaaaaatttgaaaagtcttgacctgtttaactgtgagatcacaaacctggaagattatagagaaagtatttttgaactactgcagcaaatcacatacttagatggatttgatcaggaggataatgaagcgccggactctgaagaggaggatgatgagg

SEQ ID NO: 4682 - DNA, 228 bp, Homo sapiens
ggttcttgtggtgcttgctgggctttcagtgctgtgggggccctggaagcacagctgaagctgaaaacaggaaagctggtgtctctcagtgcccagaacctggtggattgctcaactgaaaaatatggaaacaaaggctgcaatggtggcttcatgacaacggctttccagtacatcattgataacaagggcatcgactcagacgcttcctatccctacaaagccatg

SEQ ID NO: 4683 - DNA, 108 bp, Homo sapiens
aaaaaagcttggccagaccacaagcgggaatgcaaatgccttaaaagctgcaaacccagatatcctccagactccgttcgacttcttggcagagttgtcttcaaactt

SEQ ID NO: 4684 - DNA, 231 bp, Homo sapiens
cttttggaatggattcgtcgcacgatcccctggctggagaaccggactcccgagaagaccatgcaagccatgcagaagaagctggaggacttccgggattaccgccggaagcacaagccacccaaggtgcaggagaaatgccagctggagatcaacttcaacacgctgcagaccaagctgcggatcagcaaccgtcctgccttcatgccctccgagggcaagatggtgtcg

SEQ ID NO: 4685 - DNA, 485 bp, Homo sapiens
gacccaagcccgcacccagcctggcccggctgctgcggagcacccggggcaggaacgcaggggccaacctgggcgcggaggcgcgcggagggtgccgcggcccgccaggcccgggacccgtagcttcgccgtggctggccggggcggcaaggaggcccaagccatggaatcggaggaggagcagcacatgaccacgctgctgtgcatgggcttctcagaccccgccaccatccgcaaggccctgcgcctggccaagaacgacattaacgaggccgtggcactgctcaccaacgagcggccgggcctcgactacggcggctacgagcccatggacagcggcggtggccccagccccgggcccggcgggggccccggggcgacggcggaggtgacggcggcggcggcggcccctcccgcggcgggagcaccggagcgggggcggcttcgaccccccgcccgcctaccacgaggtggtggacgcggag

SEQ ID NO: 4686 - DNA, 806 bp, Homo sapiens
cgcgcaccagggcctgggagttgcccgggggctgcacgcggccacttcctcatgcggcccccgacggccccacctctggccgccagcggatcctagagcagctggacgagctcatcacggacctggtcatcgacttgcgaccccccgccggccaggcctcagagccggcagcccactgcctgggcccccaactgcgccaactgctggactcgcggcccgcgggctccggggcccccgcgctggtgccgccacactcgcccccagcctccaccggcatcacccaggagcccgcggccccgggagaggcggctgacatgtccccggaacccagcgccgacgaagacgacctgatgacctgctccagtgcgcgctgctggcacacagagaccatgttcaacgcctgcctctacgtcaagtcctgccacagctgctacacctactactgctcacgcctgtgccgcggcgaggactgggacgtccacaaggcgcgctgcgtgtacggccgcgtgggcagcgtgtgccgccacatgctgcagttttgctgtgacagtggcccggtgcacctcgctttctcgcccatggctcgtgtgggtttcctgtcgcgcaggcgcagcgtgctcttcctgggcttcccaagtccaggctcagctgaaaacttcctgtgctttggcctggaggggctgctgctatccccctcccaactatcgcagtgtgagctggccacacacgcggcgcccctgggcagctacatacgcgagctggcagccgctgggcgcctctacgagccggcagagcttcctgcttag

SEQ ID NO: 4687 - DNA, 333 bp, Homo sapiens
gtaaggagtgccaatggacggatgcctgcctgtctcatccctgtgcaaatggaagtacctgtaccactgtggccaaccagttctcctgcaaatgcctcacaggcttcacagggcagaaatgtgagactgatgtcaatgagtgtgacattccaggacactgccagcatggtggcacctgcctcaacctgcctggttcctaccagtgccagtgccctcagggttcacaggccagtactgtgacagcctgtatgtgccctgtgcccctcaccttgtgtcaatggaggcacctgtcggcagatggtgacttcacttttgagtgcaactgccttccag

SEQ ID NO: 4688 - DNA, 345 bp, Homo sapiens
gtctcctgtgtcatctggatgatgcatgcatcagcaatccttgccacaagggggcactgtgtgacaccaaccccctaaatgggcaatatatttgcacctgcccacaaggctacaaaggggctgactgcacagaagatgtggatgaatgtgccatggccaatagcaatccttgtgagcatgcaggaaaatgtgtgaacacggatggcgccttccactgtgagtgtctgaagggttatgcaggacctcgttgtgagatggacatcaatgagtgccattcagacccctgccagaatgatgctacctgtctggataagattggaggcttcacatgtctgtgcatgccag

SEQ ID NO: 4689 - DNA, 330 bp, Homo sapiens
gaacctttactggacagactggaacagagataaccccaagattgaaacttcctacatggacggcacgaaccggaggatccttgtgcaggatgacctgggcttgcccaatggactgaccttcgatgcgttctcatctcagctctgctgggtggatgcagatcttggaagtccagaaggtatcgctgttgatcaccttggccgcaacatcttctggacagactctaacctggatcgaatagaagtggcgaagctggacggcacgcagcgccgggtgctctttgagactgacttggtgaatcccagaggcattgtaacggattccgtgagagg

SEQ ID NO: 4690 - DNA, 127 bp, Homo sapiens
gctaaagtcatcattggactggcctttgactgcgtggacaagatggtttactggacggacatcactgagccttccattgggagagctagtctacatggtggagagccaaccaccatcattagacaag

SEQ ID NO: 4691 - DNA, 761 bp, Homo sapiens
gtcaaatgcggtctggataaagaaacaccaaatcagaagaccggccataatcttcaagttaaaaatgaagataaagggacaaaggcatggacaccatcatgtttaaggggacgtgctgatcccaacttgaatgctgtaaaaattgaaaagttatctgatgatgaagaagtagacatcacagatgaggtggacgagttgtcttctcaaacaccccagaagaattctagcagtgatctcttgttagactttcctaatagtaaaatgcatgaaaccaatcaaggagaattcattacttctgacagccaggaagctctcttttctaagtcttccaggggctgtcttcaaaatgaaaagcaagatgaaacactttcaagctcagaaattacactgtggactgagaaacagagcaatggtgacaaaaaatcaattgaattaaatgaccagaaatttaatgaattgattaaaaactgcaacaagcatgatggaaggggaataatagttgatgccaggcagttgccttctccagagccttgtgaaattcagaaaaatttgaatgataatgaaatgctttttcattcttgccaaatggtagaggaaagccatgaggaagaagagcttaagccaccagaacaggaaatagaaatagatagaaatatcattcaagaagaagaaaaacaagcaattcctgagttttttgaggggcgccaagctaaaacaccagaacgctatttgaaaattagaaattatattttggatcaatg

SEQ ID NO: 4692 - DNA, 259 bp, Homo sapiens
gtattttgaaggtggcgtctcatctgtctacctctgggatctggatcatggctttgctggagtgatcctcataaagaaggctggagatggatcaaagaagatcaaaggctgctgggattccatccacgtggtagaagtgcaggagaaatccagcggtcgcaccgcccattacaagttgacctccacggtgatgctgtggctgcagaccaacaaatctggctctggcaccatgaacctcggaggcagccttaccagacag

SEQ ID NO: 4693 - DNA, 143 bp, Homo sapiens
atggagaaggatgaaactgtgagtgactgctccccacacatagccaacatcgggcgcctggtagaggacatggaaaataaaatcagaagtacgctgaacgagatctactttggaaaaacaaaggatatcgtcaatgggctgag

SEQ ID NO: 4694 - DNA, 147 bp, Homo sapiens
atgggaaccaacaaatgtgccagccaggcaggtatgacagcttacgggactaggaggcatctttatgatcccaaaatgcaaactgacaaaccttttgaccagaccacaattagtctgcagatgggcactaataaaggagccagccag

SEQ ID NO: 4695 - DNA, 540 bp, Homo sapiens
ccttatcagcactggtcatgtctaaaggtcatagtattgaggaagttcctgaacttcctttggtagtcgaagataaagttgaagggtacaagaagaccaaggaggctgtttcgcttcttaagaaatttaaagcctggaatgatatcaaaaaggactatgcctctcagcgaatgagagctggcaagggcaaaatgagaaaccgtcattgtatccagtgcacaggcccctacatcatctataatgaggataatggtatcatcaaggccttcagaaacatccctggaattactctgcttaatatggcatgtgctcgcctactaatatcggtgtactctgaaagtggggagtcatctggcaaaaatgtcactttgcctgctgtattcaaggctcctattcgaccagatattgtgaactttgttcacaccaacttgcacaaaaacaacagacagccctatgctgtcagtgaattagcaggtcgtcagaccagtgctgaatcttggggtaccggcagagctgtggctcaaattcccagagttcaag

SEQ ID NO: 4696 - DNA, 464 bp, Homo sapiens
gatggttctgtgcattgctaccgatgactcccactccctgagctgcctgagcctaaagtttggagtgtcactgaaatcctgcagacacctgcttgaaaatgcgaagaagcaccatgtggaggtggtgggtgtgagttttcacattggcagtggctgtcctgaccctcaggcctatgctcagtccatcgcagacgcccggctcgtgtttgaaatgggcaccgagctgggtcacaagatgcacgttctggaccttggtggtggcttccctggcacagaaggggccaaagtgagatttgaagagattgcttccgtgatcaactcagccttggacctgtacttcccagagggctgtggcgtggacatctttgctgagctggggcgctactacgtgacctcggccttcactgtggcagtcagcatcattgccaagaaggaggttctgctagaccagcctggcagggagg

SEQ ID NO: 4697 - DNA, 449 bp, Homo sapiens
atgggacctaaagacagtgccaagtgcctgcaccgtggaccacagccgagccactgggcagccggtgatggtcccacgcaggagcgctgtggaccccgctctctgggcagccctgtcctaggcctggacacctgcagagcctgggaccacgtggatgggcagatcctgggccagctgcggcccctgacagaggaggaagaggaggagggcgccggggccaccttgtccagggggcctgccttccccggcatgggctctgaggagttgcgtctggcctccttctatgactggccgctgactgctgaggtgccacccgagctgctggctgctgccggcttcttccacacaggccatcaggacaaggtgaggtgcttcttctgctatgggggcctgcagagctggaagcgcggggacgacccctggacggagcatgccaagtggttccccag

SEQ ID NO: 4698 - DNA, 175 bp, Homo sapiens
atgggccccccgagcctcgtgctgtgcttgctgtccgcaactgtgttctccctgctgggtggaagctcggccttcctgtcgcaccaccgcctgaaaggcaggtttcagagggaccgcaggaacatccgccccaacatcatcctggtgctgacggacgaccaggatgtggagctgg

SEQ ID NO: 4699 - DNA, 120 bp, Homo sapiens
gtgctggtgatcagcctctacttcctcaggtatatccaggaaagttggctggagaaccatggtcagtatccgtccttggagtttgtggctctgttgtatgccttgcatacctgtgaccag

SEQ ID NO: 4700 - DNA, 379 bp, Homo sapiens
atggcctgcctgccgggggcccctgctgtggcctggtggcttccgaccgtggcctgcctgccggggcccctcctgtggcctggtggcttccggaccgtggcctgcctgccagggcccctgctgtggcctggtggcttctggaccgtggcctgtctgccggggcccctgctgtggcctggtggcttctggaccgtggcctgcctgccggggcccctgctgtggtctggtggcttccgacggtggcctgccggcttccgacggtggcctgcctgccggggcccctgctgtggcctggtggcttctggacgtgacagcccagccatggtcctgctggacatttgtttcctgggagaattcttggaggcctggtctctggtcc

SEQ ID NO: 4701 - DNA, 243 bp, Homo sapiens
gaaaccagcaaacgtctcgccaaccagatcccatttataattcagtattttatgctccgagagaatggtgactccttgcagaaagccatgatgcagatactacaggaaaaaaatcgctattcctggctgcttcaagagcagagtgagaccgctaccaagagaagaatccttaaggagagaatttaccggctcactcaggcgcgacacgcactctgtcaattctccagcaaagagatccactga

SEQ ID NO: 4702 - DNA, 409 bp, Homo sapiens
aggaagaccttaggattgttgagcctcttaaagatattgaaacaatggagaagaaatctgtcacattctggtgcaaggtgaatcgtctcaatgtaacactgaagtggaccaaaaatggtgaagaagtgccttttgacaaccgtgtctcatacagagttgataagtacaagcacatgttaaccattaaagactgtggcttcccagatgaaggtgaatacattgtcactgctggacaagataaatctgttgctgagcttctcatcatagaagccccgacagaatttgtggaacacttggaagatcagacagtcactgagttcgatgacgctgtcttctcctgccagctctccagagagaaagccaatgtaaaatggtacagaaatgggagagaaatcaaagaaggcaaaaa

SEQ ID NO: 4703 - DNA, 187 bp, Homo sapiens
atccacctggtcctccaactcgcctagaaccttctgatatcactaaagacgcagtgactctcacatggtgtgagccagatgatgatggtggcagcccaatcacaggatactgggttgaaagactggatcctgatacagataaatgggttagatgcaataagatgccagtaaaggacacaacatacag

SEQ ID NO: 4704 - DNA, 318 bp, Homo sapiens
atcctcctgatcctcctattaaactcaagattggcctcatcacaaagaacacagtgcatctgtcatggaaacccccgaagaatgatgggggctcccctgttacccactatattgttgagtgccttgcatgggaccctactgggacaaagaaagaagcctggaggcagtgcaataagcgtgatgtggaagaactgcaatttactgttgaagacctagtagagggtggggaatatgaattccgagtcaaagctgtcaatgctgcaggagtcagcaagccttcagccactgttggccctgtgactgtcaaagaccagacat

SEQ ID NO: 4705 - DNA, 243 bp, Homo sapiens
tctatgatggtggtgcaccgatcattggatatgttgtggaaatgagaccaaaaatagcagatgcgtctcctgatgaaggctggaaacggtgtaatgctgcagcacagcttgtacgcaaggaattcactgttaccagcttggatgaaaaccaggaatatgagttcagggtgtgtgcccaaaaccaagttggtattgggcgccctgcagagctaaaggaagctatcaaacctaaagaaatactag

SEQ ID NO: 4706 - DNA, 285 bp, Homo sapiens
aacctccggagattgatttggatgccagcatgaggaaactggtcatagtgagagcaggatgccctattcgtctctttgctatagtgagaggacgaccagcccctaaagtcacttggcgaaaagttggcattgataatgtggtcagaaaaggacaagttgatctggttgacactatggccttccttgtcatccccaattctacccgtgatgactcaggaaaatattccttaacacttgtgaacccagcaggagaaaaggctgtattcgtaaatgtcagagtattag

SEQ ID NO: 4707 - DNA, 303 bp, Homo sapiens
gtgagccggatcccccaaggaaattagaagtgactgaaatgaccaagaacagtgccaccttagcctggttacctcccctacgtgatggaggtgctaaaatcgatggctacatcactagttacagagaagaagagcagcctgcagatcgctggacagagtactcagtggtaaaagatctgagccttgttgtcactggcctaaaggaaggaaagaaatacaaatttagagtagcggccagaaatgctgttggagtcagtttgccaagagaagctgaaggagtgtatgaagccaaagaacaactgt

SEQ ID NO: 4708 - DNA, 160 bp, Homo sapiens
cccctaaagacaatgaagagcgtgtgttcagggaacgcatgcggccgaggaagcggcagggggccgtcaggcgcagggtccatcaggtcaacggccacaagttcatggccacctatcttcggcagcccacctactgctcccattgcagagacttcatctg

SEQ ID NO: 4709 - DNA, 159 bp, Homo sapiens
ttgaccactgaaaaacacacatactatctgactgcagattctcccaatatattggaagagtggattaaagtgttacagaatgttcttcgagtacaagctgccaacccactttccctgcagcctgagggcaaacccaccatgaagggattgctcactaag

SEQ ID NO: 4710 - DNA, 202 bp, Homo sapiens
cttctcaaaagtgaaataagaagattggaaaggaatcaagagcaagaggagtctgcagctaacgtggaacacttgaagaacgtcttgctgcagttcattttcttgaagccaggtagtgaaagagagagacttcttcctgttataaatacgatgttgcagctcagccctgaagaaaagggaaaacttgctgcggttgctcaag

SEQ ID NO: 4711 - DNA, 415 bp, Homo sapiens
gaaaatggactcagacttctcacatgccttccagaaggaactcacctgcgtcatctgtttgaactacctggtagaccctgtcaccatctgctgtgggcacagcttctgtaggccctgtctctgcctttcgtgggaggaagcccaaagtcctgcaaactgccctgcatgcagggaaccatcaccgaaaatggacttcaaaaccaatattcttctgaagaatttagtgaccattgccagaaaagccagtctctggcaattcctgagctctgagaaacaaatatgtgggacccataggcaaacaaagaagatgttctgtgacatggacaagagtctcctctgcttgctgtgctccaactctcaggagcacggggctcacaaacaccatcccatcgaagaggcagctgaggaacaccgg

SEQ ID NO: 4712 - DNA, 522 bp, Homo sapiens
cattacatattacaaaaaccatgaaaaatatcgaggtgcctgagaccaaaactgcctcttttgagtgtgaggtgtcccacttcaatgtcccttccatgtggctgaagaatggtgtggaaattgagatgagtgaaaagttcaagatagttgtgcagggaaaactccatcagctgatcatcatgaacaccagcacagaggactcggcagaatacacatttgtctgtggcaatgaccaagtcagtgccaccctgacagtcacccctgtcaagatcattaaaaagccaaaggatgtgacagccttggaaaatgccactgttgcctttgaagttagtgtttcccatgacactgttccagtaaaatggttccataagagtgtggaaattaagccaagtgacaaacacagactggtctcagaaaggaaagtccacaagctgatgctgcagaacatctccccctcagatgctggggaatacacagctgtggtcgggcaattggaatgcaaagcaaaactgtttgtggaga

SEQ ID NO: 4713 - DNA, 259 bp, Homo sapiens
ggcttaaaaaatgtgactgtcatagaaggtgaatctgtcaccttggagtgccacatctctggatacccatccccgacagtgacatggtacagggaagactaccaaatcgaaagttccattgacttccagataaccttccagagtggaattgctcgtcttatgattcgcgaagcatttgcggaagacagcgggcgatttacttgcagtgctgtaaatgaggctggaaccgtcagcacatcctgctatctggctgtgcagg

SEQ ID NO: 4714 - DNA, 560 bp, Homo sapiens
  misc_feature (473)..(473): n is a, c, g, or t
atgtccatgctgcccaccttcggcttcacgcaggagcaagtggcgtgcgtgtgcgaggtgctgcagcagggcggcaacatcgagcggctgggccgcttcctgtggtcgctgcccgcctgcgagcaccttcacaagaatgaaagcgtgctcaaggccaaggccgtggtggccttccaccgcggcaacttccgcgagctctacaagatcctggagagccaccagttctcgccgcacaaccacgccaagctgcagcagctgtggctcaaggcacactacatcgaggcggagaagctgcgcggccgacccctgggcgccgtgggcaaataccgcgtgcgccgcaaattcccgctgccgcgctccatctgggacggcgaggagaccagctactgcttcaaggaaaagagtcgcagcgtgctgcgcgagtggtacgcgcacaacccctacccttcaccccgcgagaagcgtgagctggncggaggcacgggcctcaccaccacacaggtcagcaactggttcaagaaccggcggcagcgcgaccgggcggccgaggccaaggaaag

SEQ ID NO: 4715 - DNA, 162 bp, Homo sapiens
gcatcgtcctggattcaggtgatggcgtcacccacaatgtccccatctatgaaggctatgccctgccccatgccatcatgcgcctggacttggctggccgtgacctcacggactacctcatgaagatcctcacagagagaggctattcctttgtgaccacag

SEQ ID NO: 4716 - DNA, 130 bp, Homo sapiens
caatgcaaacctcacaagaggcctgtgtgtggcagtaatggcaagacctacctcaaccactgtgaactgcatcgagatgcctgcctcactggatccaaaatccaggttgattacgatggacactgcaaag

SEQ ID NO: 4717 - DNA, 567 bp, Homo sapiens
gctccaccgctgaggctgcccgcatcatctaccccccagaggcccaaaccatcatcgtcaccaaaggccagagtctcattctggagtgtgtggccagtggaatcccacccccacgggtcacctgggccaaggatgggtccagtgtcaccggctacaacaagacgcgcttcctgctgagcaacctcctcatcgacaccaccagcgaggaggactcaggcacctaccgctgcatggccgacaatggggttgggcagcccggggcagcggtcatcctctacaatgtccaggtgtttgaaccccctgaggtcaccatggagctatcccagctggtcatcccctggggccagagtgccaagcttacctgtgaggtgcgtgggaaccccccgccctccgtgctgtggctgaggaatgctgtgcccctcatctccagccagcgcctccggctctcccgcagggccctgcgcgtgctcagcatggggcctgaggacgaaggcgtctaccagtgcatggccgagaacgaggttgggagcgcccatgccgtagtccagctgcggacctccaggccaa

SEQ ID NO: 4718 - DNA, 389 bp, Homo sapiens
ccccagaagctcccgacaggcccaccatctccacggcctccgagacctcagtgtacgtgacctggattccccgtgggaatggtgggttcccaatccagtccttccgtgtggagtacaagaagctaaagaaagtgggagactggattctggccaccagcgccatccccccatcgcggctgtccgtggagatcacgggcctagagaaaggcacctcctacaagtttcgagtccgggctctgaacatgctgggggagagcgagcccagcgccccctctcggccctacgtggtgtcgggctacagcggtcgcgtgtacgagaggcccgtggcaggtccttatatcaccttcacggatgcggtcaatgagaccaccatcatgctcaagtggatg

SEQ ID NO: 4719 - DNA, 123 bp, Homo sapiens
gggacaagtactggcactccatcagccacctgcagccagagacctcctacgacattaagatgcagtgcttcaatgaaggaggggagagcgagttcagcaacgtgatgatctgtgagaccaaag

SEQ ID NO: 4720 - DNA, 213 bp, Homo sapiens
atgaagtccctcgtcctgctcctttgtcttgctcagctctggggctgccactcagccccacatggcccagggctgatttatagacaaccgaactgcgatgatccagaaactgaggaagcagctctggtggctatagactacatcaatcaaaaccttccttggggatacaaacacaccttgaaccagattgatgaagtaaaggtgtggcctcag

SEQ ID NO: 4721 - DNA, 919 bp, Homo sapiens
agagtgtgggcgaggctttcgtgctaaatcaactctcctcctacaccagtggacacattcagaggtgaaacctcacgtgtgtgaggagtgtgggcatggatttagccagaagtcgtcgctcaaatcacatcggagaacacactcaggggagaagccttatgtgtgtggggaatgtgggcggggatttagccggaggatagtcctcaatggacactggaggacacacacgggagagaagccttacacgtgctttgagtgtgggcgaaactttagcctcaagtccgctcttagtgtacatcagaggatacactctggggagaagccttatgcatgcacggagtgtgggcaaggctttatcacgaaatcacagctcatcagacaccagaggacacacacaggagaaaagccttatgtctgcggagagtgtgggcgaggctttatagctcagtcaaccctccactaccaccggagtacacactccaaggaaaaaccttatgtgtgcagccagtgtgggcgaggcttttgtgataaatcaactctcctcgcacacgagcagacacattcaggggagaagccttatgtgtgtggggaatgtgggcggggatttggccggaagatactcctcaacagacactggaggacacacacaggagagaaaccttacgcatgcatcgagtgtgggcgaaactttagccacaagtccactctcagcttacatcagaggatacactcgggggagaagccttatgcatgcgtggagtgtgggcaaagctttaggagaaagtcacagctcatcatacaccagaagatacactcggggaaaagctttagaggtgcaaggagtgaggatgtgattttagcaacaagtcagccatcagccacaccagcggaaatgcttagggagaagccttgtttgtaa

SEQ ID NO: 4722 - DNA, 316 bp, Homo sapiens
ttgttacaggaagcaagtgtcaaaactgctttcaccagaaaatgtggggaaacagacagcttttgctgctcccgagtgtgaaatgattccaactgaatgggtttgcagaagaatagcaactgattcttttttcaaaagaaatcctgatgacaaggaaggatataagttttacccacctaaagtggagatgtttttcaaggatgatgccagtaatgacccagagtcatctgaggaacagctaattgctccaaaattttgctttggtgaacttctcataggccaaactgaagtggatatcatgtcatatactacatag

SEQ ID NO: 4723 - DNA, 150 bp, Homo sapiens
gcaacatcaggaacactgagaagctgagctatgacaaacaacaccagtatgagatcctggtgaccgcctacgactgtggacagaagcccgctgctcaggacaccctggtgcaggtggatgtgaagccagtttgcaagcctggctggcaag

SEQ ID NO: 4724 - DNA, 635 bp, Homo sapiens
cgtggggagcagataaactctggcctctaccgctgcatgaagtcaatcccgcacgagtggtcgtggcgcaggatggtacgccgctctggcgcttcgccgatgctgacggcatctggcgttatccggtaacaatcgaagatgtttctccacgttaccttgaagcgctgatcaattatgaagatcgctggttctggaagcatccgggggtgaatccattctcggtggcgcgcgcagcatggcaagatctcacttcgggacgggttatttccggtggcagcacgctcactatgcaggttgctcgtctgcttgatcctcaccccaaaacatttggcggcaaaattcgccagctctggcgcgcgttgcaactggaatggcatctgtctaagcgtgaaattctgaccttgtatcttaaccgcgctccgtttggcggtacgttgcaggggatcggtgcggcaagttgggcttatctcggaaaatcgcctgcgaatttaagctattccgaggcggcaatgctggcggttttgccgcaagcgcccagccgtcttcgcccggatcgttggccggagcgtgccgaagccgcgcgtaataaagtgctcgaacggatggccgtgcaaggtgtgtggtcccgtgagcag

SEQ ID NO: 4725 - DNA, 313 bp, Homo sapiens
gtccgggacactctgatgctggcagacaagcccttcttcctggtgctggaggaagatggcacaactgtagagacagaagagtacttccaagccctggcaggggatacagtgttcatggtcctccagaaggggcagaaatggcagcccccatcagaacaggcatgtgtcagtgcgtacctctgtggtgacccagcagctgctgtcggagcccagccccaaggcccccagggcccggccctgccgcgtaagcacggcggatcgaagcgtgaggaagggcatcatggcttacagtcttgaggacctcctcctcaag

SEQ ID NO: 4726 - DNA, 143 bp, Homo sapiens
gtcaaagtggaaaaccactacgacttccaggacattgccagcgtggtggctctcacccagacctatgccactgcagagcctttcattgactccaagtatgacatccgggtccagaagattggcaacaactacaaggcttacat

SEQ ID NO: 4727 - DNA, 209 bp, Homo sapiens
atggtgtgaatgtagatacccaccacatccctgttaatgtgacactgcgtcgaattgcacatggagcagatgctgttgcagcccggtgggatttcgatttgctgaacggacaaggaggctggaagtcagatgggtgccatatactctattcagatgaaaatatcactacgattcagtgctactcccttagtaactatgcagttttaatg

SEQ ID NO: 4728 - DNA, 290 bp, Homo sapiens
atgcaagtaaaactggtgaaagattcagaatatccttttaaagcacaaaatggtctgtgccattacttttctggttcacattctggattttcaatcaaaggttattctgcatatgacttcagtgtggaggatgctgggccttcagcgtggtgggggcagtggaatctgcttatgcaataaaggggaagcccctggaagacctaagtgtccagcaggtcattgactgttcgtataataattatggctgcaatggaggctctactctcaatgctttgaactggttaaacaag

SEQ ID NO: 4729 - DNA, 207 bp, Homo sapiens
gcattgccgtctgcaacgtgcccgcggcgtctgtggaggagacggccgactcgacgctgtgccacatcctgaacctgtaccggcgggccacctggctgcaccaggcgctgcgggagggcacacgagtccagagcgtcgagcagatccgcgaggtggcgtccggcgctgccaggatccgcggggagaccttgggcatcatcggacttg

SEQ ID NO: 4730 - DNA, 885 bp, Homo sapiens
atgacaacgctcccgccttcacccaaacctcctacaccctgtttcgtccgcgagaacaacagccccgccctgcccatcggcagcgtcagcgccacagacagagactcaggcaccaacgcccaggtcacctactcgctgctgccgccccaggacccgcacctgcccctcacatccctggtctccatcaacgcggacaacggccacctgttcgccctcaggtcgctggactacgaggccctgcgggagttcgagttccgcgtgggcgccacagaccgcggctccccggcgctgagcagcgaggcgctggtgcgcgtgctggtgctggacgccaacgacaactcgcccttcgtgctgtacccgctgcagaacggctccgcgccctgcaccgagctggtgccccgggcggccgagccgggctacctggtgaccaaggtggtggcggtggacggcgactcgggccagaacgcctggctgtcgtaccagctgctcaaggccacggagcccgggctgttcggcgtgtgggcgcacaatggcgaggtgcgcaccgccaggctgctgagcgagcgcgacgtggccaagcacaggctagtggtgctggtcaaggacaatggcgagcctccgcgctcggccaccgccacgctgcaagtgctcctggtggacggcttctctcagccctacctgccgctcccagaggcggccccggcccaagcccaggccgactcgcttaccgtctacctggtggtggcattggcctcggtgtcttcgctcttcctcttctcggtgttcctgttcgtggcagtgcggctgtgcaggaggagcagggcggcctcagtgggtcgctgctcggtgcccgagggcccctttccagggcatctggtgacgtga

SEQ ID NO: 4731 - DNA, 1433 bp, Homo sapiens
ccaagacagctagccagccaagccagtcaagccacccagccggacaagccggccaagccagccagccagccaagccggccaagcctgccagccagccaagccggccaaaccaggcaagccagccaatccagccaagcctgccagagagccaatccagccaagcctgccagagagccaagccagccaagccagccaagccacccagccagccaagtcagccagccacccagccagccaagccagccagccacccaggctggccaagccagacagccagccaagccggccaagccacccagccagccaagccggtcaagccacctagtcagccaagccagccatgccagccagccagccaagacagccagccagccaagccacccaagccacccagccagccaagcgagccagccatgctagccaagccagccagccagccaagccatccaggccagccaatccagccaagcctgccagccagccaaggtagccaagccagccattccagccaagcctgccagccagccaagccagccaagccagccagccagccagccaagccagccaagccacccagccagccaatccagccaagcctgccagccagccaaggtagccaagccggccagccagccaagccagccaagccacccagccagccaagccagccaagccagccagccaaccaagccagccaagccagccattccaaccaagcctgccagccagccaagccagccaagccagccattccagccaagcctgccagccagccaagcctacccaagccagccaagccagccagccatccaagccagcctagccacccagcctgccaagccagtcaagccacccagccagccaagccagccagccacccagccagccaagccagccagccacccaggctagccaagccagccagccaaccaagccggccaagccaagccagccagccagccggccaagccagccaaacagtccagcaagccaagccagccaagccaatcagtccagcgaagccaccagtccagccaagccagccaagccacccagccagccaagccagccaagccacacagccagccaagacacccagccagccaagcccgccagccacccatgcagccaagccagccaggccagccatgccagccaagagcatgccatgccatgccaagccaaccaagccacccagccagccaggccagccagccagccagccagccagcacaggtcaggcagccaagccagtgggccgcccagccagccaagccagccaagccacccagccagcaaagccagccaagccactcagccagccaagctgccagccacccaacaggcaagccgcgaagccaccatgccatcagccagccaagccgcagcagccagccgccacagccgccagccacagcgccgatggtgagtga

SEQ ID NO: 4732 - DNA, 511 bp, Homo sapiens
gtgtggtcctgcagacctggcttctgaaccgctaccgcatggtgcagctggagcccattgaccaggtggtcctgtcctacgggggcctgcgcggggccgtggcctttgccctggtggtgcttctggatggagacaaggtcaaggagaagaacctgttcgtcagcaccaccatcatcgtagtgttcttcaccgtcatcttccaggcgccaggccgtggggggctgggcggacacgggggcctcgggcgccaggccaggtggccgtgtcctgaggcgcgtctgtccctgcagcatcaccttctgtggcatctgctgtcagaagtatgtgaaggccaacatctcggagcagtcggccaccaccgtgcgctacaccatgaagatgctggccagcagcgccgagaccatcatcttcatgttcctgggtatctcggccgtgaacccgttcatctggacctggaacacggccttcgtgctcctgacgctggtcttcatctccgtgtaccgggccatcg

SEQ ID NO: 4733 - DNA, 241 bp, Homo sapiens
gcggcccctggcaaggaagggcccggaaggccggcacggccacaaagggcgtcctctacccagtgtccttcttcgtggtgagcctggggggcacgctggtgggggtggtcttcgccttcctgctgtcgctggtgacgcgcttcaccaagcatgtgcgtatcatcgagcccggcttcgtgttcatcatctcctacctgtcctacctgacgtccgagatgctgtcgctgtcggccatcctcgc

SEQ ID NO: 4734 - DNA, 197 bp, Homo sapiens
gttctgtacaatgtgtttgaatctttcgtggcgctgggaggtgacaacgtgactggcgtggactgcgtgaagggcatagcctcatggcggctgtggacccggtggccgtcctggccgtgtttgaggaggtccatgtcaacgaggtcctgttcatcatcgtcttcggggagtcgctgctgaacgacgcagtcaccgtg

SEQ ID NO: 4735 - DNA, 2388 bp, Homo sapiens
atggagactgcgctagcaaaaacgccacagaaaaggcaagttatgtttcttgctatattgttgcttttgtgggaggctggctctgaggcagttaggtattccataccagaagaaacagaaagtggctattctgtggccaacctggcaaaagacctgggtcttggggtgggggaactggccactcggggcgcgcgaatgcattacaaaggaaacaaagagctcttgcagcttgatataaagaccggcaatttgcttctatatgaaaaactagaccgggaggtgatgtgcggggcgacagaaccctgtatattgcatttccagctcttactagaaaatccagtgcagttttttcaaactgatctgcagctcacagatataaatgaccatgccccagagttcccagagaaggaaatgctcctaaaaatcccagagagcacccagccagggactgtgtttcccttaaaaatagcccaggactttgacataggtagcaacactgttcagaactacacaatcagcccaaattcacactttcatgttgctacgcataatcgcggagatggcagaaaatacccagagctggtgctggacaaagcgctggaccgggaggagcggcctgagctcagcttaacactcactgcactggacggtggggctccgcccaggtccgggaccaccacaattcgcattgtcgtcttggataataatgacaacgcccccgaatttttacaatcattctatgaggtacaggtgcccgagaacagcccccttaactccttagttgtcgttgtctccgctcgagatttagatgcaggagcatatgggagtgtagcctatgctctattccaaggcgatgaagttactcaaccatttgtaatagacgagaaaacagcagaaattcgcctgaaaagggcattggatttcgaggcaactccatattataacgtggaaattgtagccacagatggtgggggcctttcaggaaaatgcactgtggctatagaagtggtggatgtgaatgacaacgcccctgaactcaccatgtctacgctctccagccctaccccagaaaatgccccggaaactgtagttgccgttttcagtgtttctgatccagactccggggacaacggtaggatgatttgctccatccagaatgatctcccctttcttttgaagcccacattaaaaaacttttacaccctagtgacacagagaacactggacagagagagccaagccgagtacaacatcaccatcactgtcaccgacatggggacacccaggctgaaaaccgagcacaacataacggtcctggtctccgacgtcaatgacaacgcccccgccttcacccaaacctcctacaccctgttcgtccgagagaacaacagccctgccctgcacatcggcagtgtcagcgccacagacagagactcaggcaccaacgcccaggtcacctactcgctgctgccgccccagaacccacacctgcgcctcgcctccctggtctccatcaacgcggacaacggccacctgtttgccctcaggtcgctggactacgaggccctgcaggcgttcgagttccgcgtgggagccacagaccgcggctccccggcgctgagcagcgaggcgctggtgcgcgtgctggtgctggacgccaacgacaactcgcccttcgtgctgtatccgctgcagaacggctcggcgccttgcaccgagctggtgccccgggcggccgagccgggctacctggtgaccaaggtggtggcggtggacggtgactcgggccagaacgcctggctgtcgtaccagctgctcaaggccacggagcccgggctgttcagcatgtgggcgcacaatggcgaggtgcgcaccgccaggctgctgagcgagcgcgacgcggccaagcacaggctggtggtgctggtcaaggacaatggcgagcctccgcgctcggccaccgccacgctgcacgtgctcctggtggacggcttctcccagccctacctgccgctgccggaggcggccccggcccaggcccaggccgactcgctcactgtctacctggtggtggcattggcctcggtgtcgtcgctcttcctcttttcggtgctcctgttcgtggcagtgcggctgtgcaggaggagcagggcggccccggtcggtcgctgctcggtgcccgagggcccctttccagggcatctggtggacgtgagcggcaccgggaccctatcccagagctaccactacgaggtgtgtttgaccggagactcaggggccggcgagttcaagttcctgaagccgattattcctaaccttttgccccagggcgctggtgaagaaatagggaaaactgctgccttccggaatagctttggattaaattag

SEQ ID NO: 4736 - DNA, 181 bp, Homo sapiens
atcatcctgaatgaccgaaccatccatgtgaagcatgacttcacctccggagtgaatgtggagaatgcggcccacccctgtgtgagagccccttgtgcccatgggggcagctgccggcccaggaaggagggctatgactgtgactgccccttgggctttgaggggcttcactgccagaaag

SEQ ID NO: 4737 - DNA, 2244 bp, Homo sapiens
gaggctaaacatggcaacttcgtgggccgcatcgcgcaggacctggggctggagctggcggagctggtgccgcgcctgttccgggcggtgtgcaaattccgtggggatcttctggaggtaaatctgcagaatggcattttgtttgtgaattctcggatcgaccgcgaggagctgtgcgggcggagcgcggagtgcagcatccacctggaggtgatcgtggaaaggccgctgcaggttttccatgtggacgtggaggtgaaggacattaacgacaaccctccggtgttcccagcgacacaaaggaatctgttcatcgcggaatccaggccgcttgactctcggtttccactagagggcgcgtccgatgcagatatcggggagaacgccctgctcacttacagactgagccccaatgagtatttcttcctggacgtgccaaccagcaaccagcaggtaaaacctcttggacttgtattacggaaacttttagacagagaagaaactccggagcttcatttattgctcacggccaccgatggaggcaaacccgagctgactggcaccgttcaattactcatcacggtactggacaacaatgacaatgccccagtgttcgacagaaccctgtatacggtgaaattaccagaaaacgtttctatcggaacgctggtgattcaccccaatgcctcagatttagacgaaggcttgaatggggatattatttactccttctccagtgatgtttctccagatataaaatccaagttccacatggaccccttaagtggggcaatcacagtgataggacatatggattttgaagaaagtagagcacacaagatcccagtcgaggctgtcgataaaggcttcccacccctggctggtcattgtacagttcttgtggaagttgtggatgtaaatgacaatgctccacagttgactctcacttccctgtctctccctattccagaggacgcccaaccaggtaccgtcatcacattgattagcgtgtttgaccgagattttggagtcaacggacaggttacctgctccctgacgccccgcgttcccttcaagttggtgtccaccttcaagaattactattcattggtgctggacagcgctctggaccgcgagagtgtgtccgcctatgagctggtggttaccgcgcgggacgggggctcgccttctctgtgggccactgctagcgtgtccgtggaggtggccgacgtgaacgacaacgccccggcgttcgcgcagcccgagtatacggtgttcgtgaaggagaacaacccgccgggctgccacatcttcactgtgtcggcgggggacgcggacgcgcagaagaacgcgctggtgtcctactcgctggtggagctgcgggtgggcgagcgcgcgctgtcgagctacgtgtcagtgcacgcggagagcggcaaggtgtacgcgctgcagccgttggaccacgaggagctggagctgttgcagttccaggtgagcgcgcgcgatgcgggcgtgccgcctctgggcagcaacgtgacgctgcaggtgttcgtgctggacgagaacgacaacgcgccggcactgctggcgcctcgggtgggtggcactggtggcgcagtgagagagcttgtgccgcggtctgtgggcgcgggccatgtggtggcgaaggtacgtgcagttgacgctgactcaggctacaacgcgtggctttcgtatgagttgcaaccggtggcggccggtgcgagcatcccgttccgcgtggggctgtacactggtgagatcagcacgacacgagccctagatgagacggacgcaccgcgccaccgccttctggtgcttgtgaaggaccacggggagccctcgctgacagccacagccaccgtgctggtgtcgctggtggaaagcggccaggcaccaaaggcgtcgtcgcgggcatcgttgggcattgcaggcccagagaccgagctggtggatgtcaacgtgtacctgatcatcgccatctgcgcggtgtccagtctgttggtgcttaccctgctgctgtacacggcgttgcggtgctcagcgccgtcctctgagggcgcatgtagtttggtaaagcccactctggtgtgctccagcgcggtggggagctggtcattctcccagcagaggcggcagagggtgtgctctggggagggcccacccaagacagacctcatggccttcagtcccagccttcctcagggtccatcctctacagacaat

SEQ ID NO: 4738 - DNA, 660 bp, Homo sapiens
atggcctcagcaggactccagctccttgctttcatcctggccttatctggggtctctggagtgctcacagccactctgctgcccaactggaaggtgaatgtggatgtggactccaacatcataacagccattgtacagctgcacgggctctggatggactgtacgtggtacagcactgggatgttcagctgtgccctgaaacactccattctgtccctccccatccacgtgcaggctgcgagagccaccatggtcctggcgtgtgttctgtctgctttggggatctgcacttccacagtaggaatgaaatgtactcgcttaggaggggacagagaaaccaagagccatgcttcctttgctggaggagtctgtttcatgtctgcaggaatctctagtttaatctcgacagtgtggtacacaaaggagatcatagcaaactttctggatctgacagttccagaaagcaacaaacatgaacctggaggagctatctatatcggattcatttctgcaatgctgttgtttatctctggcatgattttctgcacctcctgtataaaaaggaatccagaagctagactcgacccacccacacagcagcctatctctaacacacagctcgagaacaattccacacacaatctgaaggattatgtgtaa

SEQ ID NO: 4739 - DNA, 436 bp, Homo sapiens
gagccgaggtccaaggagggcagtgactactttgacagtcgctctgatggactgaatacagatgtgcagggatcctcccaggcatctgcttttctgtggtcagggggctctactcagatcctgtctcagagaagtgaatccacacatgcgattggcagcgatcccctccggcagaacatttatgagaatttcatgcgagagttggaaatgagcaggaccaacactgagaacatagaaacatctacagaaaccgccgagtccagcagcgagtcactcagctctctggaacagctggatctgctctttgagaaggaacagggggtggtccggaaggccgggtggctcttcttcaagcccctggtcactgtgcagaaggaaaggaagcttgagctggtggcacgaaggaaatggaaacagtactgggtaacgctgaaag

SEQ ID NO: 4740 - DNA, 228 bp, Homo sapiens
atgtccctccctaagccctggtctctcttgcctcctgcagggctggtgaattaccagatctccatcaagtgcagtaaccagttcaagttggaagtgtgtcttttgaatgcagaaaacaaagtcgtggacaaccaggctgggacccagggccagctgaaggtgctgggtgccaacctctggtggccgtacctgatgcacgaacaccccgcctacctgtactcgtgggag

SEQ ID NO: 4741 - DNA, 172 bp, Homo sapiens
tttttgagagtggatcaagataaagacaaggattgtagcttggactgtgcgggttcgccccagaaacctctctgcgcatctgacggaaggaccttcctttcccgttgtgaatttcaacgtgccaagtgcaaagatccccagctagagattgcatatcgaggaaactgcaaag

SEQ ID NO: 4742 - DNA, 546 bp, Homo sapiens
ggtctcacaccctccagggaatgaatggctgcgacatggggcccgacggacgcctcctccgcgggtatcaccagcacgcgtacgacggcaaggattacatctccctgaacgaggacctgcgctcctggaccgcggcggacaccgtggctcagatcacccagcgcttctatgaggcagaggaatatgcagaggagttcaggacctacctggagggcgagtgcctggagttgctccgcagatacttggagaatgggaaggagacgctacagcgcgcaggctcccactccttgaggtatttcagcaccgctgtgtcgcggcccggccgcggggagccccgctacatcgccgtggagtacgtagacgacacgcaattcctgcggttcgacagcgacgccgcgattccgaggatggagccgcgggagccgtgggtggagcaagaggggccgcagtattgggagtggaccacagggtacgccaaggccaacgcacagactgaccgagtggccctgaggaacctgctccgccgctacaaccagagcgaggctg

SEQ ID NO: 4743 - DNA, 657 bp, Homo sapiens
ccccagaagaggacacaccagccccagagttagccccagaggcccctgagcctcctgaagagccccgcctaggagtgctgaccgtgaccgacacaaccccagactccatgcgcctctcgtggagcgtggcccagggcccctttgattccttcgtggtccagtatgaggacacgaacgggcagccccaggccttgctcgtggacggcgaccagagcaagatcctcatctcaggcctggagcccagcaccccctacaggttcctcctctatggcctccatgaagggaagcgcctggggcccctctcagctgagggcaccacagggctggctcctgctggtcagacctcagaggagtcaaggccccgcctgtcccagctgtctgtgactgacgtgaccaccagttcactgaggctcaactgggaggccccaccgggggccttcgactccttcctgctccgctttggggttccatcaccaagcactctggagccgcatccgcgtccactgctgcagcgcgagctgatggtgccggggacgcggcactcggccgtgctccgggacctgcgttccgggactctgtacagcctgacactgtatgggctgcgaggaccccacaaggccgacagcatccagggaaccgcccgcaccctcagcccag

SEQ ID NO: 4744 - DNA, 282 bp, Homo sapiens
tacctccagaggtaactgtgctcacgaacagccctgtggaactgagagagcccaacgtcctcatctgtttcatagacaagttcaccccaccagtggtcaatgtcacgtggcttcgaaatggaaaacctgtcaccacaggagtgtcagagacagtcttcctgcccagggaagaccaccttttccgcaagttccactatctccccttcctgccctcaactgaggacgtttacgactgcagggtggagcactggggcttggatgagcctcttctcaagcactggg

SEQ ID NO: 4745 - DNA, 588 bp, Homo sapiens
gatcactatggaaaagcctttagcgtgcgctcaaccctcactgtgcatgaaagaatccacactggtgagaagccttatacttgtaatgagtgtaagaaagccttcagtgtaagggcacacctgattatacatcagagaatccacaatggagagaaaccctatgaatgtaatgagtgtggcaaagcatttagtgtgagctcagaccttatcaaacatcagagaatccatactggtgagaaaccttatgagtgtgatgagtgtggaaaagctttcagtgtgagctcagccctcatcaagcatcagagaatccatacaggagaaaagccgtatgagtataaggaatgtgggaaggccttctatgtgaactcagcacttattaatcaccagaggattcactctggagaaaagccctatgagtgtggagagtgtggaaaagcattcagccagatctcaacgcttattcatcaccagagaatccatactggagagaaaccgtatgagtgtgaagagtgtgggaaagctttccatgggagttctaaccttactaaacaccagaaaacacatgccaaaggaaagtgtcatcagtga

SEQ ID NO: 4746 - DNA, 148 bp, Homo sapiens
ccacccagtgtaagcatggtgctgtgtacgatacctgtggtccgggatgtatcaagacgtgtgacaactggaatgaaattggtccatgcaacaagccgtgcgttgctgggtgccactgtccagcaaacttggtccttcacaagggaag

SEQ ID NO: 4747 - DNA, 419 bp, Homo sapiens
agggcagctatctgcatatggaatcgaacagcttccaccgtgggggagtggcccgcctgctcagccccgacctatgggagcaaggccccctctgtgtgcactttgcccaccacatgttcgggctgtcttggggcgcccagctcaggctgctgctgctctcgggtgaagagggccgccgccccgatgtgctctggaaacactggaacacccagagaccctcctggatgctcaccaccgtcactgtgcccgcagggttcaccctgcccacccggatgtcctcacccagtgtgattttgaggatgacgccaaacccctctgtgactggtcccaagtgtccgcagacgatgaagactgggttcgagccagtgggccctctcccaccggctccaccggggcccccggggggtaccctaacggag

SEQ ID NO: 4748 - DNA, 770 bp, Homo sapiens
ggctttctctacgtgctgttgtctcactgggtttttgtcggagccccacgccctccggcctctgattcctggaagaaagggttggtcccctcagcacccccagcatcccggaaaatggggagcaaggctctgccagcgcccatcccgctccacccgtcgctgcagctcaccaattactccttcctgcaggccgtgaacaccttcccggccacggtggaccacctgcagggcctgtacggtctcagcgcggtacagaccatgcacatgaaccactggacgctggggtatcccaatgtgcacgagatcacccgctccaccatcacggagatggcggcggcgcagggcctcgtggacgcgcgcttccccttcccggccctgccttttaccacccacctattccaccccaagcagggggccattgcccacgtcctcccagccctgcacaaggaccggccccgttttgactttgccaatttggcggtggctgccacgcaagaggatccgcctaagatgggagacctgagcaagctgagcccaggactgggtagccccatctcgggcctcagtaaattgactccggacagaaagccctctcgaggaaggttgccctccaaaacgaaaaaagagtttatctgcaagttttgcggcagacactttaccaaatcctacaatttgctcatccatgagaggacccacacggacgagaggccgtacacgtgtgacatctgccacaaggccttccggaggcaagatcacctgcgggatcacag

SEQ ID NO: 4749 - DNA, 567 bp, Homo sapiens
gttttgatctgctaacacctgtaatgactactgtatccattaagaacgtgattacagggacatctcaggttgactgtgctgtcctgattgttgctgctggtgttggtgaatttgaagctggtatctccaagaatgggcagaccagtgagcatgcccttctggcttacacactggatgtgaaacaactaattgttggtgttaacaaaatggattccactgagccaccctgcagccagaagagatatgaggaaatcgttaaggaagtcagcacttacattaagaaaattggctacaaccccaacacagtagcatttgtgccaatttctggttggaatgatgacaacatgctggaggcaactgctaacgtgccttcgttcaagggatggaaagtcacctgtaaagatggcaatgccagtggaaccacgctgcttgaggctctggactacatcctaccaccatctggtccaactgacaagcccttgcgcctgcctctccaggatgtccacaaaattggtggcattggtactgtacttggtggtcaagtgaagactggtgttctcaaacccg

SEQ ID NO: 4750 - DNA, 1625 bp, Homo sapiens
atggaagctgtctggcgtggggactctctggcgtgggggccatctggcgtggatgccgtccgatgtggggactgtccagcgtggaagctgtctggtgtggaagctgtccgatatggggactgtctggtgtggaagctgtctggtgtggggagtgtctggtgtggggactgtctggtgtggaaactgtctggtatggggactgtccggtgtggggacagtctggtgtggggactgtctgatgtggggactgttttgtgtggggactgcctggtgtggaagctgtctggtgtggggactgtccgctgtgggtactgtctggtgtggaagctgtctggtgtgggtactgtccggtgtggggactgtctggtgtggggactgtctggtgtagggactgtctggtgtggggactgtctggtgtggaagctgtctggtgtgggactgtctgctgtggggactgtctgctgtggaagctgtctggtgtggggagtgtctggtgtggaagctgtctggtgtggggactgtctggtgtggaaactgtctggtgtggggactgtccggtgtggaagctgtccgatatggggactgtctggtgtggaagctgtctggtgtggggagtgtctggtgtggaagctgtctggtgtgggactgtctgctgtggggactgtctggtgtggaagctgtctggtgtggggactgtccgctgtgggtactgtctggtgtggaaactggtgtggggactgtccggtgtggggactgtctggtgtggggactgtccggtgtggaagctgtctggtgtggaagctgtctggtgtggggactgtctggtgtgggtactgtctggtgtggggactgtcttgtgtggaagctgtctggtgtggggactgtctggtgtggaagctgtctggtgtggggactgtctggtgtggaaactgtctggtgtggggaactgtccggtgtggggactgtccggtgtggggactgtctggtgtggggactgtccggtgtggaagctgtctggtgtggaagctgtctggtgtggggactgtctggtgtggaagctgtccgatatggggactgtcctgtgtggaagctgtccgatatggggactgtctggtgtggaagctgtctggtgtggggactgtccggtgtggaatctgtccggtgtggggactgtcctgtgtggaagctgtctggtgtggggactgtccggtgtgcaagctgtccgatatggggactgtctggtgtggaagctgtccgatatggggactgtctggtgtggaagctgtctggtgtggggactgtccggtgtggaatctgtccggtgtggggactgtcctgtgtggaagctgtctggtgtggggactgtctggtgtggaagctgtccgatatggggactgtctggtgtggaagctgtccgatatggggactgtctggtgtggaagctgtctggtgtggggactgtctggtgtggaagctgtccggtgtggggactgtccggtgtggaagctgtccggtgtgggtactgtcctgtgtggaagctgtccggtgtggggactgtccggtgtggaatctgtccggtgtggggactgtccggtgtggaagctgtctgatatggggactgtctg

SEQ ID NO: 4751 - DNA, 1062 bp, Homo sapiens
actcccaggcctttaaacatcattaaacaaaacaacggtgagcagattattaggaggagaacaagaaagcgccttaacccagaggcacttcaggctgagcagctcaacaaacagcagaggggcagcaatgaggagcaagtcaatggaagcccgttagagaggaggtcagaagatcatctaactgaaagtcaccagagagaaattccactccccagcctaagtaaatacgaagcccagggttcattgactaaaagccattctgctcagcagccagtcctggtcagccaaactctggatattcacaaaaggatgcaacctttgcacattcagataaaaagtcctcaggaaagtactggagatccaggaaatagttcatccgtatctgaagggaaaggaagttctgagagaggcagtcctatagaaaagtacatgagacctgcgaaacacccaaattattcaccaccaggcagccctattgaaaagtaccagtacccactttttggacttccctttgtacataatgacttccagagtgaagctgattggctgcggttctggagtaaatataagctctccgttcctgggaatccgcactacttgagtcacgtgcctggcctaccaaatccttgccaaaactatgtgccttatcccaccttcaatctgcctcctcatttttcagctgttggatcagacaatgacattcctctagatttggcgatcaagcattccagacctgggccaactgcaaacggtgcctccaaggagaaaacgaaggcaccaccaaatgtaaaaaatgaaggtcccttgaatgtagtaaaaacagagaaagttgatagaagtactcaagatgaactttcaacaaaatgtgtgcactgtggcattgtctttctggatgaagtgatgtatgctttgcatatgagttgccatggtgacagtggacctttccagtgcagcatatgccagcatctttgcacggacaaatatgacttcacaacacatatccagaggggcctgcataggaacaatgcacaagtggaaaaaaatggaaaacctaaagagtaa

SEQ ID NO: 4752 - DNA, 182 bp, Homo sapiens
agtgaatataattttttaaagcttttagatactctactaggtacactagtgaaagaactccaaaacaaatatacacctggacgtagagaagaagctattgctgtgacaatgaggtttctacgttcagtggcaagagtttttgttattctgagtgtggaaatggcttcatccaaaaagaaaaa

SEQ ID NO: 4753 - DNA, 198 bp, Homo sapiens
gggcctttatcatctgctggactcctggattggttttgttacttctagacgtgtgctgtccacagtgcgacgtgctggcctatgagaaattcttccttctccttgctgaattcaactctgccatgaaccccatcatttactcctaccgcgacaaagaaatgagcgccacctttaggcagatcctctgctgccagcgca

SEQ ID NO: 4754 - DNA, 134 bp, Homo sapiens
ccattgcacctttgtcatagaagcgttgaagtctttgccatcagatgtggagagccgagaccgccaggcccgatgcatatggtttctggataccctcatcaaatttcgagctcatagggtagttaagcggaaaa

SEQ ID NO: 4755 - DNA, 561 bp, Homo sapiens
gttctacctggacggcggctccctggtgctaaaaggcctgagggcctcggacgcgggtgcctacacctgcgtggcccacaacccagccggggaggacgccaggctgcacacggtgaatgtgctggtggccccccggatccggagctcgggcgtggcgcgggagcaccatgtcttggaagggcaggaggtgcggctggactgtgaggccgatgggcagccgccgccggacgtggcctggctgaaggacggcagcccgctgggccaggacatgggcccccacctccgagagcagcgcggtgcacggtgtggtctcccgggggggccgcctccagctgagccgcctgcaaccggcccaggcgggcacctacacgtgcgtggctgagaacacccaggctgaggcccgcaaggacttcgtggtagcagtgctggtgcccccaacatttgagaaccccaagacagagacagtgagccaggtggctgggagccccctggtcctgacctgtgatgtgtccggggtccctgcacccacggtcacttggctgaaggacaggatgcctgtgg

SEQ ID NO: 4756 - DNA, 120 bp, Homo sapiens
atgtcgatgagtgtgcagttggatcagattgtagtgagcatgcttcttgcctgaacgtagatggatcctacatatgttcatgtgtcccaccgtacacaggagatgggaaaaactgtgcag

SEQ ID NO: 4757 - DNA, 174 bp, Homo sapiens
gcattagctgtggggtgccacctcctttggagaatggcttccattcagccgatgacttctatgctggcagcacagtaacctaccagtgcaacaatggctactatctattgggtgactcaaggatgttctgtacagataatgggagctggaacggcgtttcaccatcctgccttg

SEQ ID NO: 4758 - DNA, 288 bp, Homo sapiens
acggagtctccactgctggtccgaccatatttaccttacatcaccaagtctgaactccacgccatcatgaccgccgggttctctaccattgctggaagcgtgctaggtgcatacatttcttttggggttggatggatcatgctagttactacgggatcatctcctattgaatctgtagttgcttctggcaatatatttgttggacaagtcctgccgatcgtggttttcttcagcactgtgatgtccatgctgtactacctgggactgatgcagtggattattagaaag

SEQ ID NO: 4759 - DNA, 532 bp, Homo sapiens
gatgaatttcacccattcatcgaggcacttcttccacatgtccgtgcaattgcctatacttggttcaacctgcaggctcgaaaacgcaagtactttaaaaagcatgagaagcgaatgtcaaaggatgaagaaagagcagtcaaagatgagcttctcagtgaaaagcctgaaatcaaacagaagtgggcatccaggctccttgccaaactgcgcaaagatattcgccaggagtatcgagaggactttgtgctcaccgtgactggcaagaagcacccgtgctgtgtcttatccaatcccgaccagaagggtaagattaggagaatcgactgcctgcgacaggcagacaaagtctggcgtctggatctagtcatggtgatcctgttcaaaggcatccccttggaaagtaccgatggagagcggctcatgaaatccccacattgcacaaacccagcactttgtgtccagccacatcatatcacagtatcagttaaggagcttgatttgtttttggcatactacgtgcaggagcaag

SEQ ID NO: 4760 - DNA, 932 bp, Homo sapiens
atggagataaagaactacagcagcagcacctcaggcttcatcctcctgggcctctcttccaaccctcagctgcagaaacctctctttgccatcttcctcatcatgtacctgctcgctgcggtggggaatgtgctcatcatcccggccatctactctgaccccaggctccacacccctatgtacttttttctcagcaacttgtctttcatggatatctgcttcacaacagtcatagtgcctaagatgctggtgaattttctatcagagacaaaggttatctcctatgtgggctgcctggcccagatgtacttctttatggcatttgggaacactgacagctacctgctggcctctatggccatcgaccggctggtggccatctgcaaccccttacactatgatgtggttatgaaaccacggcattgcctgctcatgctattgggttcttgcagcatctcccacctacattccctgttccgcgtgctacttatgtctcgcttgtctttctgtgcctctcacatcattaagcactttttctgtgacacccagcctgtgctaaagctctcctgctctgacacatcctccagccagatggtggtgatgactgagaccttagctgtcattgtgacccccttcctgtgtatcatcttctcctacctgcgaatcatggtcactgtgctcagaatcccctctgcagccgggaagtggaaggccttctctacctgtggctcccacctcactgcagtagcccttttctatgggagtattatttatgtctattttaggcccctgtccatgtactcagtggttagggaccgggtagccacagttatgtacacagtagtgacacccatgctgaaccctttcatctacagcctgaggaacaaagatatgaagaggggtttgaagaaattacaggacagaatttaccg

SEQ ID NO: 4761 - DNA, 198 bp, Homo sapiens
accagcactgcggcggcgagcttggtgactacaccggctacatcgagtcccccaactaccctggcgactacccagccaacgctgaatgcgtctggcacatcgcgcctcccccaaagcgcaggatcctcatcgtggtccctgagatcttcctgcccatcgaggatgagtgcggcgatgttctggtcatgaggaagagtg

SEQ ID NO: 4762 - DNA, 278 bp, Homo sapiens
gctcttgggcccagtctgccctgattcagcctccctccgtgtccgggtctcctggacagtcagtcaccatctcctgcactggaaccagcagtgatgttgggagttatgactatgtctcctggtaccaacagcacccaggcacagtccccaaacccatgatctacaatgtcaatactcagccctcaagggtccctgatcgtttctctggctccaagtctggcaatacggcctccatgaccatctctggactccaggctgaggacgaggctgattattag

SEQ ID NO: 4763 - DNA, 260 bp, Homo sapiens
atgtccagaaggcttcttgggggaatattgtcaacatcgagacccctgtgagaagaaccgctgccagaatggtgggacttgtgtggcccaggccatgctggggaaagccacgtgccgatgtgcctcagggtttacaggagaggactgccagtactcaacatctcatccatgctttgtgtctcgaccctgcctgaatggcggcacatgccatatgctcagccgggatacctatgagtgcacctgtcaagtcgggtttacag

SEQ ID NO: 4764 - DNA, 169 bp, Homo sapiens
ggtcatttgtgttccatgcttttaaaacagctgcactggcagaagcaaatccattactacaataccacttctgcatagaatggatcggaaaccaatgtcaggtcacgatttcctgccttgtagctatcagatgtgctcagtgctttcgtgaccaaattcacagcttaag

SEQ ID NO: 4765 - DNA, 177 bp, Homo sapiens
ggtggggcaggttggcacttccctctggctctccccggagcagggcttgccgcttgtcctcctctctactcacaaaaccctcctggatgggatcctgctgccctttatgctgctctcccagggcctgggtgtgcttcgtgtggcctgggactcccgcgcctgctcccctgccctcag

SEQ ID NO: 4766 - DNA, 149 bp, Homo sapiens
gcaggcccgcaagccgtgtgagccgtcgcagccgtggcatcgttgaggagtgctgtttccgcagctgtgacctggccctcctggagacgtactgtgctacccccgccaagtccgagagggacgtgtcgacccctccgaccgtgcttccg

SEQ ID NO: 4767 - DNA, 174 bp, Homo sapiens
aaaatcttccgtgccatgtatgactatatggctgctgatgcagatgaggtgtccttcaaggatggagatgccatcataaatgttcaagcaattgatgaaggctggatgtatggcactgtgcagaggactggcaggaccggaatgctcccagccaactacgttgaagctatttag

SEQ ID NO: 4768 - DNA, 312 bp, Homo sapiens
ctgaaatacaaagctgaacatgtgaagcaaaaaggtcattatgttggtgtcccgacgatgagagatgatcctaagctggtttggtttgagcatgcaggccagattcagaatgagagactatacaaagaggactatcacaaaacaaaggccaaaatcaatatacctgctgatatggtgtcagtcttggccgccaagcaggggcagacccttgtcagtgatattgattatcgtaattacttgcaccaatggatgtgtcatcctgaccagaacgatgttattcaggcaagaaaggcctatgacctacagagtgat

SEQ ID NO: 4769 - DNA, 817 bp, Homo sapiens
gccctgggccttggggctgagagggctcgagggcgcaggcccagcccaggcctccaggggccaggccgccctcacagggactgatcccagggcatcgccggcccgacgccgccctgccccttggtgccacttacctggtctcgggccgcacgctgagcaggtagctccggctggctgggctggggatccacacggggccgtcgtcctcaccgtcgccccccgcccccgaccgcccacccgcgccccagccccggctgggggccctccgcgaccccatggcaccgccctccccgaccgccggccccgcactcgccgctgcctcgcctgtcctccaggccccggcccccgggcccctgcccgccgccgccgctcccgcccgcggctgacgcgcgcccctatttatagccggtggccgggccgtcgtcacctgctgctgtccctcccctggcctggcccgacccgggcagcgcggcttggagacgccggggggcgccggggcccatgtgcccgccccagggccggctccgagtccgctcccttggcggccctggtgtctgcagtagcgccgcgtctggagaggcccgggaggcctcgggaggaaggcgcagcgggtgtcctggtcatggaggacaggccccttcgtggagctcccgggacccggctcccggccggcctgctcatgtcccgtgtggcatatgaggggtccacgaggcctggccggggccaggggagccaggtcaaccgctggccagcttgggctagaccgcgggagaccagggagccaaagaaccagccctcttcctggcaccagccgtga

SEQ ID NO: 4770 - DNA, 197 bp, Homo sapiens
gagctaatgctcatggtcaggcctctgattcttcttccatcttacttgaagccgcaagtggaggaaatccagatgctgtggctctcttgctggagtatggagctgatgccaacatccctaagaattcaggccacctgcccatccatgtggcagctgacaggggccacttactgttaagttcaattacattattataa

SEQ ID NO: 4771 - DNA, 133 bp, Homo sapiens
aaatggtatcgaggatgttcaggaagatgccctgcatgggcttacgatgttgcggaccttgttgctggagcacaaccaaatatccagctcttcgctcactgatcacaccttcagcaagcttcacagcctgcag

SEQ ID NO: 4772 - DNA, 169 bp, Homo sapiens
gtttggaaacgatgtgcagcacttcaaggtgctccgagatggagccgggaagtacttcctctgggtggtgaagttcaattctttgaatgagctggtggattatcacagatctacatctgtctccagaaaccagcagatattcctgcgggacatagaacaggtgccacag

SEQ ID NO: 4773 - DNA, 190 bp, Homo sapiens
aattgaactgcgggccctaggcaagatctcagaaggagaggagctgactgtgtcctatatcgacttcctcaacgttagtgaagaacgcaagaggcagctgaagaagcagtactactttgactgcacatgtgaacactgccagaaaaaactgaaggatgacctcttcctgggggtgaaagacaaccccaag

SEQ ID NO: 4774 - DNA, 247 bp, Homo sapiens
gaacacaaagatgtccagaacaacatatctacaaagaatgtggaccctccaaccctgcaacttgttctaatgtggctccttttcaagacagtgaatgtgtgagcggctgcacctgcccagaaggttatctgttggatgacattggagagaaaggaaaatgtgtattaaaagctgaatgtccctgtgaatccagtggaacagtgtatcagccaggagaagtccgagaaggtccttgtggttctcagtg

SEQ ID NO: 4775 - DNA, 660 bp, Homo sapiens
ctgcagaggaagagacccccagccccacggaactcagcactgaggcccgggagccccctgaggagccgctcctgggggagctgacagtgacaggatcctcccctgactcgctgagcctctcctggaccatcccccagggccacttcgactccttcaccgtgcagtacaaggacagggacgggcggccccaggtgatgcgtgtcaggggcgaggagagcgaggtcaccgtggggggcctggagcccgggcgcaaatacaagatgcacctgtacggcctccacgaggggcggcgtgtgggcccggtgtccaccgtgggtgtgacagggctggctcctgctggtcagacctcagaggagtcaaggccccgcctgtcccagctgtctgtgactgacgtgaccaccagttcactgaggctcaactgggaggccccaccgggggccttcgactccttcctgctccgctttggggttccatcaccaagcactctggagccgcatccgcgtccactgctgcagcgcgagctgatggtgccggggacacggcactcggccgtgctccgggacctgcgttccgggactctgtacagcctgacactgtatgggctgcgaggaccccacaaggccgacagcatccagggaaccgcccgcaccctcagcccag

SEQ ID NO: 4776 - DNA, 118 bp, Homo sapiens
gtgtgatgaatgcagactctgctaccattttggctgtttggatcctcctttgaaaaagtctcctaaacagacaggctacggatggatatgtcaggaatgtgattcttcatcttccaag

SEQ ID NO: 4777 - DNA, 463 bp, Homo sapiens
ggccgcggcggcaaaggcagcatctacgtgtgggcctccggggacggcggcagctatgacgactgcaactgcgacggctacgcctccagcatgtggaccatctccatcaactcagccatcaacgacggcaggactgccctgtacgacgagagctgctcttccaccttggcttccaccttcagcaacgggaggaaaaggaaccccgaggccggtgtggcaaccacagatttgtacggcaactgcactctgaggcattctgggacatctgcagctgcccccgaggcagctggtgtgtttgcactggctctggaggctaacctgggtctgacctggcgggacatgcagcatctgactgtgctcacctccaaacggaaccagcttcacgacgaggtccatcagtggcggcgcaatggggtcggcctggaatttaatcacctctttggctacggggtccttgatgcag

SEQ ID NO: 4778 - DNA, 451 bp, Homo sapiens
gtgcgccgcgccatccagcagatgctgtttccaaaccaggagttcagctggctgcggcatgtgcttattgccgttggcctgctcacttgtatcaacctgctggtcatctttgcccccaacatcctgggcatctttggggtcatcgacggggtggagtcggagctgctgcacacctacagcaaggtggacccgtttgacgtcctgatcctgtgtgtgcgcgtggccgtgctgacagcagtcacgctcacagtgcccatcgttctgttcccgcccctccaagaagaagatgcagcacatctccaacctgtccatcgctgtcatgtacatcatgtacttcctggctgccctcttcggctacctcaccttctacaacagcatacaccatccccatcatggccttcgccttcgtctgccaccccgaggtgctgcccatctatactgagctcaagga

SEQ ID NO: 4779 - DNA, 188 bp, Homo sapiens
gtcccgcggcagtgctggtggccatggttcccgtagccagaaggagttgcccacagagcccccctacacagcatacgtaggaaatctacctttcaatacggttcagggcgacatagatgctatctttaaggatctcagcataaggagtgtacggctagtcagagacaaagacacagataaatttaaag

SEQ ID NO: 4780 - DNA, 338 bp, Homo sapiens
gtacaagtccttatgcccagacacctggccgcactggcacgggcctccagcagagggcgtggaacggctgatcaagtacatcggctacaaacccgaggaatacaagttaggcaagcaaatttgatgacttcctcataaggcatcagatcaaatacctggggctgatggagcacctgcgggtgagacgggctggttttgcataccgaaggaaatacgagcatttcttgcaaaggtggggactcagtttaaaaacagtctgagcagccttctagaaaccctcatctctaaggagccctcctacatccgttgcatcaagcccaacgacaggaaagaaccca

SEQ ID NO: 4781 - DNA, 270 bp, Homo sapiens
gctcccactccatgaggtatttctacaccaccatgtcccggcccggccgcggggagccccgcttcatctccgtcggctacgtggactatacgcagttcgtgcggttcgacagcgacgacgcgagtccgagagaggagccgcgggcgccgtggatggagcgggaggggccggagtattgggaccggaacacacagatctgcaaggcccaagcacggactgaacgagagaacctgcggatcgcgctccgctactacaaccagagcgagggcg

SEQ ID NO: 4782 - DNA, 330 bp, Homo sapiens
tacaagttgtgcaaagtgaggaagattactgtggggacaaagggaattccacacctggtgactcatgatgctcgaaccattcgctacccagatcctctcatcaaggtgaacgatactgtgcagattgatttagggactgggaagataaccagctttatcaaatttgacacaggcaatgtatgtatggtgattgctggagctaacctcggtcgtgttggtgtgatcacaaacagggaaagacatcctggttcttgcgatgtggtacatgtgaaggatgccaacggcaacagctttgccacaaggatttccaacatttttgtcattggcaat

SEQ ID NO: 4783 - DNA, 279 bp, Homo sapiens
cacatcatgcagcgaattcagaggcttcaggctgactgggtcttggaaatagacaccttcttgagtcagacaccctatgggtaccggtctttctcaaatatcatcagcaccctcaatcccactgctaaacgacatttggtcctcgcctgccactatgactccaagtatttttcccactggaacaacagagtgtttgtaggagccactgattcagccgtgccatgtgcaatgatgttggaacttgctcgtgccttagacaagaaactcctttccttaaag

SEQ ID NO: 4784 - DNA, 400 bp, Homo sapiens
atggagccgcgggcgctcgtcacggcgctcagcctcggcctcagcctgtgctccctggggctgctcgtcacggccatcttcaccgaccactggtacgagaccgacccccggcgccacaaggagagctgcgagcgcagccgcgcgggcgccgaccccccggaccagaagaaccgcctgatgccgctgtcgcacctgccgctgcgggactcgcccccgctggggcgccggctgctcccgggcggcccggggcgcgccgaccccgagtcctggcgctcgctcctggggctcggcgggctggacgccgagtgcggccggcccctcttcgccacctactcgggcctctggaggaagtgctacttcctgggcatcgaccgggacatcgacaccctcatcctgaaag

SEQ ID NO: 4785 - DNA, 349 bp, Homo sapiens
gccagtgtggtggctgcggagaagatgtggttggggatggggctggggttgtggcccttgatcgcgtctttcacgtgggctgctttgtatgttctacatgccgggcccagcttcgcggccagcatttctacgccgtggagaggagggcatattgcgagggctgctacgtggccaccctggagaaatgtgccacgtgctcccagcccatcctggaccggatcctgcgggctatggggaaggcctaccaccctggctgcttcacctgcgtggtgtgtcaccgcggcctcgacggcatccccttcacagtggatgctacgagccagatccactgcattgaggactttcacag

SEQ ID NO: 4786 - DNA, 273 bp, Homo sapiens
taccatcctcggggccccagaacttgcgggtgtccgaggaatggtataaccggttgcgcattacgtgggaccccccatcttccccggtgaaaggctatagaattgtctacaaacctgtcagtgttcctggtccaacactggaaacgtttgtgggagctgacattaacaccatccttatcacaaacctcctcagcggaatggactacaatgtgaagatatttgcctcccaggcctcaggcttcagcgacgccctgacaggcatggtgaaaacat

SEQ ID NO: 4787 - DNA, 309 bp, Homo sapiens
gaaaagcaattaagtatgttcgagataccttgttcactgcagagtcaggtacaagaaggggcatcccaaaggttatcgtggttataactgatggaagatcacaagatgatgtgaacaaaatctccagggagatgcaattagatggctatagcatttttgcaattggtgtggccgatgcagattactcggagttggttagcattggcagtaagcccagcgcacgccatgtcttctttgtggatgactttgacgcctttaagaaaatcgaagatgagttaattacttttgtctgcgaaacagcatcagcaa

SEQ ID NO: 4788 - DNA, 347 bp, Homo sapiens
atggtgggaaaactctaacatatttcaactatgaccagagtggggattttcaaactgttactttcgaaggacctgaaattaggaaaattttttatggaagctttcacaagctacacattgttgtcagtgagactttggtcaaagtggttattgactgcaagcaagtgggtgagaaggcaatgaacgcatcagctaatatcacgtcagatggtgtagaagtgctagggaaaatggttcgatcaagaggaccaggtggaaactctgcaccgttccagttacagatgtttgatattgtttgctccacatcatgggccaatacagacaaatgctgtgaacttccaggcctg

SEQ ID NO: 4789 - DNA, 853 bp, Homo sapiens
atttcctgctggcaaggttccagcatttgaaggtgacgatagattctgtgtgtttgagagcaatgccattgcctactatgtgagcaatgaggagctgcagggaagtactccagaggcagcagcccaagtgatgcagtgggtgagctttgctgatagcaatatagtgtccccagccagtacctgggtgttccccaccttgggcatcatgcgtcacaacaaacaggccactgagaatacaaaggaggaagtgaggcaaattctggggctgttggatgctcacttgaagacaaggacttttctggagggcgaacgagtgacattgactgacatcacagttgtctgtaccctattgtggctctataagcaggtcctagaaccttctttctgccaggcctttcccaataccaaccgctggttcctcacctgcattaaccagcctcagttctgcactgtcttggggaaagcaaaactatgtgagaagatggcccagtctgatgctaaaaagtttgtggaaagccagcctaaaaaggacacaccacggaaagagaagcgttcacgggaagagaagcagaagccccaggctgagcaggaggagaaaaaggcggctgcccctactcctgaggaggagatggatgaatgtgagcaggcgctggccgctgagcccaaggccaaggacccctttgctcacctgcccaagagtacctttgtgttggatgaattgaagctcaagtactccaatgagacacactctctgtggcactgccatatttctgggagcactttgataaggactgctggtccctgtggtactcagagtgtcgcttccctgaagaattcactcagaccttcatga

SEQ ID NO: 4790 - DNA, 368 bp, Homo sapiens
gttccctctcccggcccgtgctgactcagccgccctctctgtctgcatccccgggagcaacagccagactcccctgcaccctgagcagtgacctcagtgttggtggtaaaaacatgttctggtaccagcagaagccagggagctctcccaggttattcctgtatcactactcagactcagacaagcagctgggacctggggtccccagtcgagtctctggctccaaggagacctcaagtaacacagcgtttttgctcatctctgggctccagcctgaggacgaggccgattattactgccaggtgtacgaaagtagtgctaatcacagtgagacagatgaggaagtcggacaaaaaccaaggttttaa

SEQ ID NO: 4791 - DNA, 138 bp, Homo sapiens
ggggaacaaggaccacaaggcttcccaggcccaaagggcacaatgggccatggcctcccaggccagaagggtgatactgggcagaaaggcttgcctggccctcctggcccccctggctatggatcacagggaattaaa

SEQ ID NO: 4792 - DNA, 128 bp, Homo sapiens
gtaagaacaagagagttggaaagcagttagcctcacagaagatccttcagctgctgcacccacatgtcaagaactgggggtctttactgcgcatgtatggccgtgagagcagcaagatggtcaagcag

SEQ ID NO: 4793 - DNA, 186 bp, Homo sapiens
gaagtgcctgaacaagatgtgcgtctatgaccccaagaagtttgagtggaaggagctggcacccatgcagaccgcccgctcactctttggggccactgtccatgatggccgcattatcgtggcagctggggtcaccgacacagggctgaccagttctgccgaagtgtacagcatcacagacaacaa

SEQ ID NO: 4794 - DNA, 210 bp, Homo sapiens
aggaggctggcagctgtgtgcaggatgggcagaggtataatgataaggatgtgtggaagccggagccctgccggatctgtgtctgtgacactgggactgtcctctgcgacgacataatctgtgaagacgtgaaagactgcctcagccctgagatccccttcggagagtgctgccccatctgcccaactgacctcgccactgccagtggtt

SEQ ID NO: 4795 - DNA, 621 bp, Homo sapiens
atgggcatcgaccccacaggcacatactatagggacagtgacctgcaaccggaaaggatcaacgtgtactacaatgaggccagaggaggaaattatgtccccagagcggtgctggtggacctggaacccagcaccatggactctatcctttccggccccttcgatgttcgatgccaagaacatgatggccatgtgcaacccgcgacatggccgctacctgaccatggccaccgtgttccgggccgcatgtccatgaaggaggtggacaagcagatgctgagcctgcagagcaagaacagcagctacttcgtgcagtggatccccaacaacatgaagacggccgtgtgcgacatctcgccccacggcctgaagatagccgcaactttcatcagcaacaacacagacttccaggagctgttcaagtgcatctctgcgcagttcacggccatgttgtggtgcaaggcgttcctgcactggtacacaggcgagggcatggacgagatggagttcaccgagactgacagcaacatgaatgacctggtatctgagtaccagcagtaccaggatgccacagccgaggagggcgagttcaagcaggaggccgaggaggaggtggcctag

SEQ ID NO: 4796 - DNA, 1019 bp, Homo sapiens
gcctgtgggtccccattgcccagcttttgcctgcactcttgcctgctgccctgaccagagtcatcatgtcttctgagcagaagagtcagcactgcaagcctgaggaaggcgttgaggcccaagaagaggccctgggcctggtgggtgcacaggctcctactactgaggagcaggaggctgctgtctcctcctcctctcctctggtccctggcaccctggaggaagtgcctgctgctgagtcagcaggtcctccccagagtcctcagggagcctctgccttacccactaccatcagcttcacttgctggaggcaacccaatgagggttccagcagccaagaagaggaggggccaagcacctcgcctgacgcagagtccttgttccgagaagcactcagtaacaaggtggatgagttggctcattttctgctccgcaagtatcgagccaaggagctggtcacaaaggcagaaatgctggagagagtcatcaaaaattacaagcgctgctttcctgtgatcttcggcaaagcctccgagtccctgaagatgatctttggcattgacgtgaaggaagtggaccccgccagcaacacctacacccttgtcacctgcctgggcctttcctatgatggcctgctgggtaataatcagatctttcccaagacaggccttctgataatcgtcctgggcacaattgcaatggagggcgacagcgcctctgaggaggaaatctgggaggagctgggtgtgatgggggtgtatgatgggagggagcacactgtctatggggagcccaggaaactgctcacccaagattgggtgcaggaaaactacctggagtaccggcaggtacccggcagtaatcctgcgcgctatgagttcctgtggggtccaagggctctggctgaaaccagctatgtgaaagtcctggagcatgtggtcagggtcaatgcaagagttcgcattgcctacccatccctgcgtgaagcagctttgttagaggaggaagagggagtctga

SEQ ID NO: 4797 - DNA, 125 bp, Homo sapiens
caccttccctgataggtgtggtaaggaaggactgggcatcccaaaatagcattgccctatcatggcaagcacctgctttttccaatggagccattctggactacgagatcaagtactatgagaaa

SEQ ID NO: 4798 - DNA, 535 bp, Homo sapiens
atgcaggatcactacaatctgatttatcgtgaagaagagcgcgagatgctaccactgtgttatcaggagggcgtggcggtaattccatggagcccgctggcaaggggccgtctgacgcgtccgtggggagaaactaccgcacgactggtgtctgatgaggtggggaaaaatctctataaagaaagcgatgaaaatgacgcgcagatcgcagagcggttaacaggcgtcagtgaagaactgggggcgacacgagcacaagttgcgctggcctggttgttgagtaaaccgggcattgccgcaccgattatcggaacttcgcgcgaagaacagcttgatgagctattgaacgcggtggatatcactttgaagaagtatccctggacttcaggagcacccaagaggaacctgagtttggcctgtctctccagacacctgcttcccctttccccaggatattgctggaggggactgggcccatcaggactaattaactcctctaatggaatgaaccagtttttcctggaacttagcccag

SEQ ID NO: 4799 - DNA, 390 bp, Homo sapiens
gaattcgagctcggtacccaatctatgctcagtgggatgcgaaagaagcaggccaggcgaaagaatccgcatggaacgagaaattcgctgcttacgtgaaagcttatccgcaggaagccgctgaatttacccgctgtatgaaaggcgaaatgccgtctgacttcgacgttaaagcgaaagagttcatcgataaactgcaggataatccggcgaaaatcgccagccgtaaagcgtaccagaatgctatcaaagcgttcggtccgctgttgccggaattcctcgacggttctgatgacctggcgcagtttaacctgaccctgtggactggttataaagcaatcaatcaacatgctgcgggatatcacatccactacggtgttcgcgagttcg

SEQ ID NO: 4800 - DNA, 348 bp, Homo sapiens
gaagatgttgtgtcagaagatgaagaggaggatgtgaaactcttgagtatatatagaaagcagtctgctcctgaaggtggtagcaaggttccacagaaaaaagaaaaacttgctgcagatgaagatgatgacaacaatgaagaggatgatgatgatgaagaggaggaggaggatgatttcgatgatgaggaaactgaagaaaaagcaccagtgaagaaatctatacgagatactccagccaaaaatgcacaaaagtcaaatcagaatggaaaagactcaaaaccatcaacaccaagatcaaaaggacaagaatccttcaaaaaaaaaaaaacaggaaaaaactcctaa

SEQ ID NO: 4801 - DNA, 125 bp, Homo sapiens
tatctcccaaaattgtagagatggttcagatatctccattaatgaagggaacaatattagcctcacctgcatagcaactggtagaccagagcctacggttacttggagacacatctctcccaaag

SEQ ID NO: 4802 - DNA, 572 bp, Homo sapiens
atgttaccccaggtgcttaaaggtatgacttcagagtctgattccattgggttgacaccaggagagaaaagtgaattggccctctctgctctaggtggttgtgtcttctacctcaaaaaatgccttattgatcaggagcttttatcaatggctaattttgaagaatatattcccttggattctgacacagtcagcactacaagatctggtgctatcttcaccaaagcctatcaacgaatggtgctagatgcagtgacattaaacaacttggagatttttctgaatggaacaaatggttctactgaaggaaccctactagagagggttgatacttgccatactccttttggtaagcggctcctaaagcaatggctttgtgccccactctgtaaccattatgctattaatgatcgtctagatgccatagaagacctcatggttgtgcctgacaaaatctccgaagttgtagagcttctaaagaagcttccagatcttgagaggctactcagtaaaattcataatgttgggtctcccctgaagagtcagaaccacccagacagcagggctataat

SEQ ID NO: 4803 - DNA, 1920 bp, Homo sapiens
atgtctgcccgtggcccggctatcggcatcgacctgggcaccacctattcgtgcgtcggggtcttccaacatggcaaggtggagatcatcgccaacgaccagggcaatcgcaccacccccagctacgtggccttcacggacaccgagcgcctcatcggcgacgccgccaagaaccaggtggccatgaaccccaccaacaccatcttcgacgccaagaggctgattggacggaaattcgaggatgccacagtgcagtcggatatgaaacactggccgttccgggtggtgagcgagggaggcaagcccaaagtgcaagtagagtacaagggggagaccaagaccttcttcccagaggagatatcctccatggtcctcacgaagatgaaggagatcgcggaagcctacctggggggcaaggtgcacagcgcggtcataacggtcccggcctatttcaacgactcgcagcgccaggccaccaaggacgcaggcaccatcacggggctcaatgtgctgcgcatcatcaacgagcccacggcggcggccatcgcctacggcctggacaagaagggctgcgcgggcggcgagaagaacgtgctcatctttgacctgggcggtggcactttcgacgtgtccatcctgaccatcgaggatggcatcttcgaggtgaagtccacggccggcgacacccacctgggcggtgaggacttcgacaaccgcatggtgagccacctggcggaggagttcaagcgcaagcacaagaaggacattgggcccaacaagcgcgccgtgaggcggctgcgcaccgcttgcgagcgcgccaagcgcaccctgagctcgtccacgcaggcgagcatcgagatcgactcgctctacgagggcgtggacttctatacgtccatcacgcgcgcccgcttcgaggagctcaatgccgacctctttcgcgggaccctggagccggtggagaaggcgctgcgcgacgccaagctggacaagggccagatccaggagatcgtgctggtgggcggctccactcgtatccccaagatccagaagctgctgcaggatttcttcaacggcaaggagctgaacaagagcatcaaccccgacgaggcggtggcctatggcgccgcggtgcaggcggccatcctcatcggcgacaaatcagagaatgtgcaggacctgctgctactcgacgtgaccccgttgtcgctgggcatcgagacagctggcggtgtcatgaccccactcatcaagaggaacaccacgatccccaccaagcagacgcagaccttcaccacctactcggacaaccagagcagcgtactggtgcaggtatacgagggcgaacgggccatgaccaaggacaataacctgctgggcaagttcgacctgaccgggattccccctgcgcctcgcggggtcccccaaatcgaggttaccttcgacattgacgccaatggcatccttaacgttaccgccgccgacaagagcaccggtaaggaaaacaaaatcaccatcaccaatgacaaaggtcgtctgagcaaggacgacattgaccggatggtgcaggaggcggagcggtacaaatcggaagatgaggcgaatcgcgaccgagtcgcggccaaaaacgccctggagtcctatacctacaacatcaagcagacggtggaagacgagaaactgaggggcaagattagcgagcaggacaaaaacaagatcctcgacaagtgtcaggaggtgatcaactggctcgaccgaaaccagatggcagagaaagatgagtatgaacacaagcagaaagagctcgaaagagtttgcaaccccatcatcagcaaactttaccaaggtggtcctggcggcggcagcggcggcggcggttcaggagcctccgggggacccaccatcgaagaagtggactaa

SEQ ID NO: 4804 - DNA, 177 bp, Homo sapiens
aaagtagtagaggagttgaaccgcctgggcatgatgatagatttgtcctatgcatcggacaccttgataagaagggtcctggaagtgtctcaggctcctgtgatcttctcccactcagctgccagagctgtgtgtgacaatttgttgaatgttcccgatgatatcctgcagcttctg

SEQ ID NO: 4805 - DNA, 283 bp, Homo sapiens
ggccctgttagcgtcccagctggaaccaacatttgccaggtatgttttcccttgttttgatgagccagctctgaaggcaacttttaatattacaatgattcatcatccaagttatgtggccctttccaacatgccaaagctaggtcagtctgaaaaagaagatgtgaatggaagcaaatggactgttacaaccttttccactacgccccacatgccaacttacttagtcgcatttgttatatgtgactatgaccacgtcaacagaacagaaaggggcaaggag

SEQ ID NO: 4806 - DNA, 230 bp, Homo sapiens
tacagaaaaattaactgacgtagctcgctatcacattgaaacatctacaaaaattcagaatgaactttatttaagccaagaagacttcttcattaatggcaatataaaagtcttcccagatcctcccccatcaatacgtcctccacctgtagaaaaggaagaagatggtaccctgaccattgaacagcttgacagtcttcgagatcagttcttagatatggcacctaaag

SEQ ID NO: 4807 - DNA, 127 bp, Homo sapiens
gttcattcctgaatctccccgatggctgatatcccagagaagatttagagaggctgaagatatcatccaaaaagctgcaaaaatgaacaacatagctgtaccagcagtgatatttgattctgtggag

SEQ ID NO: 4808 - DNA, 312 bp, Homo sapiens
tttctctacagacatgactttgtgaaggagcgagggaaactcatagggccccagagtgtaagagacgacccccggatccagcactgccggcgcatgggccagctgcagagcgagcttcagtacaggaggggggcgaccagcagccaagcccagttccatctgcccatggacatggtgcacctggtccatgccaagaatgcccaggctctggccagcgaccacgactacaggacacagtatcacaagttcacagcactgcccgaggacctgaagatggcctgggccaagaaagcccatgccctgcagagtgag

SEQ ID NO: 4809 - DNA, 471 bp, Homo sapiens
gaatgatccaggctctcggtggcttcttctcttactttgtgatcctggcagaaaatggcttcttgcccggcaacctggtgggcatccggctgaactgggatgaccgcaccgtcaatgacctggaagacagttacgggcagcagtggacatacgagcagaggaaggtggtggagttcacctgccacacggccttctttgtgagcatcgttgtcgtccagtgggccgatctgatcatctgcaagacccggaggaactcggtcttccagcagggcatgaagaacaagatcctgatcttcgggctgtttgaggagacggccctggctgccttcctgtcctactgccccggcatggacgtggccctgcgcatgtaccctctcaagcccagctggtggttctgtgccttcccctacagtttcctcatcttcgtctacgacgaaatccgcaaactcatcctgcgcaggaacccagggg

SEQ ID NO: 4810 - DNA, 915 bp, Homo sapiens
  misc_feature (768)..(807): n is a, c, g, or t
  misc_feature (853)..(867): n is a, c, g, or t
ctgatttgcatggatggactctccccctctcagagtatgaagagagggagagatctgggggaagctcagcttcagctgtgggtagagaagacaggactcaggacaatctccagcatggccagcttccctctcctcctcaccctcctcactcactgtgcagggtcctgggcccagtctgtgctgactcagccaccctcagcgtctgggacccccgggcagagggtcaccatctcttgttctggaagccgctccaacgtcggaagtaataatgttaactggtaccagcagctcccaggaacggcccccaaactcctcatctatagtaataatcagcggccctcaggggtccctgaccgattctctggctccaagtctggcacctcagcctccctggccatcagtgggctccagtctgaggatgaggctgattattactgtgcaacatgggatgacagtactgtggtcttcggcggagggaccaagctgaccgtccctggtcagcccaaggctgccccctcggtcactctgttcccgccctcctctgaggagcttcaagccaacaaggccacactggtgtgtctcataagtgacttctacccgggagccgtgacagtggcctggaaggcagatagcagccccgtcaaggcgggagtggagaccaccacaccctccaaacaaagcaacaacaagtacgcggccagcagctatctgagcctgacgcctgagcagtggaagtcccacagaagctacagctgccaggtcacgcannnnnnnnnnnnnnnnnnnnnnnnnnnnnnnnnnnnnnnntgttcataggttctcaaccctcaccccccaccacgggagactagannnnnnnnnnnnnnngggaggggtctctcctcccaccccaaggcatcaagcccttctccctgc

SEQ ID NO: 4811 - DNA, 5618 bp, Homo sapiens
  misc_feature (53)..(150): n is a, c, g, or t
  misc_feature (205)..(206): n is a, c, g, or t
  misc_feature (1265)..(1282): n is a, c, g, or t
  misc_feature (1512)..(1544): n is a, c, g, or t
  misc_feature (1625)..(1650): n is a, c, g, or t
  misc_feature (1883)..(1906): n is a, c, g, or t
  misc_feature (1940)..(1948): n is a, c, g, or t
  misc_feature (3187)..(3204): n is a, c, g, or t
aaaagagctgaaccaaaaatacgcgaatttaacaaaatattacgcttacattnnnnnnnnnnnnnnnnnnnnnnnnnnnnnnnnnnnnnnnnnnnnnnnnnnnnnnnnnnnnnnnnnnnnnnnnnnnnnnnnnnnnnnnnnnnnnnnnnnaaaatataaaaaaccccgggggggtttttttttataaaaaaaaaagagggggggnntgtcctcttttttttttttttttttttttttttttttttttttttcagattcacttcacttttattatgaacaaacacaatctcagattagtacaattagcttcagagttgatattaatagaaattattccaaaattattcttgtcacaagtaactactatatcccacataaaaagggaaaaaatcccacccaatcacagaaaaggcatcctctgtatgtttccgtggcaatgcgttgtttatgtattctcaaattttgtctggctagttatccaccgcttctccaatggattcattcagtttcttggagaaccatatagactaatgacagcatctgggacacacggacgtatcaagttcatggtggacattcctattataaaaaatactcaggtcttgagaattcctgtgctgaaggatcccaaaatgctttctaaaaagcattagtcatgcctcaaaactgccctttgaggtaggtcagtattattatccccattttaacagaaggaaaactgaggcaccttatagttaagtgacttgcccagggtcacacagcaagtcagtggcacagtggttggagaggccctggccttaaccaccagcataacatggccacctcgcttttttaacctttcatgatgacctatttgagctacacttacagagaatacacccaagatactagcaaaccaaggagaaaattttccattttaaatgctacaaccatcttttaacccaaaaaaaaaaaaaaacttataaatcaaatacattcaaattatttccaccctccatcaaatgtgggcacttaagaaaagcagccctaacaaaagtttccagaatgaagcccagaagggaatcctgcaaatcgtgatactgataatcctccactcaggcccctttttctaccagccacttcagtagggtctcaggtgcaaagggattctgcagagggagtgagggcaggctcatatgcaacactgtgattagaaaagatgtaaggcacctgagctaagttgccagcacaccccccaaagcaaggactgttagaatcgtgccgannnnnnnnnnnnnnnnnnagtttatcattaatgtgtcacttgaattgagctttagaatcttgaaaatcgtgttccttactcagcagacacactcccacccacacccacagccacacatacattggggccctcagcctgaggtgccatccagccttatgtagggtcatggtacagatcagatccatggcacacgattacaataggaagaagtgaaagttgtttttattgtttatatattatcaagcagnnnnnnnnnnnnnnnnnnnnnnnnnnnnnnnnnattagaaataccagcagacatttccaaggggtaggtgcacaggtcaacagaactaaactacagtgatcttcccttagatcnnnnnnnnnnnnnnnnnnnnnnnnnnctcaaagacaaggatgcctttagtccaggctaacccctgtagcctctacgcaattaacacagaagaaaggccttcctcccttccagcactggggctcaacagtggactgagtgtttggtagtgtacatttccaatcttaatagagcaaagccagacttctgctttgatgactgagctacagggacaggagtggtccaaggttctcaaattctgtttttgtttttttccagacnnnnnnnnnnnnnnnnnnnnnnnncctaggctgtagggaatgctggttagtttgctgnnnnnnnnnagtaagaagtgttattcaaaaaacgtgtacaacgggttgttgttccaacccagtttcaaagcaagttgcagtttacctgctcagggaacagggcctcctttcgaggtgaggcacttgggttcttgcccttgcttcttcccagtgagaactgtttcctcctacttctacaagcattgcactgccagctgagagcactgactcaggcggggcaccctcaccaagtaagcagggggcattcagcatgccctctggttctgaccagagtagaggggacttgaaaatgaaccctcttttgctctgtggctggcccactggctcaacatgagcgcttggcttctcatgagagagggagggagagagaggctttctgggccagagatgtttctgggagggtttgccagccttgtcttgagccatcagtgtggcaggggagcacaggggtgtaggtggagacactgcggaggccacgtgaaagtggcagctagctctactttcaaaagagaagcagtggttcagtgaccctgagcattctgtgtgcaggagggagctgcctggacagcaagtcatcactgcctctgaatacacacaaaggaggctgcctgtccagggaaagaagaaaacgttcagggaagagaaagatctggtcaaagaaaagggacagacagggtagagccaggaatcaagaatcagggtagtgaagagattcctaaccctgccccccaggcagtttgtatactttaggctagatgttaacagagacccccttctcctcaaaaaaaaatgagtgaaggggcacaacactgtggagagaagccttctagtttttactcatttcaaggagaaactggaactaattaatgaatggacctaatatctagtttattaagactcccaataactcactcagtaaccttctcaacccctgaacgtgttctcagatcccttcctatgtgaagttcgctcttagaagctgcctatagatcctgtccctcagcctctccatctcatgtccagcagtggagaggaaattggcatcccaactaattcctcctctccttcagagttttttccaaacatccctctttggaagggaaatactctaatagtttaacgttctaagcaatgtatatatgtatatatattttatttttgacccgacttcacctccttaaatccttccctttttttggatgtttggaaatgccacagccatcttattactatgaggggaagaaccannnnnnnnnnnnnnnnnnagcagaaagaggaaagaactgtaatgagcagctcatggaatactcaaaattctatgagctgctgtttttaccaattctggaaacacccaacttcaagacttcttgatatatgaactaagaaatctccttgttattaaagaaaaaaagaaaagaaaacccttccccagcagagaccacttttactacaaacttaaaatgtcttttctttatcctcggcctcaactatatgttgcggcattgaattagcattgccaaacaccgcagccactttttaccccgagccaggagagaaaggaagcatgctatgtggtggggcttgaagtcctcattaggtaggcagctgtatgtctgatcatggcgagaggttccttcgcttccctcatccttacattcatacatgctaactctctcccccgacaatttacctgctttagaagctttgtgtcaaatgaagttgcttttccattccatctagcaaaagcctgggctgaagataatcaacaggggactacccagaagattctgttttatctctagctcaagccacctacttcaaagctcacaacagctcaaggaaagagagttatctggagcaaagaccattcgttttaggctacagaaaggttgtctaggctttggaagctggacactgagcaaagactgaccagctgcttgcctgggaggcaataagggaaaggagggcgattaaagtgaaaaggaggacaatgggcctagaagagagagaggataagagaagaaataatatcagcttttttttttaatgtctgagttgttggctttcaatacttttgaattttaaaagaatactgtactggaatgggttaacatcatcatctttagcatcctggtagcattattcagtagttaataaacagacattaaaacctctgcctggctggtttttgaaaaaggaacctgagggaccccaaactcagccactcttgtagtttccatctccggttcttttaatcctggccaagatggcggccttggagactttcttccggtcataggtcagaccgagggcggccatgcaatcaatgaagaatgtggtgaagttgatgtgccagcggtactcactggcagagtagtcatagggaaaggagtggtggtagttgtggaagccctcacccacagctccaagtgaaaccaggatattctcccgggggctaatgttcttgtcataaggacgatatccgaagaggtgggcagcactgttcaccagccaggtggcattaagcaccacagcatatcgcaagaaagtggcaacgaacacactgttttgaaaagtttcaccccagaaataccagggcacaagcgtgggcaggatgaagcacatcatcagcaagccaggtttgtagtacctcctctggaacatcaccagtttctcagcttctaggtcagacaagtctagcgtactccccttctctttgacagctgggtgtttgcgcacaagcagccaacccacgtgagagaagaaaaagccacgtcgggaattatgaggatcagcatgtgtttctgaaaacttgtggtgggcacggtggtcacgagcccattcatagacatcattctggaatgccattgtgttggcaatgatcagaaagagccgtaggggcagccgagctttgtaagagcggtggctccacagacgatgagctcctgctgttatgcccagggcactgacaaaatagtagaataccccccaaagccaggtgtagaacttgcaggtaggaatcaaagtgatcccatacagggctcccaagtgtagcagagacataaggatgatgtttctccagacatattcaaccttggggcttgggccttccttatccttgtaggtggggtcatatatatcatcttttatatcagggcgaatgtcgtcttccaagtagaggggcatcgtctccaacttatctcctccattctgcaggacccctggaggaggcgctgtaatggtggtggtggtggtataggagctagagatatcgtcctgcagcaagtgggccggcatcttggctctccgatgccgggatcactttccagggggctgaggctccggagcggagttcggggtcgccggaggactgcggtttcgaagcccgccggtacgcgctgagccgcggcgccttgcacgctagctggttgtcggcgctagccgcggtgcgtggaggtccccgagccgggaatttaaaggctagagctggcaacgggtgaccgtgtccggtatttcctcagcccccttttatccgctgccaagcaggggcaaagtgcgaggagttgactggcgcgggcggtcccgcgtggaggtaagggcgggagggggaggagaacagaggccgagggctccggcgaccgcagcagggcgccggggatgctgccgacaccgacaccac

SEQ ID NO: 4812 - DNA, 3139 bp, Homo sapiens
  misc_feature (596)..(610): n is a, c, g, or t
  misc_feature (2941)..(3137): n is a, c, g, or t
tgatctctgagtctcattcatgagaatgaggccaggttgaagtgtggaagtgtggccaggttcaggggctggccaccactgctaagggttcaggggagggtgaaggaggccaactgatgctctcccaagaccaccagaggtggaatctgcttgagagccagcccccggttctcagtgactccagcttctacggacttttcaggtgagggaggcagggggcctgggtaatggtgatgcagggttccccagacagcatccaggaactgctacacttatttcaattaaagcgtcaggtgtcccatgagagcaatagttcccagtcagtgcccacaaggcaccacagagccccttgccctaaaaccttggagggactatcaggcccctctgcctcccccccagccccggcatgtccctgcctgtctacttcctattgtaacttccaagccagccttcctttaaaggaaaaggagcttagaaaccaacattctagaagatgcacttgggcctgggttaaccaattcagatgccctaagagccagtcagtccagagactgggctggtcaagggttatgggtgacctacacagtgggctggtnnnnnnnnnnnnnnnaactaagcgtgagctgacagaaggttccagactcctggactttctctggctctgagttaagtgagaatccttgttctctgtggcacaagaagaggttggacagagacagtcccaaccctggaatgtggggctggtggcccgagaggccactcactctgccggctgggagggccctcggggactgagagcgtgaccctctcaggtactgcccccgggtgggagccaccggatgatccagacacgggctctgagtgttcacatccagaggtctccccatctccacgcttcgtggcagcgaagacccagacgaaccagtcggggaaaaaagctccggcctccgtggtccgatgcgccaccctcttacaccgcacccctccagccacccaaacccagacgttccgcactccaaattcgggatctccggcgagcaaggcaaccgcagcagaaagcgctttcagtcggagagtagaaggcaaagcacaaaaccactttgaagagacgaacagcagttcgcagaactccagcgaaactgcaagtcccctgatttccaaccctttccctctcctacagaaaccctacacctgcggcgcctgtgggatccagttccagttctacaacaacctgttggagcacatgcagtcccatgcagctgacaatgaaaacaacattgcctccaaccagtcccgatcgccacctgctgttgtagaagagaagtggaaacctcaggcccagaggaacagtgccaataacaccactaccagtggtttaacacccaacagcatgatccccgaaaaggagcggcagaacatcgcagagcggctgttgagggtcatgtgtgccgacctgggtgcactgagcgtggtcagcgggaaggagttcctgaagttggcccagaccttagtagacagtggtgcccgctatggggccttctcggtcactgaaatcctgggcaacttcaacacgctggcgctgaagcacctgccacgcatgtacaaccaggtgaaggtgaaagtgacctgtgccttgggcagcaatgcctgcctaggcatcggtgtcacctgccactcccagagtgttggccctgactcctgctacatcctcacagcctaccaggccgagggcaaccacatcaagagctatgtgcttggtgtgaagggtgcggacattcgcgacagcggtgaccttgtgcaccactgggtgcagaacgtgctgtcggagttcgtgatgtcggagatcaggacagtgtacgtgacggattgccgggtgagcacgtccgccttctccaaggccggcatgtgccttcgctgctcagcctgtgccttgaactcggtggtgcagagcgtgctgagcaagcggacactgcaggcccgcagcatgcacgaggtcatcgagctgctcaacgtgtgcgaggacctggcgggctccacgggcctggccaaggagaccttcgggtcgctggaggagacgtctccaccaccctgctggaactcggtgacggactcactgttgctggtgcatgagcgctatgagcagatctgcgagttctacagccgggccaagaagatgaacctcatccagagcctcaacaagcacctgctcagcaacctggcggccatcctgacgccggtgaagcaggcagtcatcgagctgagcaacgagagccagcccaccctgcagctggtgctgcccacctacgtcaggctggagaagctgttcacggccaaggccaacgacgcaggcactgtcagcaagctctgccacctcttcctggaggcgctcaaggagaacttcaaggtgcacccggcccacaaggtggccatgatcctggacccgcagcagaagctgcggcctgtgccaccctaccagcacgaggagatcatcggcaaggtctgtgagctcatcaacgaggtgaaggagtcctgggccgaggaggccgacttcgagcccgctgccaagaagccccgctctgctgccgtcgagaaccccgcagctcaggaagatgatcggctaggcaaaaatgaagtgtacgattacctgcaggagcccctcttccaggctacccctgatctcttccagtactggtcgtgcgttacccaaaagcacacaaaactcgccaagctcgccttctggctcctggcggttccggccgtgggcgccagaagcgggtgtgtaaatatgtgtgaacaagcgcttctaatcaaacggaggcggctgctcagtccagaagatatgaataaactcatgtttctgaaatccaacatgctttaagacttgacttcgggggaaaaaaaaagaaaaagagaagataacattagaaaaaaaaaaaaaaannnnnnnnnnnnnnnnnnnnnnnnnnnnnnnnnnnnnnnnnnnnnnnnnnnnnnnnnnnnnnnnnnnnnnnnnnnnnnnnnnnnnnnnnnnnnnnnnnnnnnnnnnnnnnnnnnnnnnnnnnnnnnnnnnnnnnnnnnnnnnnnnnnnnnnnnnnnnnnnnnnnnnnnnnnnnnnnnnnnnnnnnnnnnnnnnnnnnaa

SEQ ID NO: 4813 - DNA, 490 bp, Homo sapiens
cggcggcggcggtggcggcggcgactgctgcggtgaaggaggaggaggagccgagcgggcgctggcaccgaggcctgaccatggacgaggaatacgatgtgatcgtgctggggaccggtctcaccgaatgcatcctgtcgggcatcatgtctgtgaacgggaagaaggtgctgcacatggaccggaacccctactacgggggcgagagctcctccatcacacccctggaggagctgtataagcgttttcagttgctggaggggccccctgagtcgatgggccgaggccgagactggaatgttgacctgattcccaaattcctcatggctaacgggcagctggtaaagatgctactgtatacagaggtgactcgctacctggacttcaaggtggtggagggcagctttgtctacaaggggggcaagatctacaaagtgccgtccactgagactgaggccttggcttccaatctgatgggcatgtttgagaa

SEQ ID NO: 4814 - DNA, 337 bp, Homo sapiens
gagctcgtgatgacccagtctccatcctccctgtctgcatctgtgggggacagagttaccatcacttgccgggcaagtcagagcatcggtcgctatttacattggtatcagcagaaggcagggaaagccccaaaactcctgatctctgctacatccaatttggtaagtggggtcccatcgaggttcagcggcactggatctgagacagacttcagtctcaccatcagcagtctgcaacctgaagattttgctacttactactgtcaacagagttacacaacgccgtacacttttggccaggggaccaacctagagatcaaaggaactgtggctgcac

SEQ ID NO: 4815 - DNA, 363 bp, Homo sapiens
cagctgcagctgcaggagtccggctcaggactggtgaggccttcacagaccctgtcgctcacctgcgctgtcgctggtggctccatcagcagtggtggtttctcctggagctggatccggaagcctccagggcagggcctggagtggattggttacatctatcatgatgggagcgcctactataacccgtccctcaagagtcgagtcaccatgtcagtagacacgtccaagaaccagttcgccctgaacttgagatctgtgaccgccgcggacacggccgtgtattattgtgccagagggggtggaagtggatactggtcgtacgccaactggggccagggaatcctggtcaccgtctcctca

SEQ ID NO: 4816 - DNA, 1191 bp, Homo sapiens
gcccaagtgtcctccgggagtgtgagacttgcctgcttccctggcccctggtcctgtcctgttctccagcatggtgtgtctgaggctccctggaggctcctgcatggcagcgctgacagtgacactgatggtgctgagctccccactggctttggctggggacacccgaccacgtttcttgtggcagcttaagtttgaatgtcatttcttcaatgggacggagcgggtgcggttgctggaaagatgcatctataaccaagaggagtccgtgcgcttcgacagcgacgtgggggagtaccgggcggtgacggagctggggcggcctgatgccgagtactggaacagccagaaggacatcctggaagacgagcgggccgcggtggacacctactgcagacacaactacggggttggtgagagcttcacagtgcagcggcgagttgagcctaaggtgactgtgtatccttcaaagacccagcccctgcagcaccacaacctcctggtctgctctgtgagtggtttctatccaggcagcattgaagtcaggtggttccggaacggccaggaagagaaggctggggtggtgtccacaggcctgatccagaatggagattggaccttccagaccctggtgatgctggaaacagttcctcggagtggagaggtttacacctgccaagtggagcacccaagtgtgacgagccctctcacagtggaatggagagcacggtctgaatctgcacagagcaagatgctgagtggagtcgggggcttcgtgctgggcctgctcttccttggggccgggctgttcatctacttcaggaatcagaaaggacactctggacttcagccaacaggattcctgagctgaaatgcagatgaccacattcaaggaagaaccttctgtcccagctttgcagaatgaaaagctttcctgcttggcagttattcttccacaagagagggctttctcaggacctggttgctactggttcggcaactgcagaaaatgtcctcccttgtggcttcctcagctcctgcccttggcctgaagtcccagcattgatgacagcgcctcatcttcaacttttgtgctcccctttgcctaaaccgtatggcctcccgtgcatctgtacctcaccctgtacgacaaacacattacattattaaatgtttctcaaagatggagtt

SEQ ID NO: 4817 - DNA, 566 bp, Homo sapiens
  misc_feature (86)..(86): n is a, c, g, or t
  misc_feature (180)..(198): n is a, c, g, or t
  misc_feature (220)..(220): n is a, c, g, or t
ctgtcatagatgtcatagctgtccttggagctgtgtcacctgtatgatgtgtaggatgaagacctcatgttggaaaatgagggacntgctctcagggctgtgtgcagcaacatgtgcccagtgctctgatgagtctctcatcacttttaaagcctgagacagctgcctgtgtgagactgnnnnnnnnnnnnnnnnnnnacctctcctttgtgacttcaangacgtctggcatctctttctgcaaaggcacctgaatgtgtctgcgttcctgttagcataatgtgaggaggtggagagacagcccacccccgtgtccaccgtgacccctgtccccacactgacctgtgtccctccccgatcatctttcctgttccagagaggtggggctggatgtctccatctctgtctcaaattcatggtgcactgagctgcaacttcttacttccctaatgaagttaagaacctgaatataaatttgtgttctcaaatatttgctatgaagcgttgatggattaattaaataagtcaattcctagaagttgagagagcaaaaaaaaaaaaaaaaa

SEQ ID NO: 4818 - DNA, 360 bp, Homo sapiens
atgaaacacctgtggttcttcctcctcctggtggcagctcccagatgggtcctgtcccaggtgcagctgcagcagtcgggcccaggactggtgaagccttcggagaccctgtccctcacctgcgctgtctctggtggctccatcagcagtggtaactggtgatggatccgccagcccccagggaaggggctggagtggattggggaaatcaatcatagtggaagcaccaactacaacccgtccctcaagagtcgagtcaccatatcagtagacacgtccaagaaccagttctccctgaagctgagctctgtgaccgccgcggacacggctgtgtattactgtgcgagagccggggcctaa

SEQ ID NO: 4819 - DNA, 2927 bp, Homo sapiens
gggcagaagtggagggagtgtggcaccgggccggctcaggcagagacgcggcaccatggctagcaagaaagtctgcattgtaggctccgggaactggggctcagccatcgccaagatcgtgggtggcaatgcagcccagctggcacagtttgacccacgggtgaccatgtgggtatttgaggaagacattggaggcaaaaagctgactgagatcatcaacacgcagcatgagaatgtcaaatacctgccagggcacaagttgcccccaaatgtggtggctgtcccagatgtggtccaggctgcagaggatgctgacatcctgatctttgtggtgccccatcagttcatcggcaagatctgtgaccagctcaagggccatctgaaggcaaacgccactggcatatctcttattaagggggtagacgagggccccaatgggctgaagctcatctcggaagtgattggggagcgcctcggcatccccatgagtgtgctgatgggggccaacattgccagcgaggtggctgatgagaagttctgtgagacaaccattggctgcaaggacccggcccagggacaactcctgaaagagctgatgcagacaccaaacttccgtatcacagtggtgcaagaggtggacacagtagagatctgtggagccttaaagaatgtagtggccgtgggggctggcttctgtgatggcctgggctttggcgacaacaccaaggcggcagtgatccggctgggactcatggagatgatagccttcgccaagctcttctgcagtggccctgtgtcctctgccaccttcttggagagctgtggtgttgctgacctgatcactacctgctatggagggcggaaccggaaagtggctgaggcctttgcgcgtacaggaaagtccattgagcagctggagaaagagttgctgaatgggcagaaactgcaggggcccgagacagcccgggagctatacagcatcctccagcacaagggcctggtagacaagtttcccttgttcatggctgtgtacaaggtgtgctacgagggccagccagtgggtgaattcatccactgcctgcagaatcatccagaacatatgtgagtggggccaggcccaggccaggcgtttttaccccagtggagaccagcagaagcctggggtacctagtcaccaggatctccaggactcccagggagcagagtcttctcatcgtttcactggaggacaggtggctatggggcccagctacgcacctggagatcctgaactgtcaagccactggcagcctcatgccaccacattcgccagaaatgcagttgccctgtccctctccagatgtggggctttctccatatcctctgggaggggtggaatcaagccccagtgctgcctgcttggtggcgggggtgatgtatgtggagaagggtcggggccgaggccggtagggcaggggctgctagtggctgtctcacatacaccagtaatcctgttaaagggctgaagaagtatcttagccacaggagcgatgaggcaaggattgtcagggaggggtctgggcttctgagctgatgcaggccccaaggacccctttgctgacctctgccaggacccacacagcttcgatggatctcagtgtttgttaacaaaatacaaagatctcaaacaaaccccttttagcttctcctagcaacatctgtgtcctcagaaacctctggttctcccccttccccctcccccaggctgccctggcacccaaattgctgccatgctggcatctgtagctcggtggcttgacattctccccagggacttcccggttcctagttctttgccagctcctccccactctgtgcgacctttccaagccttccctcaccctccccgccagcaccctctttggggagcaggaacttaatctgctgacagagctacacctttcataacaggctcagatcactcagctccctgtgacctttgtattcacccaggcttccttctcagtagctctagctgggggaggtgtcagctgggcccctcctgtgctatctccccagaggacatccctgactccacccctttcttcctcccaaactctgcacctcttcctcagctgctccagaccggccagggtaaccagctaaccatgcctggcatctggaagccagcaggccagagggtggcccaaaggctgatgaacggtagggaagggtgagcagattcctatgttggtgggcaccaatattccaagggcagctctctttgctgaatgagggccttctcgtgaggtactgacaacaccagcaactcgagagctgggaaactcaaggaggaggaagaaaatcaaaaccaccctactccctggggtgaggaaagaacaggaggggaggaggaggagtgtgctctgcacttgccttgctccagcatggggtggcagcagaggaatgtcacaggtcagcagcctaggcctccagctataaatagtccggagggcccgagaggctcccgcccgtccagcagggctgtcagcttcctgtgtggcagcacctggcacactggctctggccagcattatgctaaaaccctgttactctccaatgaaccagggaggcgggctcctctctgcgcctatcccttgagaattctgtcttaccagtgaagggtggggctgcccagatcaggcagcaggagtgaggggcacagtcaccccaggccttgctgagcccaggtctgggtactgagtgtccagagctgcctccccaggaggttaaggtgggggcaaaggggaagcttcaagcactttgcctacttttgttcactccccagtgcactgtgactcaggccttcccatcaggcctatttgtctacccaataaagcgtgttttttccagaaaaaaaaaaaaaaaaaaaaaaaaaaaaaaaaaaa

SEQ ID NO: 4820 - DNA, 1465 bp, Homo sapiens; identical to SEQ ID NO: 43

SEQ ID NO: 4821 - DNA, 1060 bp, Homo sapiens
  misc_feature (756)..(775): n is a, c, g, or t
gccctgaccaccgtgatgagcccctgtggaggtgaagacattgtggctgaccacgttgcctcttgtggtgtaaacttgtaccagttttacggtccctctggccagtacacccatgaatttgatggagatgaggagttctacgtggacctggagaggaaggagactgcctggcggtggcctgagttcagcaaatttggaggttttgacccgcagggtgcactgagaaacatggctgtggcaaaacacaacttgaacatcatgattaaacgctacaactctaccgctgctaccaatgaggttcctgaggtcacagtgttttccaagtctcccgtgacactgggtcagcccaacaccctcatttgtcttgtggacaacatctttcctcctgtggtcaacatcacatggctgagcaatgggcagtcagtcacagaaggtgtttctgagaccagcttcctctccaagagtgatcattccttcttcaagatcagttacctcaccttcctcccttctgctgatgagatttatgactgcaaggtggagcactggggcctggaccagcctcttctgaaacactgggagcctgagattccagcccctatgtcagagctcacagagactgtggtctgcgccctggggttgtctgtgggcctcgtggcctttgtggtgggcactgtcttcatcatccaaggcctgcgttcagttggtgcttccagacaccaagggccattgtgaatcccatcctggaagggaaggtgnnnnnnnnnnnnnnnnnnnngaagagtggacttgctacatgacctagcactattctctggccccgatttatcatatcccttttctcctccaaatatttctcctctcaccttttctctgggacttaagctgctatatcccctcagagctcacaaatgtctttacattctttccctgacctcctgattttttttttcttttctcaaatgttacctacaaagacatgcctggggtaacccagccggctacctaattcctcagtaacctccatctataatctccaaggaagcaacaaattccttttatg

SEQ ID NO: 4822 - DNA, 3454 bp, Homo sapiens
cagccgtgctcgaagcgttcctggagcccaagctctcctccacaggtgaagacagggccagcaggagacaccatggggcacctctcagccccacttcacagagtgcgtgtaccctggcaggggcttctgctcacagcctcacttctaaccttctggaacccgcccaccactgcccagctcactactgaatccatgccattcaatgttgcagaggggaaggaggttcttctccttgtccacaatctgccccagcaactttttggctacagctggtacaaaggggaaagagtggatggcaaccgtcaaattgtaggatatgcaataggaactcaacaagctaccccagggcccgcaaacagcggtcgagagacaatataccccaatgcatccctgctgatccagaacgtcacccagaatgacacaggattctacaccctacaagtcataaagtcagatcttgtgaatgaagaagcaactggacagttccatgtatacccggagctgcccaagccctccatctccagcaacaactccaaccctgtggaggacaaggatgctgtggccttcacctgtgaacctgagactcaggacacaacctacctgtggtggataaacaatcagagcctcccggtcagtcccaggctgcagctgtccaatggcaacaggaccctcactctactcagtgtcacaaggaatgacacaggaccctatgagtgtgaaatacagaacccagtgagtgcgaaccgcagtgacccagtcaccttgaatgtcacctatggcccggacacccccaccatttccccttcagacacctattaccgtccaggggcaaacctcagcctctcctgctatgcagcctctaacccacctgcacagtactcctggcttatcaatggaacattccagcaaagcacacaagagctctttatccctaacatcactgtgaataatagtggatcctatacctgccacgccaataactcagtcactggctgcaacaggaccacagtcaagacgatcatagtcactgagctaagtccagtagtagcaaagccccaaatcaaagccagcaagaccacagtcacaggagataaggactctgtgaacctgacctgctccacaaatgacactggaatctccatccgttggttcttcaaaaaccagagtctcccgtcctcggagaggatgaagctgtcccagggcaacaccaccctcagcataaaccctgtcaagagggaggatgctgggacgtattggtgtgaggtcttcaacccaatcagtaagaaccaaagcgaccccatcatgctgaacgtaaactataatgctctaccacaagaaaatggcctctcacctggggccattgctggcattgtgattggagtagtggccctggttgctctgatagcagtagccctggcatgttttctgcatttcgggaagaccggcagggcaagcgaccagcgtgatctcacagagcacaaaccctcagtctccaaccacactcaggaccactccaatgacccacctaacaagatgaatgaagttacttattctaccctgaactttgaagcccagcaacccacacaaccaacttcagcctccccatccctaacagccacagaaataatttattcagaagtaaaaaagcagtaatgaaacctgtcctgctcactgcagtgctgatgtatttcaagtctctcaccctcatcactaggagattcctttcccctctagggtagaggggtggggacagaaacaactttctcctactcttccttcctaataggcatctccaggctgcctggtcactgcccctctctcagtgtcaatagatgaaagtacattgggagtctgtaggaaacccaaccttcttgtcattgaaatttggcaaagctgactttgggaaagagggaccagaacttcccctcccttccccttttcccaacctggacttgttttaaacttgcctgttcagagcactcattccttcccacccccagtcctgtcctatcactctaattcggatttgccatagccttgaggttatgtccttttccattaagtacatgtgccaggaaacagcgagagagagaaagtaaacggcagtaatgcttctcctatttctccaaagccttgtgtgaactagcaaagagaagaaaaccaaatatataaccaatagtgaaatgccacaggtttgtccactgtcagggttgtctacctgtaggatcagggtctaagcaccttggtgcttagctagaataccacctaatccttctggcaagcctgtcttcagagaacccactagaagcaactaggaaaaatcacttgccaaaatccaaggcaattcctgatggaaaatgcaaaagcacatatatgttttaatatctttatgggctctgttcaaggcagtgctgagagggaggggttatagcttcaggagggaaccagcttctgataaacacaatctgctaggaacttgggaaaggaatcagagagctgcccttcagcgattatttaaattattgttaaagaatacacaatttggggtattgggatttttctccttttctctgagacattccaccattttaatttttgtaactgcttatttatgtgaaaagggttatttttacttagcttagctatgtcagccaatccgattgccttaggtgaaagaaaccaccgaaatccctcaggtcccttggtcaggagcctctcaagattttttttgtcagaggctccaaatagaaaataagaaaaggttttcttcattcatggctagagctagatttaactcagtttctaggcacctcagaccaatcatcaactaccattctattccatgtttgcacctgtgcattttctgtttgcccccattcactttgtcaggaaaccttggcctctgctaaggtgtatttggtccttgagaagtgggagcaccctacagggacactatcactcatgctggtggcattgtttacagctagaaagctgcactggtgctaatgccccttgggaaatggggctgtgaggaggaggattataacttaggcctagcctcttttaacagcctctgaaatttatcttttcttctatggggcttataaatgtatcttataataaaaaggaaggacaggaggaagacaggcaaatgtacttctcacccagtcttctacacagatggaatctctttggggctaagagaaaggttttattctatattgcttacctgatctcatgttaggcctaagaggctttctccaggaggattagcttggagttctctatactcaggtacctctttcagggttttctaaccctgacacggactgtgcatactttccctcatccatgctgtgctgtgttatttaatttttcctggctaagatcatgtctgaattatgtatgaaaattattctatgtttttataataaaaataatatatcagacatcg

SEQ ID NO: 4823 - DNA, 1715 bp, Homo sapiens
  misc_feature (213)..(319): n is a, c, g, or t
  misc_feature (391)..(407): n is a, c, g, or t
cttctacttgtccacaatttgccccagaatcttcctggctacttctggtacaaaggggaaatgacggacctctaccattacattatatcgtatatagttgatggaaaaataattatatatgggcctgcatacagtggaagagaaacagtatattccaacgcatccctgctgatccagaatgtcacccggaaggatgcaggaacctacaccttnnnnnnnnnnnnnnnnnnnnnnnnnnnnnnnnnnnnnnnnnnnnnnnnnnnnnnnnnnnnnnnnnnnnnnnnnnnnnnnnnnnnnnnnnnnnnnnnnnnnnnnnnnnccagggaggccatggaggctgtgcgcttaatctgtgatcctgagactctggacgcaagctacctatggtggnnnnnnnnnnnnnnnnnccctgtgactcacaggttgcagctgtccaaaaccaacaggaccctctatctatttggtgtcacaaagtatattgcaggaccctatgaatgtgaaatacggaacccagtgagtgccattcgcagtgacccagtcaccctgaatctcctccatggtccagacctccccagaatttacccttcattcacctattaccgttcaggagaaaacctcgacttgtcctgcttcacggaatctaacccaccggcagagtatttttggacaattaatgggaagtttcagcaatcaggacaaaagctctttatcccccaaattactagaaatcatagcgggctctatgcttgctctgttcataactcagccactggcaaggaaatctccaaatccatgacagtcaaagtctctggtaagtggatcccagcatccttggcagtagggttttatgtggagtctatctggctttcagagaagagtcaggaaaacatttttattcccagcctgtgtcccatgggcacaagcaaatcccaaattctcctcctgaaccctcccaatttgtctctacagactctcttctccttgtttttctgttttcttatggctgaccttgtgtctggcctgaaaaaggtagggagggggctttatcagccctgagccctatgtggtagaagaggcttcagagagggacaagaagggaattccaaggcagcgtccgcaggtcgtggtcacctgccagcgactgtctcagactgggcagggaggctttggcatgacttaagaggaagggcagtcttgggcccgctatgcaggtcctggcaaacctggctgccctgtctccatccctgtccctcagggtagcaccatggcaggactgggggaactggagtgtccttgctgtatccctgttgtgaggttccttccaggggctggcactgaagcaagggtgctgggaccccatggccttcagccctggctgagcaactgggctgtagggcagggcacttctgaggtcaggtcttggtaggtgcctgcatctgtctgccttctggctgacaatcctggaaatctgttctccagaatcaggccaaaaagttcacagtcaaatggggaggggtattcttcatgcaggagacccctaggccctggaggctgcaacatacctcaatcctgtcccaggccggatcctcctgaagcccttttcgcagcactgctatcctccaaagccattgtaaatgtgtgtacagtgtgtataaaccttcttcttctttttttttttttaaactgaggattgtcattaaacacagttgttttct

SEQ ID NO: 4824 - DNA, 1224 bp, Homo sapiens
  misc_feature (623)..(670): n is a, c, g, or t
ttttattctttctgccaggtacatcagatccatcaggtctgagctgtgttgactaccactacttttcccttcgtctcaattatgtcttggaagaaggctttgcggatccccggaggccttcgggcagcaactgtcaccttgatgctggcgatcctgagctccccactggctgagggcagagactctcccgaggatttcgtgtaccagtttaagggcctgtgctacttcaccaacgggacggagcgcgtgcggcgtgtgaccagacgcatctataaccgagaggagttcgtgcgcttcgacagcgacgtgggggtgttccgggcggtgacgccgctggggcggcctgccgccgagtactggaacagccagaaggacgtcctggagggggcccgggcggcggtggacagggtgtgcagacacaactaccaggtggcgctccgcgcgaccctgcagcggcgagtggagcccacagtgaccatctccccatccaggacagaggccctcaaccaccacaacctgctggtctgctcggtgacagatttctatccagcccagatcaaagtccggtggtttcggaatgaccaggaggagacagccggcgttgtgtccacccccctcattannnnnnnnnnnnnnnnnnnnnnnnnnnnnnnnnnnnnnnnnnnnnnnncccagcgtggagacgtctacacctgccacgtggagcaccccagcctccagagccccatcaccgtggagtggcgggctcagtctgaatctgcccagagcaagatgctgagtggcgttggaggcttcgtgctggggctgatcttcctcgggctgggccttatcatccgtcacaggagtcggaaagggctcctgcactgactcctgagactgttttaactaagactggttatcactcttctgtgacgcctgcttgtccctgcccagaattcccagctgcctgtgtcagcctgtccccctgagatcagagtcctacagtggctgtcacgcagccaccaggtcatctcctttcatccccaccccgaggctgctggctgtgaccctgcttcctgcactgacccagagcctctgcctgtgcacggccagctgcgtctactcaggccccaaggggtttctgtttctgttctctcctcagactgctcaagagaagcacatgaaaaccattacctgacttcagagcttttttacataattaaacatgatcctgagttaaaaaaa

SEQ ID NO: 4825 - DNA, 3623 bp, Homo sapiens
  misc_feature (19)..(34): n is a, c, g, or t
  misc_feature (941)..(957): n is a, c, g, or t
ctggaagagatgcgggatnnnnnnnnnnnnnnnntaatcacccggacacaagctgtgtgcagagggttcctcatgcgtgtggaattccagaagatggtgcagaggagggagtccatcttctgcatccagtacaacattcgctcattcatgaacgtcaagcactggccctggatgaaactcttcttcaagatcaagcccctcctcaagagtgcggagactgagaaagagatggccaccatgaaggaagaattccagaaaaccaaagatgaactcgccaagtcggaggcaaagaggaaggagctagaggaaaaactggtgactctggtccaagagaagaatgacctgcagctccaagtacaagctgaaagcgaaaatttgttggatgctgaggaaagatgcgatcagctgatcaaagccaaattccagctcgaggccaagatcaaggaggtgacagagagagctgaagatgaggaggagatcaatgctgagctgacggccaagaagaggaaactggaggatgaatgctcagagctcaagaaagacattgatgaccttgagttgaccctggccaaggttgagaaggagaagcatgccacggagaacaaggttaaaaaccttactgaggaactctccgggttagatgaaacaattgcaaagttaaccagagagaagaaggccctccaagaggcgcaccagcaggccttggatgacctccaagctgaagaagacaaagtcaattctttgaacaaaaccaagagcaaactggaacagcaagtggaagacctggaaagctccctagaacaagaaaagaagctccgcgtagacctggaaaggaacaaaaggaaattggaaggagacttgaagcttgctcaagagtccatattagatctggagaatgacaagcaacagctggacgaaaggctcaagaagaaagattttgnnnnnnnnnnnnnnnnnagcaaagtggaagatgagcagacactgggcctccagtttcagaagaaaatcaaagagttgcaggctcgaattgaggagctggaagaggagatagaggcggagagggccacccgcgcgaagacagagaaacagcgcagcgactatgcccgggagctggaggagctgagcgagcggctggaggaggcgggaggcgtcacctccacgcagatagagctcaacaagaagcgggaggctgagttcctgaagctgcgcagggacctggaggaggccacactgcagcacgaagccatggtggccacgctgaggaagaagcatgcggatagtgtggccgagcttggggagcagattgacaacctgcagcgggtcaagcagaagctggagaaggagaagagcgagttcaagctggagatcgatgacctctccagcagcatggagagtgtgtcgaaatctaaggcaaatctggaaaaaatctgccgaaccctggaggatcagttaagtgaggccaggggcaagaatgaggaaattcagaggagcctgagcgagctgaccacacagaagtctcgtttgcagaccgaggctggtgagctgagtcgtcagctggaagaaaaagaaagcatagtatcccaactttccaggagcaagcaagcctttacccagcaaacagaagagctcaagaggcagctggaggaagagaacaaggccaagaacgccctggcgcacgccctgcagtcctcccgccacgactgtgacctgctgcgggaacagtatgaggaggagcaggaaggcaaagctgagctgcagagggcgctgtccaaggccaatagtgaggttgcccagtggagaaccaaatacgagacggacgccatccagcgcacagaagagctggaggaggcccaagaaaaacttgctcagcgccttcaagattccgaggaacaggttgaggcagtgaatgctaaatgtgcttcactggagaagaccaagcagaggctgcaaggagaggtggaggatctgatggttgatgttgaaagagccaattccttggccgccgctctggacaagaagcagaggaactttgacaaggtgttggcagagtggaagacaaagtgtgaggagagccaagcagagctggaggcatccctgaaggagtcccgctccttgagcactgagctcttcaaactgaaaaatgcctacgaggaagccttagatcaacttgaaactgtgaaacgggaaaataagaacttagagcaggagatagcagatctcacagaacaaattgctgaaaatggcaaaaccatccatgaactggagaaatcaagaaagcagattgagctggaaaaggctgatatccagctggctctcgaggaagcagaggctgctcttgagcatgaagaagccaagatcctccgaatccagcttgaattgacacaagtgaaatcagaaattgatagaaagattgccgagaaggatgaagagatcgagcagctgaagaggaactaccagagaacagtggaaaccatgcagagcgccctggacgccgaggtgcggagcaggaatgaagccatccggctcaagaagaagatggagggggacctgaatgaaatcgagatccagctgagccacgccaaccgccaggcggcggagaccctcaaacacctcaggagtgtccagggacagctgaaggatacgcagctccacctggatgatgccctccaaacccaggaggacctgaaggagcagctggcgattgtggagcgcagagccaacctgctgcaggccgaggtggaggagctgcgggctactctggagcagacggagagggcccggaaactggcggaacaggagctcctggactccaacgagagggtgcagctgctgcatacccagaacaccagcctcatccacaccaagaagaagctggagacagacctcatgcagctccagagtgaggtagaagatgccagcagggatgcaaggaacgctgaggagaaggccaagaaggccatcacggacgctgccatgatggcggaggagctgaagaaggagcaggacaccagcgcccaccttgagcggatgaagaagaacctggaacagacggtgaaggacctgcagcatcgtctagatgaggccgagcagctggcgctgaagggcgggaagaagcagatccagaaactggagaccaggatccgagagctggagtttgaacttgagggagagcagaagaagaacacagagtctgttaagggcctgaggaagtatgagcggagggtcaaggagctgacgtaccagagtgaagaggacaggaagaatgtgctgagattgcaggatctggtggataaactgcaagtgaaagtcaagtcctacaagaggcaggcggaggaggctgatgaacaagccaatgctcatctcaccaaattccggaaagctcagcatgagctggaggaggccgaggaacgtgcggatatcgcagaatctcaagtcaacaagctccgcgctaagactcgagacttcacctccagcaggatggtggtccacgagagtgaagagtgagccagcccttctggagcaggacagaagatatgcaaaatgtatattttcttgattcctgaccattgatacttaatgtccatgtgactctttttcacatgcaataaactttgctttgtttc

SEQ ID NO: 4826 - DNA, 1688 bp, Homo sapiens
  misc_feature (75)..(103): n is a, c, g, or t
  misc_feature (269)..(293): n is a, c, g, or t
  misc_feature (706)..(729): n is a, c, g, or t
  misc_feature (887)..(901): n is a, c, g, or t
  misc_feature (1365)..(1381): n is a, c, g, or t
tcctcgctggagaagaccaagcaccggctacagaatgagatcgaggacttgatggtggacgtagagcgctccaannnnnnnnnnnnnnnnnnnnnnnnnnnnnagaggaacttcgacaagatcctggccgagtggaagcagaagtatgaggagtcgcagtcggagctggagtcctcgcagaaggaggctcgctccctcagcacagagctcttcaaactcaagaacgcctatgaggagtccctggaacatctggagaccttcaagcgggnnnnnnnnnnnnnnnnnnnnnnnnnctccgacttgactgagcagttgggttccagcggaaagactatccatgagctggagaaggtccgaaagcagctggaggccgagaagatggagctgcagtcagccctggaggaggccgaggcctccctggagcacgaggagggcaagatcctccgggcccagctggagttcaaccagatcaaggcagagatcgagcggaacgtggcagagaaggacgaggagatggaacaggccaagcgcaaccacctgcgggtggtggactcgctgcagacctccctggacgcagagacacgcagccgcaacgaggccctgagggtgaagaagaagatggaaggagacctcaatgagatggagatccagctcagccacgccaaccgcatggccgccgaggcccagaagcaagtcaagagcctcnnnnnnnnnnnnnnnnnnnnnnnnattcagctggacgatgcagtccgtgccaacgacgacctgaaggagaacatcgccatcgtggagcggcgcaacaacctgctgcaggctgagctggaggagttgcgcgccgtggtggagcagacagagcggtcccggaagctggcggagcaggagctgannnnnnnnnnnnnnngggtgcagctgctgcattcccagaacaccagcctcatcaaccagaagaagaagatggacgctgacctgtcccagctccagactgaagtggaggaggcagtgcaggagtgcaggaatgctgaggagaaggccaagaaggccatcacggatgccgccatgatggcagaggagctgaagaaggagcaggacaccagcgcccacctggagcgcatgaagaagaacatggaacagaccattaaggacctgcagcaccggctggacgaagccgagcagatcgccctcaagggcggcaagaagcagctgcagaagctggaagcgcgggtgcgggagctggagaatgagctggaggccgagcagaagcgcaacgcagagtcggtgaagggcatgaggaagagcgagcggcgcatcaaggagctcacctaccagacggaggaggacaggaaaaacctgctgcggctgcaggannnnnnnnnnnnnnnnnagctaaaggtcaaggcctacaagcgccaggccgaggaggcggaggagcaagccaacaccaacctgtccaagttccgcaaggtgcagcacgagctggatgaggcagaggagcgggcggacatcgccgagtcccaggtcaacaagctgcgggccaagagccgtgacattggcacgaagggcttgaatgaggagtagctttgccacatcttgatctgctcagcgcctgaggtgccagcaaagccccatgctggagcctgtgtaacagctcgcttgggaggaagcagaataaagcaatttccttgaagccg

SEQ ID NO: 4827 - DNA, 6010 bp, Homo sapiens
  misc_feature (1286)..(1312): n is a, c, g, or t
  misc_feature (1438)..(1453): n is a, c, g, or t
  misc_feature (1978)..(1996): n is a, c, g, or t
  misc_feature (3031)..(3051): n is a, c, g, or t
  misc_feature (3547)..(3617): n is a, c, g, or t
  misc_feature (3995)..(4010): n is a, c, g, or t
  misc_feature (4826)..(4840): n is a, c, g, or t
gtggaacacttctgaacctgcatttttatctggaactccagaagcagaatcctttgctaaataaatcgcagccatgagtgcgagctcagacgctgagatggctgtttttggcgaacgtgctccctaccttcgaaaatcagaaaaggagcggattgaggcccaaaacaagccgtttgatgctaaaacatctgtctttgtggcggagcccaaggaatcctatgtgaagagcactatacaaagcaaagaaggagggaaagtaaccgtaaagactgaaggtggagcaactctaactgtcagggaagaccaagtcttccctatgaaccctccgaaatatgacaaaattgaggacatggccatgatgactcatctacacgagcctggagtgctgtacaacctcaaagagcgctatgcagcctggatgatctacacctactcaggcctcttctgtgtcaccgtcaacccctacaagtggctgccggtgtacaagcccgaggtggtggctgcctacagaggcaaaaagcgccaggaggccccgccccacatcttctccatctctgacaatgcctatcagttcatgttgactgatcgagagaatcagtccatcctgatcaccggagaatctggtgccggaaagactgtgaacaccaagcgtgtcatccaatactttgcaacaattgcagttactggagagaagaagaaggatgaatctggcaaaatgcaggggactctggaagatcaaatcatcagcgccaatcccctactggaggcctttggcaatgccaaaaccgtgaggaatgacaactcctctcgctttggtaaattcattagaatccactttggtactacagggaagctggcatctgctgatatagaaacatatcttttagaaaagtccagagttactttccagctaaaggcggaaagaagctaccatattttttatcagatcacttccaataagaagccagatctaattgaaatgctcctgatcaccaccaacccatatgactatgccttcgtcagtcagggggagatcacagttcccagtattgatgaccaagaagagttgatggccactgatagtgccattgacatcctgggcttcactcctgaagagaaagtgtccatctataaactcacaggggctgtgatgcattatgggaacatgaaattcaagcaaaagcagcgtgaggagcaagctgagccagatggcacagaagtcgctgacaaggcagcctatctccagagtctgaactctgcagacctactcaaagccctctgctacnnnnnnnnnnnnnnnnnnnnnnnnnnngtcaccaaaggccagactgtgcagcaggtgtacaatgcggtgggtgctctggccaaagccgtctacgagaagatgttcctgtggatggtcacccgcatcaaccagcagctggacaccaagcagccnnnnnnnnnnnnnnnnggggtcttggacattgctggctttgaaatctttgattttaacagcctggagcagctgtgcatcaacttcaccaacgagaaactgcaacagtttttcaaccaccacatgtttgtgctagagcaggaggagtacaagaaggaaggcatcgagtggacgttcattgactttgggatggacctggctgcctgcattgagctcattgagaagccactgggcatcttctccatcctggaagaggagtgcatgttccctaaggcaacggacacctccttcaagaacaagctgtatgaccagcacctgggcaagtctgccaacttccagaagcccaaggtggtcaaaggcaaggctgaggcccacttctctctgattcactatgctggcactgtggactacaacattactggctggctggacaaaaataaggaccccctgaatgatactgtggttgggctgtaccagaagtctgcaatgaagactctagccagtctcttttccacgtatgctagtgctgaagcagatagcagnnnnnnnnnnnnnnnnnnnaaaaagggctcttctttccagactgtgtctgcccttttcagggaaaatttaaataaattgatgacgaatctgaggagcacacaccctcacttcgtacggtgtatcattcccaatgaaaccaaaactcctggggcaatggaacatgaacttgtgttgcaccagctgaggtgtaatggtgtgctggaaggcatccgcatctgtaggaaaggattcccaagcagaatcttatatggtgatttcaaacaaagatacaaggttttaaatgcaagtgctattccagagggacagttcattgacagcaagaaggcttctgagaaacttcttgcatctattgatattgatcatactcaatataaatttggacataccaaggttttcttcaaagctggacttctgggtcttctggaagaaatgagagatgaaaaattagcccaaattataacaagaacacaagctgtctgtaggggattcctaatgagggtagaatatcagaagatgttgcaaaggagagaagcacttttctgcatccagtataatgtccgtgccttcatgaacgtcaagcactggccctggatgaaactctttttcaagattaagcccctcctcaagagtgcagagaccgagaaagagatggccaccatgaaggaagaattccagaaaaccaaagatgaactcgccaagtcagaggcaaaacggaaggagctagaggaaaaaatggtcactctcttaaaagagaaaaatgacctgcaactccaggttcaatctgaagcagatagcttggctgatgcagaggaaaggtgtgagcaactgattaaaaacaaaatccaacttgaggccaaaatcaaagaggtgactgaaagagctgaggaggaggaagagatcaatgctgagctgacagccaagaagagaaaactggaggatgaatgttcagaactcaagaaagacattgatgaccttgagctgacactggccaaggttgagaaggagaaacatgccacggagaacaaggtgaaaaatcttacagaagagatggcnnnnnnnnnnnnnnnnnnnnnaaaactgtccaaggagaagaaggctctccaagagacccaccagcagaccctggatgacctgcaggcagaggaggacaaagtcaacatcctgaccaaagctaaaaccaagctagaacagcaagtggatgatcttgaagggtctctggaacaagaaaagaagcttcgaatggatctagaaagagcaaagcggaaactggagggtgacctcaaattggcccaagaatccacaatggatatggaaaatgacaaacagcaacttgatgaaaagcttgaaaagaaagaatttgaaatcagcaatttgataagcaaaattgaagatgagcaagctgtagaaattcaactacagaagaagatcaaagagttgcaggcccgcattgaggagctgggggaagaaatcgaggcagagagggcgtcccgagccaaagcggagaagcagcgctctgacctctcccgggaactggaggagatcagcgagaggctggaagaagccggtggnnnnnnnnnnnnnnnnnnnnnnnnnnnnnnnnnnnnnnnnnnnnnnnnnnnnnnnnnnnnnnnnnnnnnnnaggaggccaccctgcagcatgaagctatggtggctgctcttcggaagaagcacgcagacagtatggctgagcttggggagcagattgacaacttgcagcgggtcaaacagaagctggagaaggagaagagtgagctgaagatggagactgatgacctcagcagtaacgcagaggccatttccaaagccaagggaaaccttgaaaagatgtgccgctctctagaagatcaagtgagtgagcttaagaccaaggaagaggagcagcagcggctgatcaatgacctcacagcacagagagcgcgcctgcagacagaagcgggtgaatattctcgacaattagatgagaaagatgctttagtctctcagctttcaaggagcnnnnnnnnnnnnnnnnagcagattgaagagctgaaacatcaactagaggaagaaactaaagccaagaacgccctggcacacgccctgcagtcctcccgccatgactgcgacctgctgcgggaacagtatgaggaagagcaggaaggcaaagctgagctgcagagggcgctgtccaaggccaacagtgaggttgcccagtggagaaccaaatacgagacggatgccatccagcgcacagaggagctggaggaggccaagaaaaagttggcccagcgcctgcaagaagctgaggaacatgtagaagctgtgaacgccaaatgtgcttcccttgagaagacgaagcagcggctccagaatgaagttgaagacctcatgcttgatgtggaaaggtctaatgcagcctgtgcagcccttgataagaagcaaaggaactttgacaaggtcctatcagaatggaagcagaagtatgaggaaactcaggctgaacttgaggcctcccagaaggagtcacgttctcttagcactgagctgttcaaggtgaagaatgtctatgaggaatccctggatcaactcgaaacgctaagaagagaaaataagaacttgcaacaggagatttctgacctcactgagcagattgcagagggaggaaagcaaattcatgaattggagaaaataaagaagcaagtagaacaagagaaatgtgaaattcaggctgctttagaggaagcagaggcatctcttgaacatgaagaaggaaagattctgcgtatccagcttgagttaaaccaagtcaagtctgaagttgatagaaaaatcgcagaaaaggatgagnnnnnnnnnnnnnnnaagagaaaccacactagagtcgtggagacaatgcagagcacgctggatgcagagattagaagcagaaatgatgctctgagagtcaagaagaaaatggaaggagatctgaatgaaatggaaatccagctgaaccatgccaatcgcttagctgcagagagtttaaggaactacaggaacacccaaggaatcctgaaggaaacccagctccacctggatgatgctctccggggccaggaggacctcaaggaacagctggcaattgtggagcgcagagccaacctgctgcaggctgagatcgaggagctgtgggccactctggaacagacagagagaagcaggaaaatcgccgaacaggagctcctggatgccagtgagcgtgtccagctcctccacacccagaataccagtctcattaacaccaagaagaaattagaaaatgacgtttcccaactccaaagtgaagtggaagaagtaatccaagaatcacgcaatgcagaagagaaagccaagaaggccatcactgatgctgccatgatggctgaggagctgaagaaggaacaggacaccagcgcccacctggagcggatgaagaagaacctggagcagacggtgaaggacctgcagcatcgtctagatgaggccgagcagctggcgctgaagggtgggaagaagcagatccagaaactggaggccagggtacgtgagcttgaaggagaggttgaaaatgaacagaaacgtaatgcagaggctgttaaaggtttacggaaacatgagcgacgagtaaaagaactcacctaccagactgaagaagatcgcaagaatgttctcaggctgcaggacttggtagataaattacaggcgaaggtgaaatcatacaagagacaagctgaggaggctgaggaacaatccaatgctaatctatctaaattccgcaaactccagcatgagctggaggaggccgaggaacgggctcacattgctgagtcccaggtcaacaaattgcgagtgaagagccgagaggttcacacaaaaatcagtgcagagtaaacacacctgcctgatgctatcaagaggctgaagaaagcgccaaatgtgctattttttggtcacttgctttatgacgtttattttcctgttaaagctgaataaataaaaactacagtaaatgta

SEQ ID NO: 4828 - DNA, 2739 bp, Homo sapiens
  misc_feature (1642)..(1659): n is a, c, g, or t
aaattggctcaagaatccgcaatggatatagaaaatgacaaacaacaacttgatgaaaagcttaaaaagaaagagtttgaaatgagcggtctgcaaagcaagattgaagatgaacaagcccttggtatgcagctgcagaagaaaatcaaggagttacaagcccgcattgaggagctggaggaggaaatcgaggcagagcggacctcccgggccaaagcagagaagctgcgctctgatctctcccgggagctggaggagatcagtgagaggctggaagaagccgtgggggccacctcgacccagattgagatgaacaagaagcgggaagctgagttccagaaaatgcgcagggacctggaggaggccaccctacagcatgaggccacggcggccaccctgaggaagaagcatgcagatagtgtggccgagcttggggagcagattgacaacctgcagcgagtgaagcagaagctggagaaggagaagagtgagatgaagatggagatcgatgaccttgctagtaacatggagactgtctccaaagccaagggaaaccttgaaaagatgtgccgcgctctagaagatcaactgagtgaaattaagaccaaggaagaggagcagcagcggctgatcaatgacctcacagcacagagagcgcgcctgcaacagaatcaggtggaatattcacgccagctagatgaaaaggacacactagaaacacagctctcgaggggcaaacaagcctttactcaacagattgaggaactgaaaaggcaacttgaagaggagataaaggccaagagtgccctggcacatgccctgcagtcctcccgccatgactgtgacctgctgcgggaacagtatgaggaggagcaggaagccaaggccgagctacagagagcaatgtccaaggccaacagtgaggttgcccagtggaggaccaaatatgagacagatgccatccagcgcacagaggagctggaggaggccaagaagaagctggctcagcgtctgcaggatgctgaggaacatgtagaagctgtgaatgccaaatgtgcttcccttgagaagacgaagcagaggctccagaatgaagttgaggacctcatgattgatgttgagaggacaaatgctgcctgtgccgccctggacaaaaagcaaaccaactttgataagatcctggcagaatggaaacagaagtgtgaagaaactcatgctgttcttgaaagctttcaaaaggaatcccgctcactcagcacagaactatttaagattaagaatgcttatgaggaatctttagaccaacttgaaaccttgaaacgggaaaataagaatctgcagcaggagatttctgatctcactgaacagattgcagaaggaggaaagcgcatccatgaactggaaaaaataaagaagcaagttgagcaagaaaagtctgaacttcaggctgccttagaggaggcagaggcatctcttgaacatgaagagggaaagatcctgcgcatccagcttgaggttaaccaagtcaagtctgaggttgataggaaaattgctgaaaaagatgaggaaattgaccagatgaagagaaaccacattagaatcgaggagtccatgcagagcacactgaatgctgagatcaggnnnnnnnnnnnnnnnnnnaggctcaagaagaagatggagggagacctcaatgaaatggaaatccagctgaaccatgccaaccgcatggctgctgaggacctgaggaactatcagaacacccaagccatcctcaaggatacccagctccacctagatgatgctctccggagccaagaggacctgaaggaacagctggctatggtggagcgcagagccaacctgctgcaggctgagatcgaggaactacgagccactctggaacagacggagaggagcaggaaaatcgcagaacaggagctcctggatgccagtgaacgtgttcagctcctgcacacccagaacaccagcctgatcaacaccaagaagaagctggagacagacatttcccaaatccagggagagatggaagacatcatcaaggaagcccgcaatgcagaagagaaggccaagaaggccatcactgatgctgccatgatggctgaggagctgaagaaggaacaggacaccagcgcccatctggagcggatgaagaagaacttggaacagacggtgaaggacctgcagcatcgtctggatgaggctgagcagctggccctgaagggtgggaagaagcagatccagaaactggaggccaaggttcgtgaacttgaaggtgaagttgaaagtgaacagaagcgcaatgttgaagctgtcaagggtctacgcaaacatgagagaaaagtgaaggaactcacttaccaaactgaggaagaccgcaagaatattctcaggctccaggacctggtggacaagctgcaagcaaaggtgaaatcctacaagagacaagctgaagaagcggaggaacaatccaacgtcaacctctccaaattccgcaggatccagcacgagctggaggaggccgaggaacgggctgacattgctgagtcccaggtcaacaagctgagggtgaagagcagggaggttcacacaaaaatcataagtgaagagtaatttatctaactgctgaaaggtgaccaaagaaatgcacaaaatgtgaaaatctttgtcactccattttgtacttatgacttttggagataaaaaatttatctgccaaaa

SEQ ID NO: 4829 - DNA, 827 bp, Homo sapiens
ggagctcctggatgccagtgagcgtgttcagctactgcacacccagaacaccagcctgatcaacaccaagaagaagctggagacagatatttcccaaatgcaaggagagatggaggacattctccaggaagcccgcaatgcagaagaaaaggccaagaaggccatcactgatgccgccatgatggctgaggagctgaagaaggagcaggacaccagcgcccacctggagcggatgaagaagaacatggagcagaccgtgaaggatctgcagctccgtctggatgaggctgagcagctggccctgaagggtgggaagaagcagatccagaaactggaggccagggtacgggagctggaaggagaggttgagagtgagcaaaagcgtaatgctgaggctgtcaggggtctgcgcaaacatgagaggcgagtgaaggaactcacttaccagacggaagaagatagaaagaatattctcaggcttcaagatttggtagataaacttcaggcaaaagtgaaatcttataagagacaagctgaggaggctgaggaacaatccaacaccaatctagctaaattccgcaagctccagcatgagctggaggaggccgaggaacgggctgacattgctgagtcccaggtgaacaaactgcgggtgaagagccgggaggttcacacaaaagtcataagtgaagagtgatcatgtcctgatgccatggaatgactgaagacaggcacaaaatgtgacatctttggtcatttccctctgtaattattgtgtattctaccctgttgcaaaggaaataaagcatagggtagtttgcaaacaa

SEQ ID NO: 4830 - DNA, 493 bp, Homo sapiens
  misc_feature (1)..(94): n is a, c, g, or t
  misc_feature (115)..(247): n is a, c, g, or t
  misc_feature (249)..(249): n is a, c, g, or t
  misc_feature (254)..(254): n is a, c, g, or t
  misc_feature (409)..(423): n is a, c, g, or t
nnnnnnnnnnnnnnnnnnnnnnnnnnnnnnnnnnnnnnnnnnnnnnnnnnnnnnnnnnnnnnnnnnnnnnnnnnnnnnnnnnnnnnnnnnnnnnttggcaccttgtctcgccacnnnnnnnnnnnnnnnnnnnnnnnnnnnnnnnnnnnnnnnnnnnnnnnnnnnnnnnnnnnnnnnnnnnnnnnnnnnnnnnnnnnnnnnnnnnnnnnnnnnnnnnnnnnnnnnnnnnnnnnnnnnnnnnnnnnnngntcctnagaacttcaagctcctgggaaatgtgctggtgaccgttttggcaatccatttcggcaaagaattcacccctgaggtgccggcttcctggcagaagatggtgactggagtgggccagtgcccctgtcctccagataccactgagcctcttgcccannnnnnnnnnnnnnnaaggataggctttattctgcaagcaatacaaataataaatctattctgctgagcgatcacaaaaaaaaaa

SEQ ID NO: 4831 - DNA, 1072 bp, Homo sapiens
  misc_feature (373)..(389): n is a, c, g, or t
  misc_feature (1063)..(1063): n is a, c, g, or t
gcatccccgaccagccccaaggtcttcccgctgagcctcgacagcaccccccaagatgggaacgtggtcgtcgcatgcctggtccagggcttcttcccccaggagccactcagtgtgacctggagcgaaagcggacagaacgtgaccgccagaaacttcccacctagccaggatgcctccggggacctgtacaccacgagcagccagctgaccctgccggccacacagtgcccagacggcaagtccgtgacatgccacgtgaagcactacacgaattccagccaggatgtgactgtgccctgccgagttcccccacctcccccatgctgccacccccgactgtcgctgcaccgaccggccctcgaggacctgnnnnnnnnnnnnnnnnngaacctcacgtgcacactgaccggcctgagagatgcctctggtgccaccttcacctggacgccctcaagtgggaagagcgctgttcaaggaccacctgagcgtgacctctgtggctgctacagcgtgtccagtgtcctgcctggctgtgcccagccatggaaccatggggagaccttcacctgcactgctgcccaccccgagttgaagaccccactaaccgccaacatcacaaaatccggaaacacattccggcccgaggtccacctgctgccgccgccgtcggaggagctggccctgaacgagctggtgacgctgacgtgcctggcacgtggcttcagccccaaggatgtgctggttcgctggctgcaggggtcacaggagctgccccgcgagaagtacctgaacttgggcatcccggcaggaagcccagccagggcacccacccaccttcgctgtgaccagcatactgcgcgtggcagccgaggactggaagaagggggacaccttctcctgcatggtgggccacgaggccctgccgctggccttcacacagaagaccattcgaccgcttggcgggtaaacccacccatgtcaatgtgtctgttgtcatggcggaggtggacggcacctgctactgagccgcccgcctgtccccacccctgaataaaatccntactccccc

SEQ ID NO: 4832 - DNA, 476 bp, Homo sapiens
tgatgagcattttaatttggaaattcctctttttttgcaccgcgaaaaaaattttatcccagggaggccaaagtttcatgggaagtgggttaaccccctccaatggggtaactcccaggggagtgttcccggagccggacggcaaggacagcacctacagccttagcaggaccctgacgctgggcaaagcagacttcggggaacccaaagtttacgcctgggaagtcccccctcggggcctgggcttgcccgttacaaagggcttcaacaggggggagttttagggggggaagtgcccccacctggtcctcagttccagcctgaccccctcccatcctttggcctctgaccctttttccccagggggcctacccctattggggtcccccaggtcatttttcccctcccccccctccccccccttggctttaattttgctaatgttgggggggaatgaataaataaagtgaatcttt

SEQ ID NO: 4833 - DNA, 509 bp, Homo sapiens
aacccgtcaatcagcagcgagacacagcggctcagacatagccccgggatcttactaatcgtcatcactggacgccacaggtgtaagagggtggttttcctgcagcagtaggctagtagcttatcacttgagattgcacctatggtcctccatagagttcctctaagaagaacacaccagaaatttgtcattgccacttcaaccaaaatcgatatcagcaatgtaaaaatcccaaaacatcttactgatgcttacttcaagaagaagaagctgcggaagcccagacaccaggaaggtgagatcttcgacacagaaaaagagaaatatgagattacgaagcagcgcaagattgatcagaaagctgtggactcacaaattttaccaaaaatcaaagctattcctcagctccagggctacctgcgatctgtgtttgctctgacgaatggaatttatcctcacaaattggtgttctaaatgtcttaagaacctaattaaatagctgactacaa

SEQ ID NO: 4834 - DNA, 525 bp, Homo sapiens
cgcctacatggcacgggggcaggcccatccacggggggagactgaggcagagaacgtccatcctaaggcatacgggtcctggcatcttgcccagggcaatggctggccccaacaccaatggttcccagtgctttcatctgcactgccaagcactgagtggttggatggcaagcatgtggtgtttggcaaagtgaaagaaggcatgaatattgtggaggccatggagcgctttgggtccaggaatggcaagaccagcaagaagatcaccattgctgactgtggacaactcgaataagtttgacttgtgttttatcttaaccaccagatcattccttctgtagctcaggagagcacccctccaccccatttgctcgcagtatcctagaatcttctgtgctctcgctgcagttctctttgggttccatgttttccttgttccctcccatgcctaggtggattgcagagttaagtttatgattatgaaataaaaactaaataacaattgtcctcgtttgaaaaaaaaaa

SEQ ID NO: 4835 - DNA, 1297 bp, Homo sapiens
  misc_feature (1288)..(1288): n is a, c, g, or t
atggaagccccagctcagcttctcttcctcctgctactctggctcccagataccaccggagaaattgtgttgacacagtctccagccaccctgtctttgtctccaggggaaagagccaccctctcctgcagggccagtcagagtgttggcagctacttagcctggtaccaacagaaacctggccaggctcccaggcccctcatctatgatgcatccaacagggccactggcatcccagccaggttcagtggcagtgggtctgggacagacttcactctcaccatcagcagcctagagcctgaagattttgcagtttattactgtcaacaccgtgacaattggcctccgggggccactttcggcggagggaccaaggtggagatcaaacataccaccggagaaattgtgttgacacagtctccagccaccctgtctttgtctccaggggaaagagccaccctctcctgcagggccagtcagagtgttggcagctacttagcctggtaccaacagaaacctggccaggctcccaggcccctcatctatgatgcatccaacagggccactggcatcccagccaggttcagtggcagtgggtctgggacagacttcactctcaccatcagcagcctagagcctgaagattttgcagtttattactgtcaacaccgtgacaattggcctccgggggccactttcggcggagggaccaaggtggaaatcaaacgaactgtggctgcaccatctgtcttcatcttcccgccatctgatgagcagttgaaatctggaactgcctctgttgtgtgcctgctgaataacttctatcccagagaggccaaagtacagtggaaggtggataacgccctccaatcgggtaactcccaggagagtgtcacagagcaggacagcaaggacagcacctacagcctcagcagcaccctgacgctgagcaaagcagactacgagaaacacaaagtctacgcctgcgaagtcacccatcagggcctgagctcgcccgtcacaaagagcttcaacaggggagagtgttagagggagaagtgcccccacctgctcctcagttccagcctgaccccctcccatcctttggcctctgaccctttttccacaggggacctacccctattgcggtcctccagctcatctttcacctcacccccctcctcctccttggctttaattatgctaatgttggaggagaatgaataaataaagtgaatctttgcacctgtaaaaaaaaaaaaaaaaaaaaaaaaaaaaaaaaaaaaanaaaaaaaaa

SEQ ID NO: 4836 - DNA, 691 bp, Homo sapiens
ctacaaacaggggtcccatcaaggttcagtggaagtggatctgggacagatttcactttcaccattagcggcctgcagcctgaagattttgcaacatactactgtcaacaatatgataatctccctgaggtcactttcggcggagggaccaaggtggagatcaagcgaactgtggctgcaccatctgtcttcatcttcccgccatctgatgagcagttgaaatctggaacggcctctgtggtgtgcctgctgaatcacttctatcccagagaggccaaagtacagtggacggtggataacgccctccgatcgggtaactcccaggagagtgtccacgagcaggccagcaaggacagcacctacagcctcaggagcaccctgtgccggctgagcaaagcagacgccgagtaaccaccaagtgcacgcgtgcgaagtcacccatcaggggcctgggctgggccgtcccaaagagcttcaaccaggggagagtgttagagggagaagtgcccccacctgctcctcagttccagcctgaccccctcccatcctttggcctctgaccctttttccacaggggacctaccccaattgcggtcctccaggtcatctttcacctcacccccctcctcctccttggctttaattatgctaatgttggaggagaatgaataaataaagtgaatctttgcaa

SEQ ID NO: 4837 - DNA, 1684 bp, Homo sapiens
agacgggagtttctcctcttagcggccaccgccctcctgacgcacggccaagaggaaggccaagtcgagggccaagacgaagacatcccaccaatcacctgcgtacagaacggcctcaggtaccatgaccgagacgtgtggaaacccgagccctgccggatctgcgtctgcgacaacggcaaggtgttgtgcgatgacgtgatctgtgacgagaccaagaactgccccggcgccgaagtccccgagggcgagtgctgtcccgtctgccccgacggctctgctggtgctcctggcaaagatggactcaacggtctccctggccccattgggccccctggtcctcgcggtcgcactggtgatgctggtcctgttggtccccccggccctcctggacctcctggtccccctggtcctcccagcgctggtttcgacttcagcttcctgccccagccacctcaagagaaggctcacgatggtggccgctactaccgggctgatgatgccaatgtggttcgtgaccgtgacctcgaggtggacaccaccctcaagagcctgagccagcagatcgagaacatccggagcccagagggaagccgcaagaaccccgcccgcacctgccgtgacctcaagatgtgccactctgactggaagagtggagagtactggattgacccaaaccaagggctgcaaccgtggatgccatcaaagtcttctgcaacatggagactggtgagacctgcgtgtaccccactcagcccagtgtgggccagaagaactggtacatcagcaagaaccccaaggacaagaggcatgtctggttcggcgagagcatgaccgatggattccagttcgagtatggcggccagggctccgaccctgccgatgtggccatccagctgaccttcctgcgcctgatgtccaccgaggcctcccagaacatcacctaccactgcaagaacagcgtggcctacatggaccagcagactggcaacctcaagaaggccctgctcctccagggctccaacgagatcgagatccgcgccgagggcaacagccgcttcacctacagcgtcactgtcgatggctgcacgagtcacaccggagcctggggcaagacagtgattgaatacaaaaccaccaagacctcccgcctgcccatcatcgatgtggcccccttggacgttggtgccccagaccaggaattcggcttcgacgttggccctgtctgcttcctgtaaactccctccatcccaacctggctccctcccacccaaccaactttccccccaacccggaaacagacaagcaacccaaactgaaccccctcaaaagccaaaaaatgggagacaatttcacatggactttggaaaatatttttttcctttgcattcatctctcaaacttagtttttatctttgaccaaccgaacatgaccaaaaaccaaaagtgcattcaaccttaccaaaaaagaaagaagaaacaacgactctacttctctttaaaggaaacgacgcacacaaaaaaaaagggcgggcttaaatacccgcgggcccgttactcaccgtttggacacgggcctaggggggtaaagaagcggcgcgtaacagcggcgggacgccctgcttgcagaccttgtgtggcggcccccctagcggaaatgtggacgctgcgtgcgttaacccag

SEQ ID NO: 4838 - DNA, 369 bp, Homo sapiens
  misc_feature (28)..(28): n is a, c, g, or t
acattcaagggggaaccttctgccccanctttgcatgattaaaagctttcctgcttggctcttattcttccacaagagaggactttctcaggccctggttgctaccggttcagcaactctgcagaaaatgtccatccttgtggcttcctcagctcctgcccttggcctgaagtcccagcattgatggcagtgcctcatcttcaactttagtgctcccctttacctaaccctacggcctcccatgcatctgtactccccctgtgtgccacaaatgcactacgttattaaatttttctgaagcccagagttaaaaatcatctgtccacctggctccaaagacaaaaaataaaaagaaaagaaaaagggaaa

SEQ ID NO: 4839 - DNA, 1632 bp, Homo sapiens
tctaaagaagcccctgggagcacagctcatcaccatggactggacctggaggttcctctttgtggtggcagcagctacaggtgtccagtcccagatgcaggtggtgcagtctggggctgaagtaaagaagcctgggtcctcggtgacggtctcctgcaaggcatctggaggcaccttcagcaactatgctatcagctgggtgcgacaggcccctggacaagggcttgagtggatgggagggatcatccctctttttggtacaccaacctactcacagaacttccagggcagagtcacgattaccgcggacaaatccaccagcacagcccacatggagctgatcagcctgagatctgaggacacggccgtgtattactgtgcgacagatcgctacaggcaggcaaattttgaccgggcccgggttggctggttcgacccctggggccagggcaccctggtcaccgtctcctcagcctccaccaagggcccatcggtcttccccctggcaccctcctccaagagcacctctgggggcacagcggccctgggctgcctggtcaaggactacttccccgaaccggtgacggtgtcgtggaactcaggcgccctgaccagcggcgtgcacaccttcccggctgtcctacagtcctcaggactctactccctcagcagcgtggtgaccgtgccctccagcagcttgggcacccagacctacatctgcaacgtgaatcacaagcccagcaacaccaaggtggacaagaaagttgagcccaaatcttgtgacaaaactcacacatgcccaccgtgcccagcacctgaactcctggggggaccgtcagtcttcctcttccccccaaaacccaaggacaccctcatgatctcccggacccctgggggtcacaggcgtggtggtggacgtgagccacgaagaccctgaggtcaagttcaactggtacgtggacggcgttgaggtgcataatgccaagacaaacccgcgggaggagcagtacaacagcacgtaccgtgtggtcagcgtcctcaccgtcctgcaccagggactggctgaatgggcaaggagtacaagtgcaaggtctccaacaaagccctcccagcccccatcgagaaaaccatctccaaagccaaagggcagccccgagaaccacaggtgtacaccctgcccccatcccgggatgagatgaccaagaaccaggtcagcctgacctgcctggtcaaaggcttctatcccagcgacatcgccgtggagtgggagagcaatgggcagccggagaacaactacaagaccacgcctcccgtgctggactccgacggctccttcttcctctacagcaagctcaccgtggacaagagcaggtggcagcaggggaacgtcttctcatgctccgtgatgcatgaggctctgcacaaccactacacgcagaagagcctctccctgtctccgggtaaatgagtgcgacggccggcaagcccccgctccccgggctctcgcggtcgcacgaggatgcttggcacgtaccccgtgtacatacttcccgggcacccagcatggaaataaagcacccagcgctgccctgggcccctgcaaaaaaaaaaaaaaaaaaaaaaaaaaaaaaa

SEQ ID NO: 4840 - DNA, 124 bp, Homo sapiens; identical to SEQ ID NO: 73

SEQ ID NO: 4841 - DNA, 120 bp, Homo sapiens; identical to SEQ ID NO: 75

SEQ ID NO: 4842 - DNA, 141 bp, Homo sapiens; identical to SEQ ID NO: 77

SEQ ID NO: 4843 - DNA, 5618 bp, Homo sapiens; identical to SEQ ID NO: 4811
  misc_feature (53)..(150): n is a, c, g, or t
  misc_feature (205)..(206): n is a, c, g, or t
  misc_feature (1265)..(1282): n is a, c, g, or t
  misc_feature (1512)..(1544): n is a, c, g, or t
  misc_feature (1625)..(1650): n is a, c, g, or t
  misc_feature (1883)..(1906): n is a, c, g, or t
  misc_feature (1940)..(1948): n is a, c, g, or t
  misc_feature (3187)..(3204): n is a, c, g, or t

SEQ ID NO: 4844 - DNA, 424 bp, Homo sapiens; identical to SEQ ID NO: 81

SEQ ID NO: 4845 - DNA, 2927 bp, Homo sapiens; identical to SEQ ID NO: 4819

SEQ ID NO: 4846 - DNA, 1363 bp, Homo sapiens; identical to SEQ ID NO: 85

SEQ ID NO: 4847 - DNA, 1741 bp, Homo sapiens; identical to SEQ ID NO: 87

SEQ ID NO: 4848 - DNA, 3489 bp, Homo sapiens; identical to SEQ ID NO: 89
  misc_feature (2599)..(2599): n is a, c, g, or t
  misc_feature (2815)..(2815): n is a, c, g, or t

SEQ ID NO: 4849 - DNA, 243 bp, Homo sapiens
  misc_feature (1)..(1): n is a, c, g, or t
  misc_feature (172)..(172): n is a, c, g, or t
  misc_feature (216)..(216): n is a, c, g, or t
  misc_feature (224)..(224): n is a, c, g, or t
  misc_feature (227)..(227): n is a, c, g, or t
nattcggcactagggctgaggctgccttgggaagaagatgatcctaaacaaagctctgatgctgggggccctcgcctgaccaccgtgatgagcccttgtggaggtgaagacattgtggctgaccacgttgcctcttacggtgtaaacttgtaccagtcttacggtccctctngccagttcacccatgaatttgatggagacgaggagttctatgtngacctggngangaaggagactgtctgg

SEQ ID NO: 4850 - DNA, 6723 bp, Homo sapiens; identical to SEQ ID NO: 92

SEQ ID NO: 4851 - DNA, 9495 bp, Homo sapiens
  misc_feature (7528)..(7544): n is a, c, g, or t
  misc_feature (7848)..(7874): n is a, c, g, or t
ttttttttttttttttttgcagaattagaggttttattagttgctggtttgtattgattataagtttataacttcagaactgaattagaaataataagcattagcaatcagcaaggaaaaggtgaacatctctgctatttttcctttaatgtgtttggcatattcaaaatccctgttttagaaaagaaataatgttaaaacatgtttataatggagaaagactctaggcacagaaataatattgcagaagcttttaaagtgtctgttctgcaacttattttaaaacccaaaggagaaaggatggtactaccataaatcacattgacacagaaaaaccataggcagcttgagaacttaggtaacagtggagagtctaaaccgaaacattgactgcaggatctgtaagtcctgcagacaagtgtgatgctttgaaatgcctaaatagcttcaacgtagttggctgggagcattccggtcctgccagtcctctgcacagtgccatacatccagccttcatccaattgcttgaacatttatgatggcatctccatccttgaaggacacctcatctgcatcagcagccatatagtcatacatggcacggaagatttttccagcagtagatggatgagatgggatggaagataccgttgtctgttgggtagcaactgaagatgatcgttgttgtgggagctctgtggtttttgcatgtttgtaagctgttgagactgcaaagacacccccgtcgctgtaagtcgaaaggtggtggtctggtgcttctgaatgctcagacttctcctcacccccactgacgcttagtgcactggcagatcgtgactgctcccggctccggcgctgagcttggacattaatcatgtgtaagcttcgggactggatgttgtcttctgctggatcatagtcaaaaaccgaaccaggattagtacgccagacacgtaaacctgtaatagtctcctgatcttggtcattccgtttttgttccatttctaccactttcctctgaatacctcggtagttaatgtcactgaagtcctgcatgttcttctttactcgttcagtgataggatctgtcaccactggtgtgaagcaacccttgtgtttctcaaagtcttcatgatatttcaccgttgagatgtgccgttgggtctccctcacccgtctcatctcgggggtatccaatacataggcagctttgccttgtatttgtttccggaaactatcagaataaagaaccgagctaatgttttcttgattgcgtttgactctctgcatctcaggagtgacaggggttgcggtggctttccccacattttctttgtacaaaaccgagctaatattttcttgattgtgtttgactcgctccatctcgggagtgacaggtaaaggagttcccttgcccatgttttctttgtataacaccgagctaaagttctcttgattgcgtttgactctctcaatctctggagtcacagtggttggaatgcctgttcccaagttttctttgtacataaccgagctaatgtgcttctgcgtctccttcacacgtttcacttcaggcaggtcagggattggagttccttgtcctattgcttccttatacttcaccgagctaatgtggtcctgtgtttgtttcactctcatcatctcaggtgtctttccgatagccgttcctggtgagacatcctctttatataaaaccgagctgaaattcttctgattttcttttacacgcagtatttctggcgtgtcttgaacaactgtaatttttcctttactgtttttaaggtcacactggtattggagaaggctgaagttcttttggttctcccggactctctgtatctctggggtgtccaaaacagtctcataatacgacatggacttctcagcatcttccttgtactttttctggcttgaaagattcttgacttgttgggcatgaatgatctctggagtatcaaccacagaagtgaaattggctttctccatttctgctgattgcttatacttaatctgactggcaatatcagtagcattcctggccctcataaaatccggagtttcattggccatggcattcaggcctcttcctttgacttccagttccaggtctcgcttatattctttctcattgaggatttgagtggcattctttgctcttagcatgtcaggtgtatcttccatttcagtgaggcccttcccacggatgctttcctctagatctttcctgtactctttctcgcttgctattttagttgcatatttgacatgtaacaaagctggcgtgacctccaggccagtcaggtttctgcctttaatggactcttcataatctttcctatattctttcccactctgcatctgctgagactctttggcagtgatgtacgttggtgtttcaaagtccagcatgggttttcctcgttccttttcatacttttctttgtatttcactatactctgtaattctgtggcctcttttaggtgaagctgctccagattatcgggtatggtgtggtagtggcctttactcttctcatacttcttcttgtactggtaagaactggcaagttggcttgtattcaggacatgattcatgatcagagactccttcatgtcagtcacgggtttgtgaagtttcttcaggtcagccttgtatttaacctcacttgcaagattattagcatctttcatgactttgtagagctggctgtcttttggattgtattttggtgtcttgcccttttctttatcgaaattttctcggtatttaacctggctgctcagcttggctgccttcttggccatttctatgtctgggcgaccgagcatgcttaagccatggctgccttccttgcggtgcttggctctgtactccacctcactggcctgtttggctgcctgtgtggccttcttgatgtctggtcgatcagccactgtggtgtaatgcaggttctctttggcatcttttctgtaagcgacatcactttgcttcttggccacttccatagcatgtttcacctctggtggctccagcatgatggagtagttggattttcctttctccttgacaaacttctttttgtaatttgtatcactgacatgcttggtcacttccttgacgtgaacagtgtcccgggtctctggtagtgttgtgtatgagccctgtgccaagtgcttcttgacatggtccttgtacttgttctcagacaccaggttgctgacagtcttcgccagcaggatctgaggcgtgtcaggtacggcatggcaggttcctctttccttgacatgtttctctttgtatttcagatcactttctattaaagtattcctgagggcgagcaccgtgtttttgtcatcagtgacagaaagcttgcaacccttgaggaactcccggtccagcttatattcaaaatcgctttgctgcagggatgacttggcagcctggaggaagtccggtcggtcaggagtccacttccagtgggctttgttggcttcgtactgtttcttatagtccagattggtgttgactttgtaggcgtccttggctgctttgatatgaacagcatctggctcaatggtgcagttggatttatttctttggtatacttctttgtatttcagatcactgacttcatctttaaccttgcggacatgcagcaacatgggtgtgtcgtggattgtggtgtagcctctgggtttggccttgttgtattccaatttataaaggatatcgctgatttgtttgttgacttttgtagtacgcaggtgttctggagtatccacaattgaggtaaatttgtcctttgatttttcatagtttttcctgtatttgatctgactgatctggtcgcctgcggtcttagccagcagatgtctaggctcatcgactaccaggtggtatttatctttccgctgctcataatcagctctgtattttttctcattcatcaattgagttgcatacttgaaatgcctattgatcggagagtcggcaacatacttgaaatctgactttgtcctttcaaatacttctttatacttatacttgctgtagagagtcttgttcttttcagccagagtgaaatcaggggtatcataggcatagcaaccaatgcctttaagccaagtcaagtcttctttatattttacatcactgactgtgtcagtgactgctcggtggtggaaatgctctggacgatcaggaatggacctccagatacccaactggctcatgtagttctccttgtattttattttactgatgtcatctgtgactttgcgatgatagacaatgtctagggcatctttcaccgtgtggtatttccctttggtcttttgaaatgtttctttgtagcgtagatcactggcattccagtaagccctcttggctctgatgaggattggcgtatctggaaccggagtgtacttgtctttcatcttttcatattgaatcttgtactttttctcactgaccatgtccttcacgtctttagcatgcttcaaggctgtggtctggtttccagcgtgatgatggggtctctctttggtggcaagttcaacatacagatactgactctgaagcttctgccctcgcttggctcttaaaagatcaggagtatcaggaactgaagtaaagattgacttctgcttcttgcctgcagctctgtagaccagctcactcagatgtgtcttcagttcttgcacttttctgtattctggagtgtcaagcaccactttgtatttgtctcgcatcttccttgccttatcagtgtataggtaattagaccagagcttccgcaggtgccgggagcggaccatgtcaggagtgtcatacaggaagcagccaaatcccttcaggacctgcaagtcctctttgtatttaatatcactggtgatgtctcccacatagcggcaatggatcacttggggtgtgtatggcagagagatcatgtggccctgcatcttgaagaagtctgatttgtagatcaactcactgacagcctcttgtgtcttcttgacttggcggatctcaggggtatcgggagttgtatggatcttgtctttcagtttgtggtacaattcccgatacagtctctcgctggtaacattgttgactctccggacgtggacaaatggaacatctttggggccaagtgtatacccatatgccttggtgtgttcataggcttctttgtacttgaaataactgctcatgtaacgggtgtccttgatgtgtttgaagtgaggagtgtcacctggaagtctatatccagtgggcagggtgcgcaggctggttttgtatagattcgaactctggagcttgtatgcatgaagggcccggtccagatccacggttttggtagttggagccactttgcctctgacactgtgcacatagtcatagtggtagacagcgtcacttagctgtttcccacttttgacagcctgcacgtagactggtgtatctgtgacaagcttgtagtcattccttgttttcaacatgtgagctttatacttgatatcatcacgtagatcataagcatgcttggcatggaggatttcaggagtgtcccagacgtagcaaccaatgcctttcagccagttgaggtcatccttgtatacaatatcgctgatctgatctgtgactttcctgacgtgatcattgacttgcaagtcggggtggcaaatccattcgtggaggcgcaggcggtaatcaatctcactgactttcttctgggaatccttggcagtaaccatctctaccatgtcgggcacgatgtggattttcatcttgttcttttcataaactgatctgtacaggcgatcgatgttaagcttgccaactcggaggcaccgtgctgtgttcggatcatcgtcaacacttcttggtaacgtataaagagctttgaacttttcatattcttcccgatatttgatatggctggccagatgcttctggttcttggcgtgtgtcagggacaaggtgctggaaggcaggatgtagctggtggctttcactctatcccaggcctccttgtacaggttactgctgtaaagattcttcaggtttctggttctgtcataatccactgtttctagaactgttgtgtatttgtccttaatctgatgataattttctttatattttacctcactggcattaatgccactctgaacagcagtcacatagaggggcgtgtctgtgaccagattatagttttgtagattttctttacctgctgctgtatattgtagctgactctgaaggtcgtatgatttcttggcatggaggatttggggtgtatcccaaacgtagcaaccaatgcctttcaaccaattcaggtcatctttatacacattatcactcaagatctcctgggcgtttcggacgcgtataacattgggttcttccagaagagacgtccactggtggaaatagtgtcgatactccaggtcactgaggatgtactggcaccttttagccagcacgtgattcatcatgtcattggggatatgaacatttgctttggtatcctcataatgttttctgtagttcaacgcactcctcatcttttggaaatccagacagtgaaccacaccagggaattcaccgatcacttttccagccaggtagtgacctttctgcttctcatatgtctctttgtatttaagctcactgttcaccagatcagcatgcttggctccaacaatgggaatgtagcgctcatccagggtgtacgcataggccttggtgccctcccacgcccctttatacagtatagtactgtagagttttcccatgtctttggagtgggagatatgtggtgtatctggtgaaaacgtatatttgccctttgctttattaaatgtttctttatattttacatcactttgattgacagaattaatcttggctaaaacaatctctggaggatccaccacacttgtaaagttaggatagttttcaagggcatttttcttatatttgatctgactcatcatttcctggttcttagtaacccttacatggtccacagaatccagtgggatccagccaatgcctcggagccactccaggtcagctctgtagacattatcactctgtaggtcataggcctttcttgcctgaataacatcgttctggtcaggatgacacatccattggtgcaagtaattacgataatcaatatcactgacaagggtctgcccctgcttggcggccaagactgacaccatatcagcaggtatattgattttggcctttgttttgtgatagtcctctttgtatagtctctcattctgaatctggcctgcatgctcaaaccaaaccagcttaggatcatctctcatcgtcgggacaccaacataatgacctttttgcttcacatgttcagctttgtatttcagctcactctgaacgtcattgcagtgatgggcatgaacaaatggcacagcatctggaggcaaaatgtaacctgtggctttttgtctctcccagccttccttnnnnnnnnnnnnnnnnngtatcctatcagcctcctgggcagtgtgcagcaggggggtttctgtgagggtgtactttgatttggtggcattccagtctttccggtatttaatatcatcgaggatctcgccactttgtttcgctgtcacataatcaactctgtcatccacaggcgtaaagttgagagtttctatttttgtgcgatattttttctcactgaagatgtccgcggcatgtttggcatgattgacggacacggagtcatttggcatccacccaattccacgcaaccattccaagtcagccttgtaaacattatcgcnnnnnnnnnnnnnnnnnnnnnnnnnnngaatcacatcgttctggtcgggcatgcaggtccactggtgcaggtaattgcggtaatccatgtcactgaccagagcctgggaatttttagagtgcaggatggaaagcatgtccacagggctctggatcttggccttccatttggcccagtccagccggtactctcgttcattctggagcttgtcagctatgagggcccagcggatcttgttgtcatccctggctgtgagggtgcccacgtagtgtcccttctgcttctcatggtcaagcttatatttatagtcactggcaatctccctggaggccttggcagcctggatggggatggcatccagccggacatcacagcccgccttcatttcatcccagccctcacggtaaagtttattgctcacattaagagcatttgctctagcgagattaatttctggagtatctggcattatgtgtattgaagttttatccttgtcccaaacctctctgtactttggaatactaatattttcagcatttgatttagcaaggaccacttcaggtgtgtcaacaatgcttgtgtacttaaggttcaccacaggcgtccgatagacactgtcacaaaagatattctgggcgtttttgactctcaacacttcaggagacccttggggcatccagccaatgccacgcaaccactccaagtcagccttgtagagggcgtcgctctgtaggtcgtaggctttcctggcttggatcacatcattctggtcgggaaagcaagaccagcggtgcaggtaatggcgatagtccacatcacttgccagtgcctgaccttctttggcagcgctgatggacaccatgtccacagggatggagatcttggctttgtggtcgttgtaggcctttttgtacagcctgtcattctgcatcttcaacacatttgctgcccaaaccagtttagggtcttccttggcgctgcgacagccaatgtaatggcctttctgtttctcataagcagttttgtacagatagtcactggcaatatccctggaagccttggcatgctggatcccaatggcatctgctcgcaggtcataaccagtcatcttgacatcttcccaagcttgctgatagcgtttattgctgatctgcagggcattgattttggattgcagcatcaggggagtgtcagctggcacgttcacattagccttctctttctcccaggcatcgcgatacaatggctcactgatctgtacagcattgatctttgcctggattacttccggggtgtcaacaatgctggtgaatttgagggcctcaggctttatacgatacagcctttcattcaagagattctgggcattcttcactctcatcacttccacagaaccctctggcaaccatccaatacccttcagccattccaggtctgacttgtacaagttatcgctctgcaggtcgtaggctttcttggcctggatcacatcgttctgatctggcagacacgtccactggtgcagataattgcgataatcaatgtcgctaaccaggacctggcatttcttggcttgaacaattgacatcatgtccaacggtgtgttgtgaattcctttagacttctcataagctttcttatattctct

SEQ ID NO: 4852 - DNA, 1956 bp, Homo sapiens
gaagcgctgggcggaagtggctgtggctttgccctttggtttttgctggctgtgtggcggctccgcggttcgcaggtcgttcgctgagcgtctctgcttagccgcggtcatgagccggcacagccggctgcagaggcaggttctgagcctgtaccgcgatctgctgcgcgccgggcgtgggaagccgggcgccgaggcgcgagtgcgggcagagttccggcagcatgcgggcctgccgcggtccgacgtgctgcgcatcgagtacctgtaccgccgcgggcggcgccagctgcagctgctacgctcgggccacgccaccgccatgggcgccttcgtacgcccgcgggccccgaccggggagcctggcggcgtgggttcccagcctgacgacggcgacagtccaaggaacccccacgacagcacgggggcaccggagacccgccccgacggacggtgacaggcgaagagccgaactcgctcgatggcgtggtggagccaggaggctcgcctgactgcatggggggactggggaacccgcctaaggtgagaggtcttaagagactagcttgacgaattggggatgtcagagactcctccttggcgacgcagggggcctagagagccccgtgatggacggcaagggaggctgctattctccgcctgcatttctttttctggattacttagttatggcctttgcaaaggcaggggtatttgttttgatgcaaacctcaatccctccccttctttgaatggtgtgccccaccccgcgggtcgcctgcaacctaggcggacgctaccatggcgtgagacagggagggaaagaagtgtgcagaaggcaagcccggaggtattttcaagaatgagtatatctcatcttcccggaggaaaaaaaaaaagaatgggtacgtctgagaatcaaattttgaaagagtgcaatgatgggtcgtttgataatttgtcggaaaaacaatctacctgttatctagctttgggctaggccattccagttccagacgcaggctgaacgtcgtgaagcggaaggggcgggcccgcaggcgtccgtgtggtcctccgtgcagccctccggcccgagccggttcttcctggtaggaggcggaactcgaattcatttctcccgctgccccatctcttagctcgcggttgtttcattccgcagtttcttcccatgcacctgccgcgtaccggccactttgtgccgtacttacgtcatctttttcctaaatcgaggtggcatttacacacagcgccagtgcacacagcaagtgcacaggaagatgagttttggcccctaaccgctccgtgatgcctaccaagtcacagacccttttcatcgtcccagaaacgtttcatcacgtctcttcccagtcgattcccgaccccacctttattttgatctccataaccattttgcctgttggagaacttcatatagaatggaatcaggctgggcgctgtggctcacgcctgcactttgggaggccgaggcgggcggattacttgaggataggagttccagaccagcgtggccaacgtggtgaatccccgtctctactaaaaaatacaaaaattagctgggcgtggtgggtgcctgtaatcccagctattcgggagggtgaggcaggagaatcgcttgaacccgggaggcagaggttgcagtgagccaagatcgtgccactacactccagcctgggcgacaagaacgaaactccgtctcaaaaaaaaggggggaatcatacattatgtgctcatttttgtcgggcttctgtccttcaatgtactgtctgacattcgttcatgttgtatatatcagtattttgctccttttcatttagtatagtccatcgattgtatatccgtccttttgatggccttttgagttgtttcccatttgcggttatgaaataaagctgctataaacattaaaaaaaaaaa

SEQ ID NO: 4853 - DNA, 6004 bp, Homo sapiens
  misc_feature (1240)..(1280): n is a, c, g, or t
  misc_feature (2111)..(2136): n is a, c, g, or t
  misc_feature (2822)..(2822): n is a, c, g, or t
aagcttgggaaactgggcaactttttctttatttttgtttttatttattattattttggagatggagtttagctctttcgccccaggctacagtgaagtggcttgatcttggcctcactgcagcctctgcccatcccggttcaagtgattctctgccctcagcctcccgagtagctgggattataggtgcctgccacatgcccggctaatttttttgtatttttagtagagaggagtttctccatgttggtcaggctggttttgaactcctgacctcaggtgatccacctgtcttggcctcccaaagtactaagattacaggtgtgagccaccgtgcctggccaacttattttttttctgagttcagtcttctagactatcggttaatacttttgaagttttgtcagttaccagaatatcagatatattcatatgcaaccagtggttttggtatgctgccattttgttaatctgtaccacattccacatttgtgcttataaggatgcatatcctattttaaacccgtagaataagagaagtgagattttgacccagttgatttagttgatgtgactaatctagaattatattctgtattactacagaataaaaggattacagctccttaaagtatacccttagttcagtcgtagagaaaactgcccatcaagacaggaagagctgggctgccttggagaagaacaatgactttattcccaaatggaggcgtagaagaaggagggtagaagtcaaaggaaatttctattcagggaaaagaaaaagctaacagaaagatgtatttttctttccttaacaagatagtaaacgtgagagtgggaatcctctaattctattcagggaaaagaaaaagctaacagagaaagtagtatttctttcctaacaaagatagtacagtgagtggggaaatccctctaacacgattcattaaaaaatgtgaactacgcagctggaggccattatcctaagcgaattaacccaggaacagaaaaccaaatagcccacatgtctcacttgcaagtggaagctaaacatggagtacttatggatataaaaatggcagcaacagacactgaggacagagcgggagggagaagaggggggttgaaactgttgtatacatgctcgctaccttggtgatggctacaattgcaccagacctcagctacatatgaaccgtgtacaactgtgctgtaccttgattaataattgaccggccannnnnnnnnnnnnnnnnnnnnnnnnnnnnnnnnnnnnnnnnaaatccgctgctcgggagctaggcaggagaaatgctgacctgggagggcagaggttgcagtgacccgagatcatggcattgcaactccgccctggggccaccaagagtgaaactccgtcttcaaaagggcaaaaaaacgaaaaaaaaaaaaaaaaaaaaaaaaaaaaagttgaagttataaaaaacaaaaacgtgaattaaaattgtgaaacttagatccaggtgtcgcattctgatgttgtctaatttcttgggccctatgacaaatatattttaatacatgtaatataacatgttactgataattattgaaactctgttcatttgtgggtgttttttaggattttttttttttaataggggagttgctggaagccatcaaacgtgactttggttcctttgacaagtttaaggagaagctgacggctgcatctgttggtgtccaaggctcaggttggggttggcttggtttcaataaggaacggggacacttacaaattgctgcttgtccaaatcaggatccactgcaaggaacaacaggttagatttaaaaattgtgatttcatttgggagagatgctctactgtaaagcattcaactagaaataaggaaaactaacagtgttttaagaacatgtaataatttgcaaatcttaacagataacacccagagtcttgtgtaagaaaaatgttttagaagtctgatatttcataaaattaagtacacgtaattttataggtacattaacaaacatgtttatttttatttattttttttgagacagactctactgttggcccccaggctggagtgcagtggtgcgatctcggnnnnnnnnnnnnnnnnnnnnnnnnnngttaattttcccagtctattttattgttagtatttgtcacattttctttgtaaacagtgaattaaaatattttataggtattcattcttatctagatttcctacttatataaaaaaacaagtgaatgagattgttacaaagggtaattttgtgtgagtagaataataaaagttgaaattgagaagatgcaatgttttagactgaaactgtggttggtttgttttccccttctttctaacaggccttattccactgctgggaattgatgtgtgggagcacgcttactaccttcagtataaaaatgtcaggcctgattatctaaaagctatttggaatgtaatcaactgggagaatgtaactgaaagatacatggcttgcaaaaagtaaaccacgatcgttatgctgagtatgttaagctgctctttatgactgtttttgtagtggtatagagtactgcagaatacagtaagctgctctattgtagcatttcttgatgttgcttagtcacttatttcataaaccaacttaatgttctgaataatttcttactaaacattttgttattgggcaagtgattgaaaatagtaaatgctttggtggattgaatctgattgggacatttcttcagagagctaaattacaattgcatttataaaaccatcaaaaatattccatccatatacttntggggacttgtagggatgcctttctagtcctatttattgagttatagaaaatctagtcttttgccccagttacttaaaaataaaatattaacactttcccaagggaaacactcggcttttctatagaaaattgcactttttgtcataatcctctgcagtgatacttctggtagatgtcacccagtggtttttgttaggtcaatgttcctgtatatagtttttgcaaatagagctgtatactgtttaaatgtagcaggtgaactgaactggggtttgcctcacctgcacagtaaaggcaaacttcaacagcaaaactgcaaaaaggtggtttttgcagtaggagaaaggaggatgtttatttgcagggcgccaagcaaggagaattgggcagctcatgcttgagcccaatctccatgatgcctacaagctagagtatttaaaggcagtggtaaatttcaggaaagcagaagttaaaggcaaaattgtaaatcagtcgagatcgggtgccttcagggtggtatggctagtataccaaaattgtaaatcactacatgaagcttatatattggtttggcctgaaaggtgaagtgggtaggcagggggcgggcttacaggttatggtggattcaaagactccctgatttgtgattggttaaggaagcaagctttgtctaaaaacttggggtccgcagaaaggaacattaaggtctggccaggcccctcaggaaagaaactgagagcaaagaatggaggtcagatttagtccctggtgttcccccttatctgacgtctgtgtgaatccatttggtgggggtctgggtttctgaaaagtagctcaggggcacgtgttaaggatgtctctaggtgactctaacttccctggctattgtttgaaactgttatgaccttcttgcttatcagcttgctggtttccttctcggggcgagctgggtgcctggagttttcggtgaaggaaactcaagattctcctttatttctgtgcttgtgggaatccccctgctcccaaagaggggtccctgactccgtctcacagggatctttttgtatatttggcttagcatcatacatttgccatgttgtttcatcatcttgcctaatttactgtttttgaatatttcatttgtttctaattgttactacagataatgctggggtgagcaactctgtgtacataggtttatctcctattggaatattttctttatataggcgttttttttttttctttttttttggagacagagcttgctctgttgcccaggctggagtgcaggtggccgcgacctggagctccactgcaacctccacttcccgggtccaagtgatgtcccaacctcagcctcctgaatagctgggattataggtgcatgctaccatgcctggctactttttgtatttttagcagagacagggtttcaccatgttggccagggtggtctcgaactcctgacctcaagtgatccgtctggctcagcctcccaaagtgctgggattacaggtgtgagccactgcacctggcctatataggcttttttcttaaacctatttagtaatgttttccaagtttcccaagttattttttattttaattttccccagttatttttctatttttttttcatggaaaaatggggtaacttagcagtttcaatattgaagactgaagtttaaaaaaatttaaattcaaggtacttttaaaattcagttagaaaagtaggctttaaaaattattagagacaagagtaccaaagcggtgtgtgtatgtgtgtgtgtgtatgcatgcttgtggattggaaaaactttggagactgattacttttcattatatatgtgtcacagtgaaacagcttttatgtgtcatgtaagattactgcttgcctctctaaggaaggtcgtgactgtttaaatagacgggcaaggtggaaccttttgaaagatgagcttttgaatataagttgtctgctagatcatggtttgtattgaactaacaaggtttgcagatctgctgacttatataaagctttttgattcctactaagctttaagatttaaaaaatgttcaatgttgaaatttctgtggggctctatttttgctttggctttctggtgagagagtgaggaagcattctttccttcactaagttttgtctttcttgtcttctggatagattgaattttaagagactaagggaatttacaaactaaggaatttagtcatctggtggaaaaggagactttaagattgttagggctgggcggggtgactcacatctgttaatcccctttgggcggccaaggcggcagaacacttgaaggagttcaagaccagcgtggccaacgtggtgaaaccctgtctctactaaaaaatacaaaattgtttagctctgtttttcataatagaaatagaaaaggtaaaattgcttttcttctgaaaagaacaagtattgttcatccaagaagggtttttgtgactgaatcagcagtgcctgcccatgtcatagctgtgcttcaaaaacctcagcatgattagttgtttggagcaaacaaggaagcaaagcaatacgtttttgaaattctatctgttgcttgactatattgtaataattaacattgaagttgagaaattcacaactttaattgtacacttcattgcaacttgaaattcatggtcttaaagtgagatttgaatttctattgagcgcctttaaaaaagtaataccaaaccataaagttaaaatctatgtatattgagtcatatctaaaaccacgtataaacataaattgtatttcctgttttaattccaggggaagtactgtttgggaaagctattattaggtaaatgttttacaaattactgtttctcactttcagtcaataccctaatgatcccagcaagataatgtcctgtcttctaagaggtgcatcaagcctggtacatactgaaaaccctataaggtcctggataatttttgtttgattattcattgaagaaacatttattttccaattgtgtgagtttttgactgttaataaaagaatctgtcaaccatcaaagaggtctgcattatgcttgcatgtcaaaaacattaaaaatcctataaatctactgtcattttcactgaagtttccaagggaaaggaattgtaattttgggctgttg

SEQ ID NO: 4854 - DNA, 2355 bp, Homo sapiens; identical to SEQ ID NO: 99

SEQ ID NO: 4855 - DNA, 634 bp, Homo sapiens; identical to SEQ ID NO: 101

SEQ ID NO: 4856 - DNA, 1531 bp, Homo sapiens; identical to SEQ ID NO: 102

SEQ ID NO: 4857 - DNA, 319 bp, Homo sapiens; identical to SEQ ID NO: 103

SEQ ID NO: 4858 - DNA, 6010 bp, Homo sapiens; identical to SEQ ID NO: 57

SEQ ID NO: 4859 - DNA, 1279 bp, Homo sapiens; identical to SEQ ID NO: 107

SEQ ID NO: 4860 - DNA, 225 bp, Homo sapiens; identical to SEQ ID NO: 108
  misc_feature (106)..(110): n is a, c, g, or t
  misc_feature (205)..(206): n is a, c, g, or t

SEQ ID NO: 4861 - DNA, 2927 bp, Homo sapiens; identical to SEQ ID NO: 4819

SEQ ID NO: 4862 - DNA, 1623 bp, Homo sapiens
  misc_feature (196)..(219): n is a, c, g, or t
gataaaatggcgcgtgctgcaacccgcgcccgcttcggagagagaaatgctggggtgcagcttcaagcttaggaccacgccaccatgcctatccaggtgctgaagggcctgaccatcactcattaagaacagaggaggctgcctgttactcctggtgttgcatccctccagacactctgctgtttcctgcctagtnnnnnnnnnnnnnnnnnnnnnnnnctaggaaagcgctgccacccacccacctgggccagagctggttctgctcctgctgcagggacactgagctggctatctcggcgcttcgggcaagaactgcaacaggctctcctgggtcctgcaggtgtacagccgggcccctgccttgtgcctcagctctcgagagctgctgctgccgggtgacctgatccaacctgataaggtgccatcttcagctaccactgcaaggccctgagggcaacagcagcacggcactgcccacccggctgctgatggcctggtgccagctgggagtcctcccggcacttcgaggccactgagccacccttccagccccagcccaccatggacaggggtatccagcttcctcctcaacctcgtcctctgcccctgagccagtgacgcccaaggacatgcctgttacccaggtcctgtaccagcactagctggtcaagggcatgacagtgctggaggccgtcttggagatccaggccatcactggcagcaggctgctctccatggtgccagggcccgccaggccaccaggctcatgctgggacccaacccagtgcacaaggacttggctgctgagccacacacccaggagaaggtggataagtgggctaccaagggcttcctgcaggctaggggaggagccacccccgcttccctattgtgaccaggcctatggggaggagctgtccatatgccaccgtgagacctgggcctggctctcaaggacagacaccgcctggcctggtgctccagaggtgaagcaggccagaatcctgggggagctgctcctggtttgagctgcattcaggaagtgcgggacatggtaggggaggcaaaaagccttgggcactaccctccctgtggagctgttcggtgtccgtcgagctagccacaccctgacaccatgttcaagggtaccggaagagaagggtgtctgcccccaacctcccctgtgggtgtcactggccagatgtcatgagggaagcaggccttgtgagtggacactgaccatgagtccctggggggagtgatcccccaggcatcgtgtgccatgttgcacttctgcccaggcagcagggtgggtgggtaccatggtgcccacccctccaccacatggggccccaaagcactgcaggccaagcagggcaaccccacacccttgacataaaagcatctggaggcttttaaaaccacaccatcaataccatccaacacacacagactacacaacagaaaaagagcgcgcgcgagacacaagcgggcagaacaccccccacttaagggccccaggataagaccgcggccacacgcgagagacagttgaggcactggtgtgacacaccaaaacatggcggggcagtcgacagcggacaacgctaccgcgagagt

SEQ ID NO: 4863 - DNA, 929 bp, Homo sapiens
ttttgtactgttattgtgcaacttgcatttgtcccctcttcttgtgcactaaagaccccacttcacttccctagtgttcagcagtggatgacctctagtcaagacctttgcactaggatagttaatgtgaaccatggcaactgatcacaacaatgtctttcagatcagatccattttatcctccttgttttacagcaagggatattaattacctatgttacctttccctgggactatgaatgtgcaaaattccaatgttcatggtctctccctttaaacctatattctaccccttttacattatagaaagggatgctggaaacccagagtccttctcttgggactcttaatgtgtatttctaattatccatgactcttaatgtgcatattttcaattgcctaattgatttcaattgtctaagacatttcaaatgtctaattgattagaactgagtcttttatatcaagctaatatctagcttttatatcaagctaatatcttgacttctcagcatcatagaagggggtactgatttcctaaagtctttcttgaatttctattatgcaaaattgccctgaggccgggtgtggtggctcacacctgtaatcccagcactttgggaggctgaggtgggaagatcccttactgccaggagtttgagaccagcctggccaacattaaaaaaacaacaacaaaacacaacaaacagtttgcggagcactagaccccacagagaagcgtaacaaacagcacacgcagtcggcacacagaggaccaccaagtgacaaaggtaaaacaggggcacacagcgggtaaccagagaagaagacactggggccacacaacatcgggagagactctcccacacaaaaaacgaccgcggcaaccggacctcctagcaaacacccaaggaaaacacagcgcagcc

SEQ ID NO: 4864 - DNA, 657 bp, Homo sapiens
agagatggggtcttgctatgttgtcaaggctgctcctcaactcctggtctcaagtgattctcctgcctaggcctcccaaagagctgggattacaggcgtgagctgcagcacctgaccacataaggttttatggggagtaaagagttaaggcattaggctggactgtaaatatttgatttctcttagtgcctctggtttaatattggtgacagggtctgcacatcagcgtatgtggcaggctaagtcttttccccagttctcctattcctcttctatctgctcaactctttgcctctatgacttatttatttccttttaaatctgcttggttctttgacttaacggaggaccttatgtagggggagaaacacgtgtattatgggaacaactgaaaggtcagcctgaagacttttgccctgttgctttctgagagtgctggatatgagtccctgtctctgaaacttctaaaaatatgcacctttaaccagcttccacggagggataagcctttgtcaatacaaatggtacagtgagcagcagaagagaggaatggaactgatagaaggtggagattctcagagtcctcgggctctagagtcctggggtctggagtcagggaactggatacatcccaccctaaccccagcacaggacaca

SEQ ID NO: 4865 - DNA, 1483 bp, Homo sapiens
ccaggcattaaatatatgatataatatgcatgtgtgttatttttgtaagtggattcttagaaaatataatgttctgtttctggtttttcacttaacagtattgtaggtaccttctctgccttaatgcgtacaaatctgctctaccccctccctgcataagcattctgatacatgactcttgtaattttaatgtagctttctgttggtagatctatatattttcctttttttttttttttgttaggaaaatatattgtgatagcgtgggggtaagttgcatgttacatactatgtttttgaacacttacaaagtttctaaaagtaaattcctagaaatgttatagctctttctggggagcaagcagggattcagaataatccccatatttcattttgttcgtttgttttaatttgttatcatacagtgttatcggcaattgaaatacaaatattgtgtgaactttgaagaaaatatttttatttgttcattccccttagcagagttgctgagtctcattcctaatttgaggcctagacttttgggaaaacacagaggacgtccaccttttagagaacagtgataacttaccaatgggggtttgccggttgggagttattctggtatgcataatgcatacaggccacttgaaggtagaaggcaactattcttttttcttttgcttctggtggtttttgtttgtttgtttgtttgtctgtttgtttgaagatttgggggaagttatgccaggaggtagggggcagaacttggaaaaagaaatgaacttttgaaaaaatgtgacactgggttactgagtccaaaatgtcttagagttgacatcctaggccaagtcattatctctgtaacaggaaacattgtaagcttgattgcctgttcctgaagtgacttgcaatgaacccctcaatatcagggatcagagtgcctctcttcatgggtagtgagaaaggcagtgccctattctgcagcctaggctgctgggcaaaggggagaatttggtggtggtgaagggaatcaaggagggtttctgtcataagaaaccagtgtggtttacctttgccaggcgtctgagttcctgatgatgttcctgcagttatccttttccttatgatttaaaagtctttagcagctgagcacggtggctcacccctgtaatcccaacactttggaaggctgagggaggaagatagcttgagctcaggagttcaggaccagcctagacaacatagcgagactgcatctctactaaacatttaaaaaacaaaataaaaagaccgggcgcggtggctctcccttgtaatcccaccactttaggaggccgaggcgggtggatcacaaagtcaggagttcaccgtcaggagatcacaggaggtggaggttacagtgagccgagaccgcgccactgcgctctggcctgggcaacagagcaagactccatctcaaataaataaataaataaataacatt

SEQ ID NO: 4866 - DNA, 112 bp, Homo sapiens; identical to SEQ ID NO: 114

SEQ ID NO: 4867 - DNA, 405 bp, Homo sapiens; identical to SEQ ID NO: 115
  misc_feature (4)..(4): n is a, c, g, or t

SEQ ID NO: 4868 - DNA, 538 bp, Homo sapiens; identical to SEQ ID NO: 116
  misc_feature (374)..(374): n is a, c, g, or t
  misc_feature (381)..(381): n is a, c, g, or t
  misc_feature (435)..(435): n is a, c, g, or t
  misc_feature (442)..(442): n is a, c, g, or t
  misc_feature (473)..(473): n is a, c, g, or t
  misc_feature (508)..(508): n is a, c, g, or t
  misc_feature (533)..(533): n is a, c, g, or t

SEQ ID NO: 4869 - DNA, 3614 bp, Homo sapiens
  misc_feature (3478)..(3478): n is a, c, g, or t
  misc_feature (3487)..(3487): n is a, c, g, or t
  misc_feature (3489)..(3489): n is a, c, g, or t
  misc_feature (3523)..(3523): n is a, c, g, or t
  misc_feature (3526)..(3526): n is a, c, g, or t
  misc_feature (3528)..(3529): n is a, c, g, or t
  misc_feature (3539)..(3539): n is a, c, g, or t
  misc_feature (3546)..(3546): n is a, c, g, or t
  misc_feature (3552)..(3552): n is a, c, g, or t
  misc_feature (3554)..(3554): n is a, c, g, or t
  misc_feature (3563)..(3563): n is a, c, g, or t
  misc_feature (3593)..(3593): n is a, c, g, or t
  misc_feature (3597)..(3597): n is a, c, g, or t
attcataagactcagagcagttccaggagtccatttacgggaggggggagatgagcgctgctgaggcttgggggctcaggtcccgcaccattccccctccgcgacaatctgagagagctccagtggttacttttatctacctgtccgttcaccctaaactgtcactcgtcagtctcactctgagaagagacagtaacttgaaacgttgttctaaactcctaggcccgtcccccaaacacccttttgactgggacccccgcccctgcatgggacctcgcgcagaggggggtgtgtatgtgtgtgagtgtagaggaaggcttggcctaaggcctctccttctccctccccttgcctctggggtgggggtggggtgttgtggctgtgtgtgtggctgtggctccgtcccgggggttctgtcacccggctgtgtccagcctcctctccacccccatacctaagagtcaccaacccggggtgtgattcaccacccgctggaaccgtgcaacctttccccgaggaagaaggaggaggtagaagccagttgagcagaaatcctctcattaaccactgcgtcacggtgtagtggaagggtgggtgttgtggctttttccctgtgacacacacatccacactcgctcaccctgtgctcactcacggagtcggtgtgtgttatgtgtgttgggtgtgtgtgtgtcggtgtctttgtttgtgtgtctacgcctgtgtgtgtatgtgtcaccccgtaggagtgcgccggtctcggggaaatgcccggttccttcgtgcccacggtcaccgcgatcacaaccagccaggacctccagtggcttgtgcaacccaccctcatctcttccatggcccagtcccaggggcagccactggcctcccagcccccggtcgtcgacccctacgacatgccgggaaccagctactccacaccaggcatgagtggctacagcagtggcggagcgagtggcagtggtgggccttccaccagcggaactaccagtgggcctgggcctgcccgcccagcccgagcccggcctaggagaccccgagaggagacggtgagtaagggacatcagaacttggcctgggtagggggaagcaagagaggcaggaagtttcttatgaatggaggggggctccactaaggcctcagtgttacagaaaccccaagatccttgctacacgagcgaggaccggaggcttgttttttggctcttgggggttctgaaagaagtagaggttcgggatgggtggaggagtgctgtatccccaaatctcatggcctctatctccctgactcagctcaccccagaggaagaggagaagcgaagggtgcgccgggaacgaaataaactagcagcagctaaatgcaggaaccggcggagggagctgaccgaccgactccaggcggtgaggacaggccctggggtgggagaggggatgttgaggggagctctctccccattctctgccccctctccacctgtacccttatcctgggttgagaactagacgttccacacatggaactaggtactgctgtggccagactgggtagcccagggcacaaacacagacccccatggacttaagtcaactcctggtcccccccccatttcctgaccccacggactactctcctagccttcatttcatcccaaggggccacatggggcccttgaggagaggggcgcccccatcatttctcccatctggtcttcagcaagtaacaacccattttgcctcagtttctccatctctgcaaaccctcatcaaatctcccgggctctttctacccttaacactctggaaagcctgtgaaatgaaattattccacctcctgccctagccacccacagctctcctggtgctggtggcatcccccaaaacccactcccttcctacgtcctcccttggtctgagagttccctgctgtatgcctgcagggtgagctgttactccttgagggaacaagggaattgtcaactttccttctctactttttctcttccccgggaggtagagagggaggggtaatagaagggaacacattaaaaacacataacagtggctcatgcctgtgatcccagcactttgagaggccaaggcaggaggattgcttgagcccaggagtttgagaccagcctgggaaacatagggaggacttgtctctaccaagaaaaaaaaaaattagttgggcatggtggtgcacaccactgtggtcccagctactatggaggctttagtgggagggatcgcttgagccgaggaggtccaggctgcagtgagccatgattgcactattgcactccagcctgggggacagagcgagactctggctcaaaagcaaaacaaaaccaaccgcataacgattgttcattcattcaacaaacctcctgcacaccagaaacttccccataaacctggccccttctgtaccatcctttggacagatgggggaaactgaggttcctggaaggcaagacccttgccccaactcccatggccaccaggactccatctcaggaggtgttttttctcagcccggggctgccttccagcagcaagtccaagggagccatgacccgagtttcccggtcactgacatgcttttttctccttcctctctctcttctgtgacctggcctccctggcctcaggagacagatcagttggaggaagaaaaagcagagctggagtcggagatcgccgagctccaaaaggagaaggaacgtctggagtttgtgctggtggcccacaaaccgggctgcaagatcccctacgaagaggggcccgggccgggcccgctggcggaggtgagagatttgccgggctcagcaccggctaaaggaagagggcttcagctggctgctgccgcccccgccaccaccgcccctgcccttccagaccagccaagacgcaccccccaacctgacggcttctctcttacacacagtgaagttcaagtcctcggcgaccccttccccgttgttaacccttcgtacacttcttcgtttgtcctcacctgcccggaggtctccgcgttcgccggcgcccaacgcaccagcggcagtgaccagccttccgatcccctgaactcgccctccctcctcgctctgtgaactctttagacacacaaaacaaacaaacacatggggggagagagacttggaagaggaggaggaggaggagaaggaggagagagaggggaagagacaaagtgggtgtgtggcctccctggctcctccgtctgatcctctgcggccactgcgccactgccatcggacaggaggattccttgggttttgtcctgcctcttgtttctgtggccccgcgaaggccggaaaagctggtgactttgggggacaggggggggggaaagggaatggaacccccccaggcttggctgttgggcctttcctggaggtcccaccccaagcctccctggggaaatggggtggcgaagagnccacacccntnacactccgaagacaacacggatgtcaaccacccnacncnnacacatcgcncttagcnaatgancncgtacgtcncagatcccgggtagccgcggcggaattgtncggnccagtgtgagcgaggca

SEQ ID NO: 4870 - DNA, 750 bp, Homo sapiens
taagaaactgaagatgataatacaacaatctttttatttatgtaagtcagattaacactggacaataaaccaatttctacccattaccataacagcttgtttataaagaacagaaaaattcagataggattctatctagggtcaagaggttttttaaccacccattcacagaggtatagattcacagataaataatcccaaactacttgctcgccatatttacacattcccattaaattaagcataaataaatatatacaaacttaacatgaataccctccagagctcttctcgtgaagagtcaatagattgatatttcttgattgtgtggcaaaaacaatgttagagaattagagaccaactcaaaggtggagtcgattttggcatttaaagaaggatagtgttcattccgttaaaaaaaaattgatacttttttttttaagccagtaatttcacatacatcgtcaaaggtggggaaacgccgtttgggctcttgaggcaacatcagacggtttaaggttatttcctttccacataatgtattacaagtacaggatatcagatgtgatgacaaattctctataaacactcttaactaggaaagcattgtagcagaggaacagtgtgtagataagctcgaggtttcgagttttccattcgaccaaagttttcgtaggatatgaaataattgcttgagagaaagtggcttccttggccaaggaaaacaaagcagccaggtctttaaaagcc

SEQ ID NO: 4871 - DNA, 631 bp, Homo sapiens
ttttttttttttttttttaatcagaaatatctgcgcacattgacaaatgtccaccggatgggaagaagaatgtggggtgtaaaattcccatttttgagacccacttgcttagaatgtattaaagacctataattgaaaataccttggcaaaatctcccaaaattgtctctcaaaataacagtatatacagtgtaacatacacaacatcctgttatactaatgaaaaaatctaagaaaaactctataggatgatatttagatattacagtcactatattaactattaggataatgtgccactaattcccaatcgtcactgctttcatgtagtgcttgctccatattgtcttaatgttaatccttaacatacacagcctaacatatttattgatgtgaaagtttttgttttattttcaacaacacggtctcaaccaggggtgattttcactaccagggaccatttgtcaatgtttagagacaattttagtttttactgctgtaggtagtggagtgtgctattcacatccggtaagtttagggcaggaaaactggtaaacctcctataatacgaggctagagcccacaacaaaattatcaggtccaaaaatgtcaatagtattgaaggtgagac

SEQ ID NO: 4872 - DNA, 452 bp, Homo sapiens
tttttttttttagaaatgagatctttcagtaatcctttaatttaattttttagagatggagtcttggtgtgttacccagggtggactcaaactcctgggctcaagtgatcctcctgcctcagcctcctgcatagctgggctacaggcatgcaccaccacacctggcttagtaatccttctttattaatggtttgtcacagtacgtttgtgatgttatattgctcatggcatactttatgtgttcgaacaaaggtggaaattcccattgatttttttttttttaaatgtatgcacaaacaatctggattttgaggagtacggtcaggaaaaaaaaaaaagaattagaggcccttgaaaggtcaaccgtaagcttcttagagttaaaatatgagtttaattttttcccacattttgacagttgaaattttgatagggacagtaaacctatgagc

SEQ ID NO: 4873 - DNA, 295 bp, Homo sapiens; identical to SEQ ID NO: 121
  misc_feature (84)..(84): n is a, c, g, or t
  misc_feature (201)..(201): n is a, c, g, or t
  misc_feature (282)..(282): n is a, c, g, or t
  misc_feature (288)..(288): n is a, c, g, or t

SEQ ID NO: 4874 - DNA, 465 bp, Homo sapiens
  misc_feature (29)..(29): n is a, c, g, or t
aaagcgagggctggaagtctggagccagngttcgcaacggcagccgcgggaagctcgggccggcagggtttccccgcacgctggcgcccagctcccggcgcggaggccgctgtaagtttcgctttccattcagtggaaaacgaaagctgggcggggtgccacgagcgcggggccagaccaaggcgggcccggagcggaacttcggtcccagctcggtccccggctcagtcccgacgtggaactcagcagcggaggctggacgcttgcatggcgcttgagagattccatcgtgcctggctcacataagcgcttcctggaagtgaagtcgtgctgtcctgaacgcgggccaggcagctgcggcctgggggttttggagtgatcacgaatgagcaaggcgtttgggctcctgaggcaaatctgtcagtccatcctggctgagtcctcgcagtccccggcagatcttga

SEQ ID NO: 4875 - DNA, 401 bp, Homo sapiens; identical to SEQ ID NO: 1512
  misc_feature (35)..(35): n is a, c, g, or t
  misc_feature (386)..(386): n is a, c, g, or t

SEQ ID NO: 4876 - DNA, 11376 bp, Homo sapiens
ggatcctagatattccttagtctgaggaggagcaattaagattcacttgtttagaggctgggagtggtggctcacgcctgtaatcccagaattttgggaggccaaggcaggcagatcacctgaggtcaagagttcaagaccaacctggccaacatggtgaaatcccatctctacaaaaatacaaaaattagacaggcatgatggcaagtgcctgtaatcccagctacttgggaggctgaggaaggagaattgcttgaacctggaaggcaggagttgcagtgagccgagatcataccactgcactccagcctgggtgacagaacaagactctgtctcaaaaaaaaaaaagagagattcaaaagattcacttgtttaggccttagcgggcttagacaccagtctctgacacattcttaaaggtcaggctctacaaatggaacccaaccagactctcagatatggccaaagatctatacacacccatctcacagatcccctatcttaaagagaccctaatttgggttcacctcagtctctataatctgtaccagcataccaataaaaatctttctcacccatccttagattgagagaagtcacttattattatgtgagtaactggaagatactgataagttgacaaatctttttctttcctttcttattcaacttttattttaacttccaaagaacaagtgcaatatgtgcagctttgttgcgcaggtcaacatgtatctttctggtcttttagccgcctaacactttgagcagatataagccttacacaggattatgaagtctgaaaggattccaccaatattattataattcctatcaacctgataagttaggggaaggtagagctctcctccaataagccagatttccagagtttctgacgtcataatctaccaaggtcatggatcgagttcagagaaaaaacaaaagcaaaaccaaacctaccaaaaaataaaaatcccaaagaaaaaataaagaaaaaaacagcatgaatacttcctgccatgttaagtggccaatatgtcagaaacagcactgagttacagataaagatgtctaaactacagtgacatcccagctgtcacagtgtgtggactattagtcaataaaacagtccctgcctcttaagagttgttttccatgcaaatacatgtcttatgtcttagaataagattccctaagaagtgaacctagcatttatacaagataattaattctaatccatagtatctggtaaagagcattctaccatcatctttaccgagcatagaagagctacaccaaaaccctgggtcatcagccagcacatacacttatccagtgataaatacacatcatcgggtgcctacatacatacctgaatataaaaaaaatacttttgctgagatgaaacaggcgtgatttatttcaaataggtacggataagtagatattgaagtaaggattcagtcttatattatattacataacattaatctattcctgcactgaaactgttgctttataggatttttcactacactaatgagaacttaagagataatggcctaaaaccacagagagtatattcaagaataagtatagcacttcttatttggaaaccaatgcttactaaatgagactaagacgtgtcccatcaaaaatcctggacctatgcctaaaacacatttcacaatccctgaacttttcaaaaattggtacatgctttaactttaaactacaggcctcactggagctacagacaagaaggtgaaaaacggctgacaaaagaagtcctggtatcttctatggtgggagaagaaaactagctaaagggaagaataaattagagaaaaattggaatgactgaatcggaacaaggcaaaggctataaaaaaaattaagcagcagtatcctcttgggggccccttccccacactatctcaatgcaaatatctgtctgaaacggttcctggctaaactccacccatgggttggccagccttgccttgaccaatagccttgacaaggcaaacttgaccaatagtcttagagtatccagtgaggccaggggccggcggctggctagggatgaagaataaaaggaagcacccttcagcagttccacacactcgcttctggaacgtctgaggttatcaataagctcctagtccagacgccatgggtcatttcacagaggaggacaaggctactatcacaagcctgtggggcaaggtgaatgtggaagatgctggaggagaaaccctgggaaggtaggctctggtgaccaggacaagggagggaaggaaggaccctgtgcctggcaaaagtccaggtcgcttctcaggatttgtggcaccttctgactgtcaaactgttcttgtcaatctcacaggctcctggttgtctacccatggacccagaggttctttgacagctttggcaacctgtcctctgcctctgccatcatgggcaaccccaaagtcaaggcacatggcaagaaggtgctgacttccttgggagatgccataaagcacctggatgatctcaagggcacctttgcccagctgagtgaactgcactgtgacaagctgcatgtggatcctgagaacttcaaggtgagtccaggagatgtttcagcactgttgcctttagtctcgaggcaacttagacaactgagtattgatctgagcacagcagggtgtgagctgtttgaagatactggggttgggagtgaagaaactgcagaggactaactgggctgagacccagtggcaatgttttagggcctaaggagtgcctctgaaaatctagatggacaactttgactttgagaaaagagaggtggaaatgaggaaaatgacttttctttattagatttcggtagaaagaactttcacctttcccctatttttgttattcgttttaaaacatctatctggaggcaggacaagtatggtcgttaaaaagatgcaggcagaaggcatatattggctcagtcaaagtggggaactttggtggccaaacatacattgctaaggctattcctatatcagctggacacatataaaatgctgctaatgcttcattacaaacttatatcctttaattccagatgggggcaaagtatgtccaggggtgaggaacaattgaaacatttgggctggagtagattttgaaagtcagctctgtgtgtgtgtgtgtgtgtgtgcgcgcgtgtgtttgtgtgtgtgtgagagcgtgtgtttcttttaacgttttcagcctacagcatacagggttcatggtggcaagaagataacaagatttaaattatggccagtgactagtgctgcaagaagaacaactacctgcatttaatgggaaagcaaaatctcaggctttgagggaagttaacataggcttgattctgggtggaagcttggtgtgtagttatctggaggccaggctggagctctcagctcactatgggttcatctttattgtctcctttcatctcaacagctcctgggaaatgtgctggtgaccgttttggcaatccatttcggcaaagaattcacccctgaggtgcaggcttcctggcagaagatggtgactggagtggccagtgccctgtcctccagataccactgagctcactgcccatgatgcagagctttcaaggataggctttattctgcaagcaatacaaataataaatctattctgctaagagatcacacatggttgtcttcagttcttttttttatgtctttttaaatatatgagccacaaagggttttatgttgagggatgtgtttatgtgtatttatacatggctatgtgtgtttgtgtcatgtgcacactccacacttttttgtttacgttagatgtgggttttgatgagcaaataaaagaactaggcaataaagaaacttgtacatgggagcgtctgcaagtgggagtaaaaggtgcaggagaaatctggttggaagaaagacctctataggacaggactcctcagaaacagatgttttggaagagatggggaaaggttcagtgaagggggctgaacccccttccctggattgcagcacagcagcgaggaaggggctcaacgaagaaaaagtgttccaagctttaggaagtcaaggtttaggcagggatagccattctattttattaggggcaatactatttccaacggcatctggcttttctcagcccttgtgaggctctacggggaggttgaggtgttagagatcagagcaggaaacaggtttttctttccacggtaactacaatgaagtgatccttactttactaaggaactttttcattttaagtgttgacgcatgcctaaagaggtgaaattaatcccatacccttaagtctacagactggtcacagcatttcaaggaggagacctcattgtaagcttctagggaggtggggacctaggtgaaggaaatgagccagcagaagctcacaagtcagcatcagcgtgtcatgtctcagcagcagaacagcacggtcagatgaaaatatagtgtgaagaatttgtataacattaattgagaaggcagattcactggagttcttatataattgaaagttaatgcacgttaataagcaagagtttagtttaatgtgatggtgttatgaacttaacgcttgtgtctccagaaaattcacatgctgaatccccaactcccaattggctccatttgtgggggaggctttggaaaagtaatcaggtttagaggagctcatgagagcagatccccatcatagaattattttcctcatcagaagcagagagattagccatttctcttccttctggtgaggacacagtgggaagtcagccacctgcaacccaggaagagagccctgaccaggaaccagcagaaaagtgagaaaaaatcctgttgttgaagtcacccagtctatgctattttgttatagcaccttgcactaagtaaggcagatgaagaaagagaaaaaaataagcttcggtgttcagtggattagaaaccatgtttatctcaggtttacaaatctccacttgtcctctgtgtttcagaataaaataccaactctactactctcatctgtaagatgcaaatagtaagcctgatcccttctgtctaactttgaattctattttttcttcaacgtactttaggcttgtaatgtgtttatatacagtgaaatgtcaagttctttctttatatttctttctttcttttttttcctcagcctcagagttttccacatgcccttcctaccttcaggaacttctttctccaaacgtcttctgcctggcctccattcaaatcataaaggacccacttcaaatgccatcactcactaccatttcacaattcgcactttctttctttgtcctttttttttttagtaaaacaagtttataaaaaattgaaggaataaatgaatggctacttcataggcagagtagacacaagggctactggttgccgatttttattgttatttttcaatagtatgctaaacaaggggtagattatttatgctgcccatttttagaccataaaagataacttcctgatgttgccatggcattttttttccttttaattttatttcatttcattttaatttcgaaggtacatgtgcaggatgtgcaggcttgttacatgggtaaatgtgtgtctttctggccttttagccatctgtatcaatgagcagatataagctttacacaggatcatgaaggatgaaagaatttcaccaatattataataatttcaatcaacctgatagcttaggggataaactaatttgaagatacagcttgcctccgataagccagaattccagagcttctggcattataatctagcaaggttagagatcatggatcactttcagagaaaaacaaaaacaaactaaccaaaagcaaaacagaaccaaaaaacctccataaatacttcctacccagttaatggtccaatatgtcagaaacagcactgtgttagaaataaagctgtctaaagtacactaatattcgagttataatagtgtgtggactattagtcaataaaaacaacccttgcctctttagagttgttttccatgtacacgcacatcttatgtcttagagtaagattccctgagaagtgaacctagcatttatacaagataattaattctaatccacagtacctgccaaagaacattctaccatcatctttactgagcatagaagagctacgccaaaaccctgggtcatcagccagcacacacacttatccagtggtaaatacacatcatctggtgtatacatacatacctgaatatggaatcaaatatttttctaagatgaaacagtcatgatttatttcaaataggtacggataagtagatattgaggtaagcattaggtcttatattatgtaacactaatctattactgcgctgaaactgtggtctttatgaaaattgttttcactacactattgagaaattaagagataatggcaaaagtcacaaagagtatattcaaaaagaagtatagcactttttccttagaaaccactgctaactgaaagagactaagatttgtcccgtcaaaaatcctggacctatgcctaaaacacatttcacaatccctgaacttttcaaaaattggtacatgctttagctttaaactacaggcctcactggagctacagacaagaaggtaaaaaacggctgacaaaagaagtcctggtatcctctatgatgggagaaggaaactagctaaagggaagaataaattagagaaaaactggaatgactgaatcggaacaaggcaaaggctataaaaaaaattaagcagcagtatcctcttgggggccccttccccacactatctcaatgcaaatatctgtctgaaacggtccctggctaaactccacccatgggttggccagccttgccttgaccaatagccttgacaaggcaaacttgaccaatagtcttagagtatccagtgaggccaggggccggcggctggctagggatgaagaataaaaggaagcacccttcagcagttccacacactcgcttctggaacgtctgagattatcaataagctcctagtccagacgccatgggtcatttcacagaggaggacaaggctactatcacaagcctgtggggcaaggtgaatgtggaagatgctggaggagaaaccctgggaaggtaggctctggtgaccaggacaagggagggaaggaaggaccctgtgcctggcaaaagtccaggtcgcttctcaggatttgtggcaccttctgactgtcaaactgttcttgtcaatctcacaggctcctggttgtctacccatggacccagaggttctttgacagctttggcaacctgtcctctgcctctgccatcatgggcaaccccaaagtcaaggcacatggcaagaaggtgctgacttccttgggagatgccataaagcacctggatgatctcaagggcacctttgcccagctgagtgaactgcactgtgacaagctgcatgtggatcctgagaacttcaaggtgagtccaggagatgtttcagcactgttgcctttagtctcgaggcaacttagacaactgagtattgatctgagcacagcagggtgtgagctgtttgaagatactggggttgggagtgaagaaactgcagaggactaactgggctgagacccagtggcaatgttttagggcctaaggagtgcctctgaaaatctagatggacaactttgactttgagaaaagagaggtggaaatgaggaaaatgacttttctttattagatttcggtagaaagaactttcacctttcccctatttttgttattcgttttaaaacatctatctggaggcaggacaagtatggtcgttaaaaagatgcaggcagaaggcatatattggctcagtcaaagtggggaactttggtggccaaacatacattgctaaggctattcctatatcagctggacacatataaaatgctgctaatgcttcattacaaacttatatcctttaattccagatgggggcaaagtatgtccaggggtgaggaacaattgaaacatttgggctggagtagattttgaaagtcagctctgtgtgtgtgtgtgtgtgtgtgtgtgtcagcgtgtgtttcttttaacgtcttcagcctacaacatacagggttcatggtgggaagaagatagcaagatttaaattatggccagtgactagtgcttgaaggggaacaactacctgcatttaatgggaaggcaaaatctcaggctttgagggaagttaacataggcttgattctgggtggaagctgggtgtgtagttatctggaggccaggctggagctctcagctcactatgggttcatctttattgtctcctttcatctcaacagctcctgggaaatgtgctggtgaccgttttggcaatccatttcggcaaagaattcacccctgaggtgcaggcttcctggcagaagatggtgactgcagtggccagtgccctgtcctccagataccactgagcctcttgcccatgattcagagctttcaaggataggctttattctgcaagcaatacaaataataaatctattctgctgagagatcacacatgattttcttcagctcttttttttacatctttttaaatatatgagccacaaagggtttatattgagggaagtgtgtatgtgtatttctgcatgcctgtttgtgtttgtggtgtgtgcatgctcctcatttatttttatatgagatgtgcattttgatgagcaaataaaagcagtaaagacacttgtacacgggagttctgcaagtgggagtaaatggtgttggagaaatccggtgggaagaaagacctctataggacaggacttctcagaaacagatgttttggaagagatgggaaaaggttcagtgaagacctgggggctggattgattgcagctgagtagcaaggatggttcttaatgaagggaaagtgttccaagctttaggaattcaaggtttagtcaggtgtagcaattctattttattaggaggaatactatttctaatggcacttagcttttcacagcccttgtggatgcctaagaaagtgaaattaatcccatgccctcaagtgtgcagattggtcacagcatttcaagggagagacctcattgtaagactctgggggaggtggggacttaggtgtaagaaatgaatcagcagaggctcacaagtcagcatgagcatgttatgtctgagaaacagaccagcactgtgagatcaaaatgtagtgggaagaatttgtacaacattaattggaaggtttacttaatggaatttttgtatagttggatgttagtgcatctctataagtaagagtttaatatgatggtgttacggacctggtgtttgtgtctcctcaaaattcacatgctgaatccccaactcccaactgaccttatctgtgggggaggcttttgaaaagtaattaggtttagctgagctcataagagcagatccccatcataaaattattttccttatcagaagcagagagacaagccatttctctttcctcccggtgaggacacagtgagaagtccgccatctgcaatccaggaagagaaccctgaccacgagtcagccttcagaaatgtgagaaaaaactctgttgttgaagccacccagtcttttgtattttgttatagcaccttacactgagtaaggcagatgaagaaggagaaaaaaataagcttgggttttgagtgaactacagaccatgttatctcaggtttgcaaagctcccctcgtcccctatgtttcagcataaaatacctactctactactctcatctataagacccaaataataagcctgcgcccttctctctaactttgatttctcctatttttacttcaacatgctttactctagccttgtaatgtctttacatacagtgaaatgtaaagttctttattctttttttctttctttcttttttctcctcagcctcagaatttggcacatgcccttccttctttcaggaacttctccaacatctctgcctggctccatcatatcataaaggtcccacttcaaatgcagtcactaccgtttcaggatatgcactttctttcttttttgttttttgttttttttaagtcaaagcaaatttcttgagagagtaaagaaataaacgaatgactactgcataggcagagcagccccgagggccgctggttgttccttttatggttatttcttgatgatatgttaaacaagttttggattatttatgccttctctttttaggccatatagggtaactttctgacattgccatggcatgtttcttttaatttaatttactgttaccttaaattcaggggtacacgtacaggatatgcaggtttgttttataggtaaaagtgtgccatggttttaatgggttttttttttcttgtaaagttgtttaagtttcttgtttactctggatattggcctttgtcagaagaatagattggaaaatctttttcccattctgtagattgtctttcgctctgatggtagtttcttttgctgagcaggagctctttagtttaattagattccattggtcaatttttgcttttgctgcaattgcttttcacgctttcatcatgaaatctgtgcccgtgtttatatcatgaatagtattgccttgatttttttctaggctttttatagtttggggtttttcatttaagtctctaatccatccggagttaattttggataaggtataaggaaggagtccagtttcatttttcagcatatggctagccagttctcccccatcatttattaaattgaaaatcctttccccattgcttgcttttgtcaggtttctaaaagacagatggttgtaggtacaatatgcagtttcttcaagtcatataataccatctgaaatctcttattaattcatttcttttagtatgtatgctggtctcctctgctcactatagtgagggcaccattagccagagaatctgtctgtctagttcatgtaagattctcagaattaagaaaaatggatggcatatgaatgaaacttcatggatgacatatggaatctaatgtgtatttgttgaattaatgcataagatgcaacaagggaaaggttgacaactgcagtgataacctggtattgatgatataagagtctatagatcacagtagaagcaataatcatggaaaacaattggaaatggggaacagccacaaacaagaaagaatcaatactaccaggaaagtgactgcaggtcacttttcctggagcgggtgagagaaaagtggaagttgcagtaactgccgaattc

SEQ ID NO: 4877 - DNA, 1473 bp, Homo sapiens
atggggcacctctcagccccacttcacagagtgcgtgtaccctggcaggggcttctgctcacagcctcacttctaaccttctggaacccgcccaccactgcccagctcactactgaatccatgccattcaatgttgcagaggggaaggaggttcttctccttgtccacaatctgccccagcaactttttggctacagctggtacaaaggggaaagagtggatggcaaccgtcaaattgtaggatatgcaataggaactcaacaagctaccccagggcccgcaaacagcggtcgagagacaatataccccaatgcatccctgctgatccagaacgtcacccagaatgacacaggattctacaccctacaagtcataaagtcagatcttgtgaatgaagaagcaactggacagttccatgtatacccggagctgcccaagccctccatctccagcaacaactccaaccctgtggaggacaaggatgctgtggccttcacctgtgaacctgagactcaggacacaacctacctgtggtggataaacaatcagagcctcccggtcagtcccaggctgcagctgtccaatggcaacaggaccctcactctactcagtgtcacaaggaatgacacaggaccctatgagtgtgaaatacagaacccagtgagtgcgaaccgcagtgacccagtcaccttgaatgtcacctatggcccggacacccccaccatttccccttcagacacctattaccgtccaggggcaaacctcagcctctcctgctatgcagcctctaacccacctgcacagtactcctggcttatcaatggaacattccagcaaagcacacaagagctctttatccctaacatcactgtgaataatagtggatcctatacctgccacgccaataactcagtcactggctgcaacaggaccacagtcaagacgatcatagtcactgagctaagtccagtagtagcaaagccccaaatcaaagccagcaagaccacagtcacaggagataaggactctgtgaacctgacctgctccacaaatgacactggaatctccatccgttggttcttcaaaaaccagagtctcccgtcctcggagaggatgaagctgtcccagggcaacaccaccctcagcataaaccctgtcaagagggaggatgctgggacgtattggtgtgaggtcttcaacccaatcagtaagaaccaaagcgaccccatcatgctgaacgtaaactataatgctctaccacaagaaaatggcctctcacctggggccattgctggcattgtgattggagtagtggccctggttgctctgatagcagtagccctggcatgttttctgcatttcgggaagaccggcagctcaggaccactccaatgacccacctaacaagatgaatgaagttacttatctaccctgaactttgaagcccagcaacccacacaaccaacttcactt

SEQ ID NO: 4878 - DNA, 429 bp, Homo sapiens
  misc_feature (120)..(120): n is a, c, g, or t
  misc_feature (260)..(260): n is a, c, g, or t
  misc_feature (282)..(282): n is a, c, g, or t
  misc_feature (286)..(287): n is a, c, g, or t
  misc_feature (343)..(343): n is a, c, g, or t
  misc_feature (397)..(397): n is a, c, g, or t
  misc_feature (419)..(419): n is a, c, g, or t
agacttccatatttccatttgcagttgggtgaagtggttagagctgaaaggggacagctggagtcaaacaacttaactcaaatatctgggaacgatttcgcgctgaggaagaccctttgngacttgtagctccactccggggaacggactcgccgggactgacagttgccggaagtgaggctgcggggaatggccgccgctgcgaccatggcggctgcggccgggaactggtgttgcgggctgggacctcagatatggangaggaagagggccccgctggcngttnngtcctgggctccaggaaccacttgcaacttggggagttggatatcacttctcgatngaattcatcctggatgaaagtggatgttcacatttcaggcaaatctggaggatnagtttagtaaaggaaagcctcntaaaaaccgg

SEQ ID NO: 4879 - DNA, 1603 bp, Homo sapiens
tgagatgagagctgccgacagttgggggtcaagggaggagacgccatgatccccaccttcacggctctgctctgcctcgggctgagtctgggccccaggacccacatgcaggcagggcccctccccaaacccaccctctgggctgagccaggctctgtgatcagctgggggaactctgtgaccatctggtgtcaggggaccctggaggctcgggagtaccgtctggataaagaggaaagcccagcaccctgggacagacagaacccactggagcccaagaacaaggccagattctccatcccatccatgacagaggactatgcagggagataccgctgttactatcgcagccctgtaggctggtcacagcccagtgaccccctggagctggtgatgacaggagcctacagtaaacccaccctttcagccctgccgagtcctcttgtgacctcaggaaagagcgtgaccctgctgtgtcagtcacggagcccaatggacactttccttctgatcaaggagcgggcagcccatcccctactgcatctgagatcagagcacggagctcagcagcaccaggctgaattccccatgagtcctgtgacctcagtgcacggggggacctacaggtgcttcagctcacacggcttctcccactacctgctgtcacaccccagtgaccccctggagctcatagtctcaggatccttggagggtcccaggccctcacccacaaggtccgtctcaacagctgcaggccctgaggaccagcccctcatgcctacagggtcagtcccccacagtggtctgagaaggcactgggaggtactgatcggggtcttggtggtctccatcctgcttctctccctcctcctcttcctcctcctccaacactggcgtcagggaaaacacaggacattggcccagagacaggctgatttccaacgtcctccaggggctgccgagccagagcccaaggacgggggcctacagaggaggtccagcccagctgctgacgtccagggagaaaacttctgtgctgccgtgaagaacacacagcctgaggacggggtggaaatggacactcggcagagcccacacgatgaagacccccaggcagtgacgtatgccaaggtgaaacactccagacctaggagagaaatggcctctcctccctccccactgtctggggaattcctggacacaaaggacagacaggcagaagaggacagacagatggacactgaggctgctgcatctgaagccccccaggatgtgacctacgcccagctgcacagctttaccctcagacagaaggcaactgagcctcctccatcccaggaaggggcctctccagctgagcccagtgtctatgccactctggccatccactaatccaggggggacccagaccccacaagccatggagactcaggaccccagaaggcatggaagctgcctccagtagacatcactgaaccccagccagcccagacccctgacacagaccactagaagattccgggaacgttgggagtcacctgattctgcaaagataaataatatccctgcattatcaaaataaagtagcagacctctcaattca

SEQ ID NO: 4880 - DNA, 847 bp, Homo sapiens
ggccacatggactggggtgcaatgggacagctgctgccagcgagagggaccagggcaccactctctagggagcccacactgcaagtcaggccacaaggacctctgaccctgagggccgatgaggccagggacaggccaggggggccttgaggcccctggtgagccaggccccaacctcaggcagcgctggcccctgctgctgctgggtctggccgtggtaacccatggcctgctgcgcccaacagctgcatcgcagagcagggccctgggccctggagcccctggaggaagcagccggtccagcctgaggagccggtggggcaggttcctgctccagcgcggctcctggactggccccaggtgctggccccgggggtttcaatccaagcataactcagtgacgcatgtgtttggcagcgggacccagctcaccgttttaagtcagcccaaggccaccccctcggtcactctgttcccgccgtcctctgaggagctccaagccaacaaggctacgctggtgtgtctcatgaatgacttttatccgggaatcttgacggtgacctggaaggcagatggtacccccatcacccagggcgtggagatgaccacgccctccaaacagagcaacaacaagtacgcggccagcagctacctgagcctgacgcccgagcagtggaggtcccgcagaagctacagctgccaggtcatgcacgaagggagcaccgtggagaagacggtggcccctgcagaatgttcataggttcccagccccgaccccacccaaaggcctggagctgcaggatcccaggggaagggtctctctctgcatcccaagccatccagccct

SEQ ID NO: 4881 - DNA, 339 bp, Homo sapiens
ccatcctcttttcgatttccactccatctttgaaccaagttactcgaggcactggtcttccttgtaccaaagctttaattctaaggctctctccggacttaataatgagaccatcaaagtattcagggccaaactctactattggtggaacattttcatctcttgtcataataatgccagaagactgtgagggcgggcttatagttccaacagcatttcttgcaattattctgaactcatagcgatccccaggactgagtcctgtaactgtgtactgacattcactgacgtcagtaaagttgcatctcacccagcgttcatttccttgccgtttctcaa

SEQ ID NO: 4882 - DNA, 3139 bp, Homo sapiens; identical to SEQ ID NO: 4812
  misc_feature (596)..(610): n is a, c, g, or t
  misc_feature (2941)..(3137): n is a, c, g, or t

SEQ ID NO: 4883 - DNA, 498 bp, Homo sapiens
  misc_feature (82)..(82): n is a, c, g, or t
  misc_feature (107)..(107): n is a, c, g, or t
  misc_feature (231)..(231): n is a, c, g, or t
  misc_feature (278)..(278): n is a, c, g, or t
  misc_feature (308)..(308): n is a, c, g, or t
  misc_feature (320)..(320): n is a, c, g, or t
  misc_feature (398)..(398): n is a, c, g, or t
  misc_feature (414)..(414): n is a, c, g, or t
ttttttttttttttttttttttcacatccaatatggaatatttattgttaaaaaaaaaacccaaaagacaaaaaaaacagtncatcacaagtggcaaaaatgtgcanaaatgggagacttatgttctgttgctggaaatgtataatggtgcaaagaagtatgggccaggtacggtggctcacgcctgtaatcccagcactttgggaggctgaagcgggtagatcacctganaccaggagttggagaccagcctggccaacatggtaaaaacctgtctntattaaagaagtacaaaaattagatgggtntggaggcacacncctgtaatcccagctacttgggaggctgaggtacaagaatcacttgaacctgggagacggaggttgcagtgaactganattgtataccacactntatcctgggtgacagagtgaaaccctgtctcgaaaataataataaaaaaaaaaataagtatgacattttctcaaataatccaaa

SEQ ID NO: 4884 - DNA, 453 bp, Homo sapiens
tttttttttttttttgtcacttaaaacaacacacatttattatctcacacagtttctgggggtcaggaatccaggagtcacttagctggtggttctggcttagggactttcatggggctgcacataagatgtctactgggctgtgatctcatccgaaggccctactggggcagaggatccacttccacattcactcacgtggctgttggcaggaggccttagttccttgccatgtgggcctctccatagggctccttaacatgccagctggcttccccaaagtgagagatccaactgatgtgagaatgagggctaatgagcaagaaagaggccatagtgtctttcctaaccaaatctgggaagtgaggtaccatcacttctgcctcattctattggttacccagacccaccctggtacagagtgaggggactgcacaagggtgtgaatactgg

SEQ ID NO: 4885 - DNA, 434 bp, Homo sapiens
  misc_feature (278)..(278): n is a, c, g, or t
  misc_feature (285)..(285): n is a, c, g, or t
  misc_feature (318)..(318): n is a, c, g, or t
  misc_feature (333)..(333): n is a, c, g, or t
  misc_feature (369)..(369): n is a, c, g, or t
  misc_feature (383)..(383): n is a, c, g, or t
  misc_feature (410)..(410): n is a, c, g, or t
  misc_feature (419)..(419): n is a, c, g, or t
  misc_feature (424)..(424): n is a, c, g, or t
tcaggaaaaaaaatattcctacttaaattttaagtctataattcaatttaaatatgtgtgtgtctcatccaggataggataggttgtcttctattttccattttacctatttactttttttgtaagaaaagagaaaaatgaattctaaagatgttccccatgggttttgattgtgtctaagctatgatgaccttcatataatcagcataaacataaaacaaattttttacttaacatgagtgcactttactaatcctcatgggcacagtggctcacgnctgttantcccagcacttggggagggcatgtggggtgggntcacgagggtccggngtttcgaggaaccagccggggccaacctggtggaanccccgttcttccantaataattaccaaaaattaggccgggnctggtggcntaccnttgtaattcc

SEQ ID NO: 4886 - DNA, 957 bp, Homo sapiens
  misc_feature (145)..(172): n is a, c, g, or t
atggcagataaagtgcagactactttattgttcttagcagttggagagttttcagtggggatcttagggaatgcattcattggattggtaaactgcatggactgggtcaagaagaggaaaattgcctccattgatttaatcctcnnnnnnnnnnnnnnnnnnnnnnnnnnnntattgtgcgtaatactattagattgttttatattggtgctatatccagatgtctatgccactggtaaagaaatgagaatcattgacttcttctggacactaaccaatcatttaagtatctggtttgcaacctgcctcagcatttactatttcttcaagataggtaatttctttcacccacttttcctctggatgaagtggagaattgacagggtgatttcctggattctactggggtgcgtggttctctctgtgtttattagccttccagccactgagaatttgaacgctgatttcaggttttgtgtgaaggcaaagaggaaaacaaacttaacttggagttgcagagtaaataaaactcaacatgcttctaccaagttatttctcaacctggcaacgctgctccccttttgtgtgtgcctaatgtcctttttcctcttgatcctctccctgcggagacatatcaggcgaatgcagctcagtgccacagggtgcagagaccccagcacagaagcccatgtgagagccctgaaagctgtcatttccttccttctcctctttattgcctactatttgtcctttctcattgccacctccagctactttatgccagagacggaattagctgtgatttttggtgagtccatagctctaatctacccctcaagtcattcatttatcctaatactggggaacaataaattaagacatgcatctctaaaggtgatttggaaagtaatgtctattctaaaaggaagaaaattccaacaacataaacaaatctga

SEQ ID NO: 4887 - DNA, 305 bp, Homo sapiens; identical to SEQ ID NO: 140

SEQ ID NO: 4888 - DNA, 3205 bp, Homo sapiens
  misc_feature (1259)..(1280): n is a, c, g, or t
gaaagaaatctggtgcctgggggtccctgtgttcacccctagagtttgttttaaaatttttaattgaagcatgtgaagtgtacgtgcagaaaagtgggaacatgatagtgtatggcttggtggattttcacaaactgaacatacctgtgtaatcagcatctagacccagacccagagcatcacaaatatcccccatcctgggcttttcccagaggagatgggggcttctgaagatggacttacctgggacctgccccccatgagccaggacggtccccccacagtcagcctgtgcaaaggccccgtggccaggggtggaggagaatatgtgggtgtggacaggatgggagactgtggcctgaacaggagattttattatatctggagaccctgagagaccctgagacctggggcaccatggctggccaggtcagaagcatcctgactgcagaggtccgtgcagccacaccctcttccctgccagcaagttgtctgcggctcatcggaggcccctccgcctggagccttctatggacgtgatatgcctgtatctgtttttaattttcattcttcacttaggggaagtgaaatcgctcagagatgagatcctttaattgaaaacgaagtgtaacggaatctagtgtctttctaatgtggtaaaattctccatcaacatcacagtcagctggcagctgaacttcagaatctcacttacagcaggcgacacgggggtacaccgatgggtcacactgggtctgggggctccctggagctcctcctgcgtgtggtctggttaggagttgagttgtttgctccagggttattctcctcctcgagtcacagtcacacgaatacctgccttctctggctttccggctatacacatattcacatggcgctcaagaagttaggctcatggcaacgtgtgtctttctctggacaactggcccagtttacagtgaaatggagaatttcaggtctccacgtctgcccaggaaagaacttcagctgactccacggggatctggaaatccacgaccaatcccgatcggctcttattagctccccgctccacaagacacctgtgctttggaaatccaccaccaatcccgatcggctcttattagctccccgctccacaagacacctgtgatctggaaatctaccaccaatcccgatcggctcttattagctccccgctccacaagacacctgtgacatcctccagggccacaggagcacgtgctgaccagttttcnnnnnnnnnnnnnnnnnnnnnngtgtccagagggctgtttgcaaacactagtgcactttgtagcttttcaccctctgtcccagggaatctaggagagatgaggcccgtcagagtcaagagatgtcatccccccagggtctccaaggcatttccacactattggtggcacctggaggacatgcaccaaggcttgccagagccaacaggaagtgagcccagagcatggcacatgagcatcacccgctgatggtggcctgctgtgcctggtgccaacaggggcatcccggcccgtacccctccagacaggaagcatgggtttgcccacagacctgtcgggtgctcctgtgagtggcctccagatgtctttgtgcataggcacaagtgggccagggctggagggaggtgggaaacctcatcatccggtgggccctgccaatcttaacccagaacccttaggtattcctggcagtagccatgacattggagcaccttcctctccagccagaggctgacctgagggccactgtcctcagatgacaccacccaggagcaccctaggtgaggggtgagggcccccttatgtgaacctcttgcctcttcctttctcccatcagagtggttggatggagccattggcctccttttcttcagcgggcccttcaacctctctgcaccatgttgtctggctgaggagctactagaaaagctgagtggagtctcctttccaacaggatgatgcatttgctcaattctcagggctggaatgagccggctggtcccccagaaagctggagtggggtacagagttcagttttcctctctgtttacagctccttgacagtcccacgcccatctggagtgggagctgggagttagtgttggagaagaaacaacaaaagccaattagaaccactatttttaaaaagtgcttactgtgcacagatactcttcaagcactggacgtggattctctctctagccctcagcacccctgcggtaggagtgccgcctctacccacttgtgatggggtacagaggcacttgctcttctgcatggtgttcaataggctgggagttttatttatctcttcaaactttgtacaagagctcatggcttgtcttgggctttcgtcattaaaccaaaggaaatggaagccattcccctgttgctctccttagtcttggtcatcagaacctcacttggtaccatatagatcaaaagctttgtaaccacaggaaaaaataaactcttccatcccttaaagaatagaatagtttgtccctctcatgggaattgggctgtatgtatattgttcttcctccttagaatttagagatacaagagttctacttagaacttttcatggacacaatttccacaacctttcagatgctgatgtagagctattgggaaagaacttccaaactcaggaagtttgcagagagcagacagctagagataactcgggacccagagttggtcgacagatgttagatgtatcctagcttttagctataaaccactcaaagattcagcccccagatcccacagtcagaactgaatctgcgttgttgggaagccagcagtggccttgggaaggaagccatggctgtggttcagagagggtgggctggcaagccacttccggggaaaactccttccgccccaggtttcttcttctcttaaggagagattgttctcaccaacccgctgccttcatgctgccttcaaagctagatcatgtttgccttgcttagagaattactgcaaatcagccccagtgcttggcgatgcatttacagatttctaggccctcagggttttgtagagtgtgagccctggtgggcagggttggggggtctgtcttctgctggatgctgcttgtaatccatttggtgtacagaatcaacaataaataatatacatgtataaaaaaaaaaaaaaaa

SEQ ID NO: 4889 - DNA, 4605 bp, Homo sapiens
  misc_feature (2078)..(2092): n is a, c, g, or t
ggcgggcgctcggggcgtgtcgtatgggtcgggggcgcaacggctagtgtctcggtgtgtgtgtggttgctgttgtggctgagtgtggcggcgtgagtgttggtctgtgggggtgtgctgctgggtggtgtggcgccgtggtgtcgtgtgggcgcgctgtgcgggtgtggcgcgggggtacgtccgtttgtgtgtccgtgcggcgcggcgctgtgtggctccctcgcgcccaccacgctggcccccgggccccggctcgcccttcccaggcgccggctgcagcagagtttcagaacaagcttcctggaacccatgacccatgaagtcgaggtcgacatttataccgtctgagggtagcagctcgaaagtagaagaaagtgttgccagggacggcagtatctctttgtgtgaccctggcggcttatgggacgttggcttcagacctttgtgatacaccatgctgcgtgggacgatgacggcgtggagaggaatgaggcctgaggtcacactggcttgcctcctcctagccacagcaggctgctttgctgacttgaacgaggtccctcaggtcaccgtccagcctgcgtccaccgtccagaagcccggaggcactgtgatcttgggctgcgtggtggaacctccaaggatgaatgtaacctggcgcctgaatggaaaggagctgaatggctcggatgatgctctgggtgtcctcatcacccacgggaccctcgtcatcactgcccttaacaaccacactgtgggacggtaccagtgtgtggcccggatgcctgcgggggctgtggccagcgtgccagccactgtgacactagccaatctccaggacttcaagttagatgtgcagcacgtgattgaagtggatgagggaaacacagcagtcattgcctgccacctgcctgagagccaccccaaagcccaggtccggtacagcgtcaaacaagagtggctggaggcctccagaggtaactacctgatcatgccctcagggaacctccagattgtgaatgccagccaggaggacgagggcatgtacaagtgtgcagcctacaacccagtgacccaggaagtgaaaacctccggctccagcgacaggctacgtgtgcgccgctccaccgctgaggctgcccgcatcatctaccccccagaggcccaaaccatcatcgtcaccaaaggccagagtctcattctggagtgtgtggccagtggaatcccacccccacgggtcacctgggccaaggatgggtccagtgtcaccggctacaacaagacgcgcttcctgctgagcaacctcctcatcgacaccaccagcgaggaggactcaggcacctaccgctgcatggccgacaatggggttgggcagcccggggcagcggtcatcctctacaatgtccaggtgtttgaaccccctgaggtcaccatggagctatcccagctggtcatcccctggggccagagtgccaagcttacctgtgaggtgcgtgggaaccccccgccctccgtgctgtggctgaggaatgctgtgcccctcatctccagccagcgcctccggctctcccgcagggccctgcgcgtgctcagcatggggcctgaggacgaaggcgtctaccagtgcatggccgagaacgaggttgggagcgcccatgccgtagtccagctgcggacctccaggccaagcataaccccaaggctatggcaggatgctgagctggctactggcacacctcctgtatcaccctccaaactcggcaaccctgagcagatgctgagggggcaaccggcgctccccagacccccaacgtcagtggggcctgcttccccgcagtgtccaggagagaaggggcagggggctcccgccgaggctcccatcatcctcagctcgccccgcacctccaagacagactcatatgaactggtgtggcggcctcggcatgagggcagtggccgggcgccaatcctctactatgtggtgaaacaccgcaaggtcacaaattcctctgacgattggaccatctctggcattccagccaaccagcaccgcctgaccctcaccagacttgacnnnnnnnnnnnnnnngaagtggagatggcagcttacaactgtgcgggagagggccagacagccatggtcaccttccgaactggacggcggcccaaacccgagatcatggccagcaaagagcagcagatccagagagacgaccctggagccagtccccagagcagcagccagccagaccacggccgcctctcccccccagaagctcccgacaggcccaccatctccacggcctccgagacctcagtgtacgtgacctggattccccgtgggaatggtgggttcccaatccagtccttccgtgtggagtacaagaagctaaagaaagtgggagactggattctggccaccagcgccatccccccatcgcggctgtccgtggagatcacgggcctagagaaaggcacctcctacaagtttcgagtccgggctctgaacatgctgggggagagcgagcccagcgccccctctcggccctacgtggtgtcgggctacagcggtcgcgtgtacgagaggcccgtggcaggtccttatatcaccttcacggatgcggtcaatgagaccaccatcatgctcaagtggatgtacatcccagcaagtaacaacaacaccccaatccatggcttttatatctattatcgacccacagacagtgacaatgatagtgactacaagaaggatatggtggaaggggacaagtactggcactccatcagccacctgcagccagagacctcctacgacattaagatgcagtgcttcaatgaaggaggggagagcgagttcagcaacgtgatgatctgtgagaccaaagctcggaagtcttctggccagcctggtcgactgccacccccaactctggccccaccacagccgccccttcctgaaaccatagagcggccggtgggcactggggccatggtggctcgctccagcgacctgccctatctgattgtcggggtcgtcctgggctccatcgttctcatcatcgtcaccttcatccccttctgcttgtggagggcctggtctaagcaaaaacatacaacagacctgggttttcctcgaagtgcccttccaccctcctgcccgtatactatggtgccattgggaggactcccaggccaccaggccagtggacagccctacctcagtggcatcagtggacgggcctgtgctaatgggatccacatgaataggggctgcccctcggctgcagtgggctacccgggcatgaagccccagcagcactgcccaggcgagcttcagcagcagagtgacaccagcagcctgctgaggcagacccatcttggcaatggatatgacccccaaagtcaccagatcacgaggggtcccaagtctagcccggacgagggctctttcttatacacactgcccgacgactccactcaccagctgctgcagccccatcacgactgctgccaacgccaggagcagcctgctgctgtgggccagtcaggggtgaggagagcccccgacagtcctgtcctggaagcagtgtgggaccctccatttcactcagggcccccatgctgatttgggccttgtgccagttgaaagagggtggacagtcctgactcctgccaagtgagtggaggagactggtgtccccagcaccccgtaggggcctacgtaggacaggaacctggaatgcagctctccccggggccactggtgcgtgtgtcttttgaaacaccacctctcacaatttaggcagaagctgatatcccagaaagactatatattgttttttttttaaaaaaaaagtcgaaaaaaaagagacaggagaaaatgggtatttatttttctattatagccatatttatatatttatgcacttgtaaataaatgtatatgttttataattctggagagacataaggagtcctacccgttgaggttggagagggaaaataaagaagctgccacctaacaggagtcacccaggaaagcaccgcacaggctggcgcgggacagactcctaacctggggcctctgcagtggcaggcgaggctgcaggaggcccacagataagctggcaagaggaaggatcccaggcacatggttcatcacgagcatgagggaacagcaaggggcacgggtatcacagcctggagacacccacacagatggctggatccggtgctacgggaaacattttcctaagatgcccatgagaacagaccaagatgtgtacagcactatgagcattaaaaaaccttccagaatcaataatccgtggcgacatatctctgtaaaaacacacccggtgccctcaacaacagggaggctccccggagcgcctcaaaaaaaaaaagggggggcgggaaagagaacacggggcggccaacggaccagcccagattaaaggccgcgacaagacgataacaagggcgcgcacaactctcactgaggacggccagcagatggaacaacgcgtgacggacaccacaccgcccagagcttacaacgtggccggcgcagtcatcgaccagacgcttcaccgagcccga

SEQ ID NO: 4890 - DNA, 1706 bp, Homo sapiens
  misc_feature (570)..(599): n is a, c, g, or t
  misc_feature (715)..(734): n is a, c, g, or t
  misc_feature (1023)..(1046): n is a, c, g, or t
ggcacgaggctgggactaagtgcctggagagcctcctgggctcagtgcccccgccctgccctggcctccacagccttcgggagctcccagacccagtgctgagtgaggaggtggtggagggcattgctgctggcattgaggcagccctctgggacctgacacaaggcaccaatggccggtacaagaccaagtatcgcagcctgctgttcaacctgcgggaccccaggaacctggacttgtttctcaaagtggttcatggagatgtcaccccctacgacctggtgcggatgagctcgatgcagctggccccccaggagctggcccgctggcgggaccaggaggagaaaaggggcctgaatatcattgagcagcaacagaaggagccgtgcagacttccagcctccaaaatgacccacaagggcgaagtggagattcagcgggacatggaccagacactgaccctggaggatctgggaccgcagatgttcatggactgcagcccacaggccctgcccatcgcatcagaggacaccacggggcagcatgaccaccacttcttagaccccaacnnnnnnnnnnnnnnnnnnnnnnnnnnnnnngaatgagctgctaggctccttcgaagccgccaagagctgcggggacaatatcttccagaaagccctaagccaaactcctatgccaccctgggaaggtgttctggacatgttctccnnnnnnnnnnnnnnnnnnnngggcccagctggtctcgggacacagctgtcggcttgtccaggctctgcccaccgtgatccgctcggcaggctgcatcccctccaacattgtctgggaccttctggccagcatctgcccagccaaggccaaggtctggaggtcactcactcaagtctgttgctggctgtgctgctccccaaggaagggcttccagacacagcagggtccagcccctggttggggaaggttcaaaagatggtctccttcaacagtaaggtggagaagagatactatcagccagatgacagnnnnnnnnnnnnnnnnnnnnnnnncacccctcccccaggaggtgcctggcagcagagccagggcaggggcagtatagctccaaggggaatctctgcttggcagaggccccccagaggcagggggaggctctggccagagcctgaaaactggcagcatcctgggcgagggcagtggcccccagagccaggcttgcgccagtcccagcatccctattcagtagcaccagctggtcatggctttggccgtggccagcacttccacagggactcctgtccccaccaagccctgctccggcacctcgaatccctggcgaccatgagtcaccagctccaagccttactgtgcccccagaccaagagctccatcccccgccctctgcagcgtttgtctagcgcccttgcagctccagagccccctggcccagcccgtgactcctctttggggcctacagatgaagctggctctgagtgtcccttccctagaaaggcctgaccctccttacccaccagaacaggggttttgatgccctcactagtgttgaagcctgttccagagagaggtgggactgcaaggagaggatggtcagccctacccacctgccctgtttgagcttcctgtttgacaatgtttgctgttgattttttgttcaataaagaatttggtaaaaaaaaaaaaaaaaaaaa

SEQ ID NO: 4891 - DNA, 4469 bp, Homo sapiens
  misc_feature (9)..(56): n is a, c, g, or t
  misc_feature (1504)..(1519): n is a, c, g, or t
  misc_feature (2969)..(2983): n is a, c, g, or t
ggacgccannnnnnnnnnnnnnnnnnnnnnnnnnnnnnnnnnnnnnnnnnnnnnnntgctggtgctggggtgtgggccgcgggcgtcctctggtggcggggccggtggggcggcgggctatgccccagtgaagtacatccagcccatgcagaaaggacctgtgggaccgcccttccgtgagggcaaaggccagtacctggaaatgcctctaccgctgctgccgatggacctgaagggagagcccggcccccctgggaagcccgggcctcggggtccccctggcccccctggcttcccaggaaaaccaggcatgggaaagccaggactccatgggcagcctggccctgctgggccccctggcttctcccggatgggcaaggctggtcccccagggctccctggcaaggtcgggccaccagggcagccggggcttcggggggagccaggaatacgaggggaccagggcctccggggacccccaggaccccctggcctcccgggcccctcaggcattactatccctggaaaaccaggtgcccaaggggtgccagggcccccaggattccagggggaaccagggccccagggggagcctgggcccccaggtgatcgaggcctcaagggggataatggagtgggccagcccgggctgcctggggccccagggcaggggggtgcccccggcccccccggcctccctggtccagctggcttaggcaaacctggtttggatgggcttcctggggccccaggagacaagggtgagtctgggcctcctggagttccaggccccaggggggagccaggagctgtgggcccaaaaggacctcctggagtagacggtgtgggagtcccaggggcagcagggttgccaggaccacagggcccatcaggggccaaaggggagccagggacccggggcccccctgggctgataggccccactggctatgggatgccaggactgccaggccccaagggggacaggggcccagctggggtcccaggactcttgggggacaggggtgagccaggggaggatggggagccaggggagcagggcccacagggtcttgggggtccccctggacttcctgggtctgcagggcttcctggcagacgtgggccccctgggcctaagggtgaggcagggcctggaggacccccaggagtgcctggcattcgaggtgaccaggggcctagtggcctggctgggaaaccaggggtcccaggtgagaggggacttcctggggcccatggaccccctggaccaactgggcccaagggtgagccgggtttcacgggtcgccctggaggaccaggggtggcaggagccctggggcagaaaggtgacttggggctccctgggcagcctggcctgaggggtccctcaggaatcccaggactccagggtccagctggccctattgggccccaaggcctgccgggcctgaagggggaaccaggcctgccagggccccctggagaggggagagcaggggannnnnnnnnnnnnnnncccacggggcccccaggggtccctggctcccctggaatcacgggccctccggggcctcccgggcccccgggaccccctggtgcccctggggccttcgatgagactggcatcgcaggcttgcacctgcccaacggcggtgtggagggtgccgtgctgggcaaggggggcaagccacagtttgggctgggcgagctgtctgcccatgccacaccggccttcactgcggtgctcacctcgcccttccccgcctcgggcatgcccgtgaaatttgaccggactctctacaatggccacagcggctacaacccagccactggcatcttcacctgccctgtgggcggcgtctactactttgcttaccatgtgcacgtcaagggcaccaacgtgtgggtggccctgtacaagaacaacgtgccggccacctatacctacgatgagtacaagaagggctacctggaccaggcatctggtggggccgtgctccagctgcggcccaacgaccaggtctgggtgcagatgccgtcggaccaggccaacggcctctactccacggagtacatccactcctccttttcaggattcttgctctgccccacataacccgcggggggtgtcctgctgccctggcctcctcccctttagtggtagagcgaccttttcaattacaaagaacctcctggaaaaaaaaacaaaagctgaacagaggcggccgtggccttggcccgaggagactaacttgctttctccctgcatgcaggctgagattgtttctggaaggggctggcctgagtttctttcccccaaatgtctgtgcagtgtcagggctgcaccccataggccctgaggcacacagcccagccccttgtgagtcctggcctctgctgggccctgaaggagctgagagggagctcaactccccaccccgccacgtggggagacagcccttcccactggctccctgatggcacctgctggaggaaaggggcacggcctccctcacagcccttggctggggctcctccagctccccctgggacctccagcatatgacagtggactaaggactgtggggttttcctccaaggggaagggagaagaggggaccatcgaggtggcgagtgtggacaccctgccaggactgcagcccccatggtgatgctgtggcatcagacatgtccgtggtgggcacagtgcctgttgccctgggaaagggcaacctccctttcactgctccagtggcagccatggggaaggcagtttgtgagggcttggggcacagacctggggcaggaggcagctcttcacgttcatccctgtctctcccgggctgcccccgccagctctggctgtttagcttgagggcagcacagaggcccctgggacacctacaggccagaaagatcaacctctgtgaagtgtctagaagtatctagtgcagatggtggcggannnnnnnnnnnnnnncagcaaacatgagcactcttccctttctccccttccacctgctgcgggctgggctggttttctcaatacaaaattgtaagaggatccttgtcaccccagccaggtatccccaaggcagagcacctctcgtttggccctctgaacaaggtgcacgcgagctgggggatgaagacggctcccacttccttttccttaataagaaccatatggtgggtgtatgtgtgtacaagaggggttcatctgtgggggcttcctctccttccaccctctggttccaatttcctgttctaagcaggactagggcccaggaggctaaggctgggagagaaagggtgccaacaggtcccttgggaatgagttggctctggacgtttctgccctgttccccgatcagagctcctctgcaggaaacaggcaggatgcccctcccaacccctcagtccctacgtcaagcggagtggataaggctgagatgagtgctgggagtggtggacattcctgctcgtgcaaagatggccactttccccgcagctgcagggcctcgcgctcggccctcgccaggccagccccactccttgtaccaagtgtgaactggggtcattcggtctgtgatctcgttgcactgctccaagtctggctgtgtccaggcggtccatgttgaaaatggaggatggctgctgacttctgactggctgagcagtgggttccttcaggttccttgccaaccctcctcccctgcccacaacttctccaaacaaagcaggctgtttgctcacttcttcaaaaggaggaatgataacccaaatctgcccaagtgacacttgagaaggtttggctggggttcctggtggatttcttactacctaacgcccaagaaaaccaactaaggactctcaaaccatacctggtgggggttcttcgctcaacctcttcttccctaggtcaaagccactatcatctgatgtgttagggatgggttctgattggcagaaattaatcagctcccaatgggagcccacggaactaagtagggtcccaagaaaaaaaacgggagctatttcacagagctgagcttctgccaaatttcattcctcaaacctttcaggaggggtggttggcgtttctaaaatgtttatgggatttgagttgcaggtgtccacttaactgactagctttgataaacaatgtcagattttaactatgaaaacgacattaccttgtgcatttttatattgattcctattttttttttaagattaaagtttaaatgttttccactagtcatttcacttctaacttggtataggaagcttagctctctacatacctatcatgtgccctgtatcacagaagattcaggaaaaatgcacttgggaatcaaagaaaatggaacttctttttgaaaagacaagcaaccatgttaactgtattgacacatcctcaataaaacctgttgtataaaacaaaaaaaaaaaaaaaaaaaaaa

SEQ ID NO: 4892 - DNA, 3242 bp, Homo sapiens
agcgccgggagactctgccgtcggtgcgtgcgcggacacgcacccgtcccccttggtctcgccgccagccatggccgccgctacggcctccccccgcagcctccttgttctcctccaggtggtagtgctcgctctggcgcagattagaggtccaccgggagagcggggccccccgggtcccccgggaccgccgggagtgcctggatccgacggcatcgacggtgacaatgggccccctggaaaagctggccctccgggacccaagggcgagcctggcaaagctgggccagatgggccagacgggaagcccgggattgatggtttaactggagccaagggggagcctggccccatggggatccctggagtcaagggccagcccgggcttcctggtcctcctggccttccgggccctggttttgctggacctcctgggcctcctggacctgttggcctccctggtgagattggaatccgaggccccaagggggaccctggaccagatggaccatcggggcccccaggaccccctgggaaacctggtcgcccgggaaccatccagggtctggaaggcagtgcggatttcctgtgtccaaccaactgtccacccggaatgaaaggtcccccagggctgcagggagtgaaggggcatgcgggcaaacgcgggattctgggtgatcctggccaccaggggaagccgggtcccaagggagatgtgggtgcctctggagagcaaggcatccctggaccaccgggtccccagggcatcaggggctacccaggcatggcagggcccaagggagagacgggccctcatggatataaaggcatggtgggcgctatcggtgccactgggccaccgggtgaggaaggtcctaggggaccgccaggccgagctggggagaagggtgacgagggcagcccaggtattcgtggaccccaggggatcacaggcccgaaaggagcaacgggccccccaggcatcaacggcaaggatgggaccccaggcacgcctggcatgaagggcagtgcaggacaggcgggacagcccggaagtccaggccaccagggcctagcgggtgtgccaggccagcctgggacaaaaggaggccctggagaccagggtgagccgggcccgcagggccttcctggattctctggtccccctgggaaagagggagagccagggcctcgaggagaaattggtccccagggcatcatgggacagaagggtgaccaaggcgagaggggtccagtggggcaaccaggccctcagggaaggcagggccctaagggggagcagggcccccccggaattccagggccccaaggcttgccaggcgtcaaaggagacaagggctccccagggaagaccgggccccgcggcaaagtgggtgacccaggggtggccggcctccccggagagaaaggcgagaagggcgagtccggcgagccggggcccaagggacagcaaggagtacgtggagaacccggctaccctggccccagcggggatgcgggcgccccaggggttcagggctaccctggtccccccggccctcgaggactggccgggaaccgaggcgtgccaggacagcccgggagacagggcgtggagggccgggatgccactgaccagcacatcgtggatgtggcgctgaagatgctgcaagagcaactggcagaggtcgccgtgagtgccaagcgggaagccctgggtgcggtgggcatgatgggtcctccaggacctcctgggccccctgggtacccaggcaagcagggcccccatgggcaccctggccctcggggcgttcctggcatcgtgggagccgtgggtcagatcggcaacacggggcccaagggaaaacgtggagagaagggtgatccaggagaagtgggacgggggcaccccgggatgcctgggcccccagggatcccaggactccctggccggcctggccaggcaatcaacggcaaggatggagatcgagggtccccaggggctccaggagaggcaggtcgacctggcctgccaggccccgtggggctgccgggcttctgtgaacctgccgcctgccttggagcttcggcctatgcctctgcccgccttacagagcctggatccatcaaggggccttgagcatcaggcccagacagagcctggcaggcatcctggcgggaaggaccaggtcccctctggtggacatgcacccatccccagtccaggaaaccatctcccccaggaccttctgtctgggactcaggagtcctaaggaaaaggaattctaaaacatgggggaaggggaggtagagcactgatgggtgaaaaagtgaggccaacacacagggcaagtggtgtcgatggagtcgaagcgctgaaggaatagggcggctttccttccagcgagcatcattcggctgttaccaaaacaaacatcttaatctgcaccttcctccactggccatcttgtccttgggtcagtgggacatgggcacctcgggaggcccgggccctgcccagctacagttccacccctcagcttgaggaccaatactgaggtctatgccagttcctgatcccatctcactctctggacctaccaggtgactgctgctgggtgactcccctgaggcggctatacccttaagccagccccactacttccttccctgcctcccagctcagtatttaaacatcatctcccttctctttctcgcataactccccacccctttctccccgatccacccaggcctttctgtaaataaaagctcccaagttgggtacaaaccaggaaaaaaaaaaaaaaaaaaaaaaaaaaaaactagaaaaaaaaaaaaaaaaaaaaaaaaaaaaaaagggggggggcgcgccgcaaaagaccccccggggggggcgccacacgtagtatccagcgcgagacacccaccgtttcttgtgtggtaacacagggggcgccccaattagggggaggcgcgactaatctataaagcgccgcggcggcggcagcgcgcgcggtcttacaacaccacgccatgcggacgcgggcggaacaaaacgcggcccccgccgggggagaccaccctgtggaggaacaaggaccacccccacctctctgcggcgggggcgggagcagcccaactagggggagcaccaacacctcctcccccacggagatacttctaccacgcccccccaggagcggcccattactaactccccttccacgcgggtgcttccg

SEQ ID NO: 4893 - DNA, 3070 bp, Homo sapiens
  misc_feature (1078)..(1115): n is a, c, g, or t
ggtcggggggagctggcggcgagcgccgagccgggcgcgcagcgacggagctggggccggcctgggaccatgggcggacatgttcccgatttgaggtgaaaccatgaagagaaaatagaatacttaataatgcttttccgcaaccgcttcttgctgctgctggccctggctgcgctgctggcctttgtgagcctcagcctgcagttcttccacctgatcccggtgtcgactcctaagaatggaatgagtagcaagagtcgaaagagaatcatgcccgaccctgtgacggagccccctgtgacagaccccgtttatgaagctcttttgtactgcaacatccccagtgtggccgagcgcagcatggaaggtcatgccccgcatcattttaagctggtctcagtgcatgtgttcattcgccacggagacaggtacccactgtatgtcattcccaaaacaaagcgaccagaaattgactgcactctggtggctaacaggaaaccgtatcacccaaaactggaagctttcattagtcacatgtcaaaaggatccggagcctctttcgaaagccccttgaactccttgcctctttacccaaatcacccattgtgtgagatgggagagctcacacagacaggagttgtgcagcatttgcagaacggtcagctgctgagggatatctatctaaagaaacacaaactcctgcccaatgattggtctgcagaccagctctatttagagaccactgggaaaagccggaccctacaaagtgggctggccttgctttatggctttctcccagattttgactggaagaagatttatttcaggcaccagccaagtgcgctgttctgctctggaagctgctattgcccggtaagaaaccagtatctggaaaaggagcagcgtcgtcagtacctcctacgtttgaaaaacagccagctggagaagacctacggggagatggccaagatcgtggatgtccccaccaagcagcttagagctgccaaccccatagactccatgctctgccacttctgccacaatgtcagctttccctgtaccagaaatggctgtgttnnnnnnnnnnnnnnnnnnnnnnnnnnnnnnnnnnnnnncgaggatgaaagggaaagacgggagaagaaattgtacttcgggtattctctcctgggtgcccaccccatcctgaaccaaaccatcggccggatgcagcgtgccaccgagggcaggaaagaagagctctttgccctctactctgctcatgatgtcactctgtcaccagttctcagtgccttgggcctttcagaagccaggttcccaaggtttgcagccaggttgatctttgagctttggcaagacagagaaaagcccagtgaacattccgtccggattctttacaatggcgtcgatgtcacattccacacctctttctgccaagaccaccacaagcgttctcccaagcccatgtgcccgcttgaaaacttggtccgctttgtgaaaagggacatgtttgtagccctgggtggcagtggtacaaattattatgatgcatgtcacagggaaggattctaaaaggtatgcagtacagcagtatagaatccatgccaatacagagcatagggaaaggtccacttctagttttgtctgttactaagggtagaagattattgctttttaaaggctaaatattgtttgtgggaaccacagatggttggggttgaacagtaagcacattgctgcaatgtggtacgtgaattgcttggtacaaaatggccagttcacagaggaatagaaggtactttatcatagccagacttcgcttagaatgccagaataatatagttcaagacctgaagttgccaatccaagtttgcactcttctggcctgccccatgttactatgtgatggaaccagcacacctcaaccaaaatttttttaatcttagacatttttaccttgtccttgttaagaatttcttgaagtgatttatctaaaataaaggttggcaaactttttctgtaaagggccagattgtaaatatttcagactgtgtggaccaaaaggccacatacagtctctgtcataactactcaactctgtttctgaagcaggaaagccaccacagacagtacataaaggaatatgtgtagctgggttcccaggccggacaaaacagatggtgaccagatttggcccctgggctgtagtttgctgacccctcatctaaaaaataggctatactacaattgcacttcccagcactttgagaacgagttgaataccaagaattattcaatggttcctccagtaacttctgctagaaacacagaatttggtctgtatctgacactagaacaaaacttgagggtaaataaacattgaattagaatgaatcatagaaaactgattagaagaatacttgatgtttatgatgattgtggtacaagatagttttaagtatgttctaaatatttgtctgctgtagtctatttgctgtatatgctgaaatttttgtatgccatttagtatttttatagtttaggaaaatattttctaagaccagttttagatgactcttattcctgtagtaatattcaatttgctgtacctgcttggtggttagaaggaggctagaagatgaattcaggcactttcttccaataaaactaattatggctcattccctttgacaagctgtagaactggattcatttttaaaccattttcatcagtttcaaatggtaaattctgattgatttttaaatgcgtttttggaagaactttgctattagatagtttacagatctttataaggtgttttatatattagaagcaattataattacatctgtgatttctgaactaatggtgctaattcagagaaatggaaagtgaaagtgagattctctgttgtcatcggcattccaactttttctctttgtttttgtccagtgttgcatttgaatatgtctgtttctataaataaattttttaagaatacctaaaaaaaaaaaaaaaaaaaaaaaaaaaaaaaaaaaaaaaaaaaaaaaaaaaaaaaaaaaaaaaaaa

SEQ ID NO: 4894 - DNA, 980 bp, Homo sapiens
  misc_feature (863)..(863): n is a, c, g, or t
  misc_feature (867)..(867): n is a, c, g, or t
  misc_feature (874)..(874): n is a, c, g, or t
  misc_feature (886)..(886): n is a, c, g, or t
  misc_feature (894)..(894): n is a, c, g, or t
  misc_feature (933)..(933): n is a, c, g, or t
  misc_feature (941)..(941): n is a, c, g, or t
  misc_feature (951)..(951): n is a, c, g, or t
gttccggtgggctcgcgttgaggctgcggtcatggagggagcaggagctggatccggcttccggaaggagctggtgagcaggctgctgcacctgcacttcaaggatgacaagaccaaagaagcagcagtccgtggcgtgcggcaggcccaggcagaagacgcgctccgtgtggacgtggaccagctggagaaggtgcttccgcagctgctcctggacttctagggatctcagccgtggctgaggccacccccagaggagcccctggtccacagaagcaggccttgtgtttccagcggcctctgataagaggcagggaaggacctgaaggatttggagttgattcaaacaagatctctgggagtctccagcctgtgcagaaggggcaggactgcagtgcactgcgggccttggagtgtccagtggggacactggtgtgggaaggggcagcacctggggagtccctgcctctcctccctgggacaatagtgtgcatgccacccggggtcctacaggcaggtgctgggaaaggcctggccagcaggtagcctgtgtgtttgacaaacagcagctggcagcgctgcctcctgcccacattcctgccacccgacatcaaagctggcgtgtgacctttccagccatgcgatattccccttggaagatgcttccccaggctataaatttgttctcacaaagcaacatcaataaatcaaaactgtctctcccaaaaaaaaaaaaaaaaaaaaaaaaaaaaaaaaaaaaaaaaaaaaaaaaaaaaaaaaaaaaaaaaaaaaaaaaaaaaaaaaaaaaaaaaaaaaaaaaaaaaaaaaaaaaaaaaaaaaaaaaaaaaaaaaaaaaaaggggnaaancccgggnccccaccccaanaattctcnataaaaaaaggaaaaaccccgcccccaccccccccaaangtggaacncgcccgaganaccacaagccccccggataagcccgggtt

SEQ ID NO: 4895 - DNA, 4830 bp, Homo sapiens
tacggctgcgagaagacgacagaaggggagaaggttttactcttttagaaagcagcagattgtaaaaagtgtgacaaacacatgtagctgatgaaaaggagcatgatgaacaacagtatgaatgaaaataattatatgaatgataatttctcattcaggtgtgaaaacttaggtgaatgggtatatttggagcattacttcaaatacatagtcttcaggctgtccattggtgatgatgactgtaacttctggcttctcaagaatttcttctctaatatatgatgaaaaatttagtgcagaggagatatggtggagctggatacagctaagagttagtgaaataactgtttttcatgtctggcccccccttttttttttgtttgtctgtggcaattcttagctttatgaccctatctagagcactgcaaattttcacctactttgtctacagtatccagctgtctttttaagttgaccaggcttttgtgctcagtaattataaacaagacaatttagaggcttaatctggaacataattaaacatcctacacactcaaaccaagtagtaatggctttaggattgttcagtgtttaatttaccttttattttttgcattcaggtagtgtctgccatattcgtacctctccaccttgtctcacagtctgtttcacttctattaactgcttctcttctattccaaatgatttttagtactaactacattttcatgacagcattcatcacatttgatctgaacgtgactttttagatcctcaccatttctgctctcaaattgaaagtcatttgtccatccatccaacatatatggtgaacaaaacataatccctgccttcaaagaatctgtgatctagaagtgttatcagacaagtaaagaggcaactgtagtacacttcggtaattgttgggataaggctaagttcagaggatgtggggaggatataagaggggcagcaaacctagtcctgaggaatttggattcttaggaaaaggaagagctaagtcagggtccggagaagttgtagaaactagctaaccaagaagagaggcagagaaggtgtgctcagcaccaaaagcaattgcaaagatctaggaggtaagagagtcagcttcaatactgatggtaagaaagaaataggaagatgataggtcactttgaagtctgaagggtatccttttttctgtattccagttctgagacagcaagattttcaagtcagataaacagatttgaattcttaactgtgaggccttcctttattacttatttgaaatagaaggcctgcccttcctttctctgtttctattagcttctttatttttctccagatatttatcaccatatgatgtacattatattttacttatatatttgtttattgcttgtttttctcccaattgtaaatttaatgtgattttgactgttttattcaccactgtagcatctgaaattgtgcctaacagaaagtaaatggttagtaaatttttgttgaagaaataagtccttattctcatctgttacttggttatgtgaatttaggcaatttacttaaccattcaaagattggtttccttattggttaaataggaataatatctaccaaatgaggagtaaatgagataatttgtgtaaaataatcagtataataaaattctacaattctttatgtgaaatctttgtgaccaaatgcaatttggaattcagaattcttcatattttagaaaggtactaatatagtcggctctccacatctatgggttctgcatctgtggatttaaccaactttgaattgaaagtatttggtgaaaaataacaatacaacaataaaaaataatacaaattaaacaaccaatatagtgtaacaaccatttacgtagcatttacattgtcttaggtactatttataacctagagattatttaaagtacatgggaagatgtgtaaaggttgtatgtaaatactgtaccattttatatcagggatttgagcatctgtagattttggtattcaaggagggaggatcctggaactaatcccctgtggataccaagggatgacagtgtattttatattatacatcttagagtctagggcagcagtccataacaaatagtaacatttctacagcaaaacatacaggtattcacaattaaatgggataaatgaagattctgtagtagcttcacatcttttcggtcagatttttgcctagaggcaaaatctacagttgaattcagttttttatgcagtcaaattagttatagaataactttgatttttcagagctttatggatattggaacattgatatgggatggtggacctgtacctaacacacacataaacaaatgtaaaaattactatgaagtacttggagttacgaaagatgctggtgatgaagatttgaaaaaagcttatagaaagcttgctttgaagtttcatccagacaaaaaccatgcacttggagcaacagatgcttttaaaaagattggaaatgcttatgctgttttaagtaatccagaaaagcgaaaacagtatgacctcacgggcaatgaagaacaagcatgtaaccaccaaaacaatggcagatttaatttccattgaggttgtgaagctgatataactccagaagacttgtttaatatattttttgggggtggatttccttcaggtagtgtacattctttttcaaatggaagagctggttatagccaacaacatcagcatcgacatagtggacatgaaagagaagaggaaagaggagatggaggtttttctgtgtttatccagctgatgcccataattgtattgatcctcgtgtcattattaagccagttgatggtctctaatcctccttattccttatatcccagatctggaactgggcaaactattaaaatgcaaacagaaaacttgggtgttgtttattatgtcaacaaggacttcaaaaatgaatataaaggaatgttattacaaaaggtagaaaagagtgtggaggaagattatgtgactaatattcgaaataactgctggaaagaaagacaacaaaaaacagatatgcagtatgcagcaaaagtataccgtgatgatcgactccgaaggaaggcagatgccttgagcatggacaactgtaaagaattagagcggcttaccagtctttataaaggaggatgaactggaatttttatttataccttttagcgtactctttattttttctgtaagtaagtttggtttcatcatgagggatgaaggaaaagatttgatactgaaaactaaactgaatagttggttcctgaaatcttggactgtttatgacctactggctcctttaaatagtaactgaaaactaaaatggaatattttagttaacgcttctacaagtattttcattttaaaagcttacatgattcctaactaaagtgtcatgagaaaggattatcacacctgtagcaatttccagttttagtgattctccattttttcccttgtcatgtaaatatttatggaatgatcattttgtgtacatacaggttactgcttttttatttaaattcttttagtgtttagctccatgagacacttcagtttaaattgatggaataaatgttatatgacacatttacattttccttatcaaggtgtcaaatatgtggactttaaacaatgaaactttttcaaaaagaaaaaacaaaaactttaactttgtgtaaaatcttatagtattatcagcttagagggaattgatatttttaatattgccgttatattccaaaatatatattgagataaatgaactggtgtagaatatcagtttgctatttagttttatgaattactatacatatacatgcatagaaatgaaatgctatactgataaattttaaagaaaatatgaggaaatggctataaatattaaactaaaagggtcttcaacagtaaagtgcagttatgtcatttaaaattccaatactttaaaggccaccaaattttgatgtatatgtccttgaagggctgctaaaatttatgaagaggactcacattttcccccatagaaatttgcagtttcttggtgatcatttaagcaggatccaaagaagttcctttacaaataagtaataagaaaaatgagtactaaaatacagctttgtgccttttaaccctatgccaactcctaaacatataagtagattacagtatacttatctgatcagagcatgatctgtttggccacatgcaagtgtgagcagaaatagagcagcacgtagaatagtaacttaaagcaagtcatcctttaaaaattctgagctaaaatctatttaccattgagtaattgaattaatcccataggaataagctccttgtaagtaaatccatgatatgaattagaaaaaaaaaacagctggaaattgaagtttttgatgcctgtatactggatatgaaactatttgatttctagtcttctgtgtttagcagttgtaatattttaatgattttgcttcatactcggttaatggaacataaacatatctttgatacttctttgtgagtgagagaatgctagatagggtggctttgttctttgtttaagttttttttcctgaatgtagttaatttatggcatctgttgaataaaactgctaaaatgacctcttaaaaatgttctgttgtatccccttttccaggtgaatcaatagaaatgcctgattgaattagtaggttaaactaaacaacatactgtcataggaaaactggagagcttaaccaacttgctcttagaaatgttaccttaaaaaaaaaaaaaaaaaaa

SEQ ID NO: 4896 - DNA, 3566 bp, Homo sapiens
ccacgcgtccgtgcggcggcgctgcctggcgtgtgcgcaaggagcgggcgcggagccggcgggcgggcggaggatagcgcgggcgcggcacctgcgggcccgagggtctggctgtcgcagcgccgggccgccccgactccgagcggctgctgagatgagtgcagtgtcgcagccccaggctgctcccagcccgctggagaagtcgcccagcacggcgatcctgtgcaacacgtgtgggaatgtgtgcaagggcgaggtgctgcgggtgcaggacaagtacttccacatcaagtgcttcgtctgtaaagcatgtggctgcgacctggccgagggcggcttcttcgtgcggcagggcgagtacatctgcacgctggactaccagaggctctacggcacccgctgcttcagctgcgaccagttcattgagggtgaggtggtgtcggcgctgggcaagacctaccaccccgactgcttcgtgtgtgccgtctgccggctgcccttcccccccggggaccgagtgaccttcaacgggaaggaatgcatgtgccagaagtgttccctgcccgtatcggtgggcagcagcgcgcacctgtcccagggcctccgaagttgtgggggctgcggcacagaaatcaagaatggccaggccctggtagccttggacaagcactggcacttgggctgttttaagtgcaagagctgtgggaagctcctgaatgccgagtacatcagcaaggatgggctgccctactgcgaagctgactatcacgccaagttcggcatccgctgtgacagctgtgagaaatacatcacggggcgcgtgctggaggccggagagaagcactaccacccttcctgcgcgctatgtgtcaggtgcggccagatgtttgcagaaggcgaagagatgtatcttcaaggttcctccatctggcatccggcgtgtcgacaagcagccagaactgaagacagaaacaaggaaaccagaacttcctcagagagcatcatttctgtccctgcttccagcacctcagggtctccgagccgtgtgatttatgccaagcttggtggtgagatcctggactacagggacttggcagcccttcctaaaagtaaggccatctatgacatcgaccgccccgacatgatctcctactcaccctacatcagccactctgcaggggacaggcagagctacggcgagggggatcaggatgaccggtcctacaagcagtgccggacctccagcccaagctccactgggtcggttagcctcgggcgctacactccgacctcacggtcaccacagcactacagccgtccaggcagtgaaagtggccggagcacccccagcctctccgtgctctctgacagcaagccgcccccctccacctaccagcaggcacctcgccacttccacgtcccagacactggcgtaaaagataacatctataggaaaccccctatctacagacagcatgctgccaggcgatcggatggggaggatggaagcttggaccaggataacaggaagaagagcagctggctgatgctcaagggggatgcagacacaaggaccaattctccagacctggacacccagtccttgtcccacagcagcgggaccgacagagaccctctccaaaggatggcaggggacagctttcactcacaatacaagatctatccgtatgactccctcatcgtcacaaaccgaattcgcgtgaaactgcccaaagacgtggaccggacgagactggagagacacttgtcgcccgaggagttccaggaagtgtttgggatgagcatcgaggagtttgaccgcctggccctctggaagaggaatgaccttaagaagaaagcccttttgttctgacggctgccagcctgccccactggtgtgtgccgggcgccgaggccaggggcccctggcgagaaccgcacacacccctcccacacaccttgctctggcttctctgtgtccatggggtgggcgggagggggtcccccagcaggtgcggcccctgcacctgccggcgacactcctgccggtagtttagggccgagacggctagcttcacgccacccttccccgctgtggcttggtgtcagggagaggctgtagagtggctgtgtcgggcatcagatggagcacacaggtggctgcagcccagcccaccttcccagcgttctcgaggtgccctggccccggtgctgggcacgtgggggacagaggtggccgggacgtgagctgtgaggcttgttgatgacgggtgctgacaccatcatcgggggtgggcacacggcccttcggagcctgggcagcctggcctcacaggcagactcgcagacggggcagtgagcgtctgggacagtgccaagagtggggtgtgtgatttttgcaggcgtctgtgatgggtctctttagggacaaatgtcaacaagggacaagacagggcaccttccgccagcgcccctccatgcgctgcgttcctcctccagatcgacccctagatgcctacacaatatctttaaagtaacacagaagtttttattttattaaaaagtatagcctacttaaacgcgagatgacatatatagagtttaattttacggtccctccgcaggggagcggcctccagccttattctccaccgctcggatctgtgtggtttcagtctgttcttggtgtggtcctcatacacagagctccctgtctagtttcttttctttttcttttttctttttctcgtcacacaggtaaccttaaagacagacccctctaaagaacgctttgtaaatacatgtgaggtatagccaccactgttttccttgctgttatttttccaagtcttggggagaaaacatcctcctctgatggccaaagccctggaatcaagggtttccacgtaccctgcctaatacccgacgtagctcttgatgcaccgtccttgtgctgtggctggcggtgtctcagcctgaaacataaaccccacatgccccaggagcgatgtgctccctgaaacagacaaccacacgctgttggggagagaaggatggagataggatggagataggatggagatgtggctcttctcatctttgaagccagcagggcatcccggagcaggaggctggccgggctccccaagcgaaggcgttggtgtctgtcattaggtgtgtgttagggtgcagcaccggccgtcacaggatgctgataagcgcgctgagaggtggatgaaacaccaaagtctgtttccccgtccgcagtgggtgttgcctctttgtgtgtgtcccgatgttcctgcctgtgagtcggccttactccgtttccttagcgcccatgacacgccaagtcccgtttcgcactcggcttctcacccgcccagctcggctagggagggggagtttttagcacctaatatgcttcctgccattgcgcaatctgagcctgagcaactggaaacccccatttctcattagtgcaatgtcatatctgatcccaggaagcctggaaaataaaagacgatgcattataaaatgaggaagtaaaaaaaaaaaaaaaaaaa

SEQ ID NO: 4897 - DNA, 4567 bp, Homo sapiens
attttcccaggtaccctgcatgcatatagctgctgattctactcctgctattgctcacaaccctcagagtcaaactttgtgaccggcctaggagagatggagccatctcagtgtgtggaggagctggaggatgatgtgttccaaccagaggatggggagccggtgacccaacccgggagcttgctctctgctgacctgtttgcccagagcctactggactgccccctcagccgacttcagctcttccctctcacccactgctgtggccctggccttcgacccaccagccaggaagacaaagctacccagactctcagcccagcctcccccagccaaggtgtcatgctgccttgtggggtgactgaggaaccccagcgactcttttatggcaatgctggctatcggcttcctctccctgccagtttcccagcagtcttgcccattggggagcagccccccgaagggcagtggcaacatcaagcagaggtacagattgcccgaaagcttcagtgcattgcagaccagttccaccggcttcatgtgcagcaacaccagcagaaccaaaatcgtgtgtggtggcagatcctcctcttcctgcacaaccttgctttgaatggagaagagaacaggaacggggcaggccctaggtgagggtgggctgccctcttcacatggggcaccaggaacaccgtctggaacaggaaggacatcgggcaggactgacactgtgtcttgtgaaattgtttttttgttgttattttgtgttttaattttttttaatttctctctgagtgtacatacaacatactcaagcgggaccttctttctctgtcaggcccttgacctggaatgggggcctttgtcaaacactgttgaaggagaggctgatgtgtctgtgatggtgagaattcccaagggctctgacaagtagattcttcgactgaggaatctaccagttgtcgaagatgatccgttagtgatgttctctgggaagtggactgtggtttttccagaggaactcagttaagaaatcgagagtggattagactcccagttccaccaaacctatgagccttccactgtggatgggggccgtgatcctgatggtcacattgctttaacccagcagggcttcggccaggggctttccacttgaggatagcagcttcactaggctggccggccagctccacatctgactgggttcttacttctcagccagtacctgccccatgggctcaaggattcctggccagctcctgccacctccagcagacctcagggagggttgggtttctctaaggacccctcaaacatgtcgcaaaatgaaccaaacttctggctaggcctcaaaactgacttggtcccacttggaggccccaggattggtcctgaggtacagagccactgccaccactggcggcctgggaccagctgggtgtcagccacggatgagccgaatagccagtcagcatgttgctgctggcagcctgtgcctttgtcagctcttctttcaaaagaccccaccgacagaccgcattccacccccaacatcggcactgagggacatcgggggcaagtttgcagtggggccggaaaatatggtggccaccctaccatgagagtcagccgtaggggaccccagaccccttggtttccttggaaacaacatacctcttcccccttatccccagtcctttttcatacctagtgggatacagaagaagccaggacagtggctttgccagctaagtgacttttagagtaacagataacgattagagtggggaaccgtcaaagctgggtacacatttcctatcttcctccagcttccagctaggccagaagggcatgctctggaacccagcaggatcacagctgcctgtgcacgtcttcccttctctccctgctgcggcacttatggagaggatctaaagcagccggtgtggcagctccgatagcaggcacagggaatctgttaaccagacgctagaaactaaattataacttttgcatatgtgagaaaagacaacattggtgctaacagtgaagtaaggcccaaaggaaagacggcttccctggacaaagaagacctcagggctacccaaggaaataggaggagtctagagtagactcacaaatctgaacaagcccaagtcttccagttctgaggagaggaggtcttcagtactattgaaggagacattgatcttctggatgtacagttgtgcaggttgttcactgcacaaggccccttgccgcttaatgggaaggctggaattcagcttgtgttctgctcactaagctgtgtgcgtgccctggtgtggggctacttctcccaagaagaaggggtgcctttcctaatttgcaaaggtgccatatgggctcacagcaccctggaggagaagggcctcaaactgtgcatgtaagcctttgttttgttctgctcagatattctggatattacctcttcttggtcagaattctattctcagggtgtgtaccatgatttgtctgctaagaagacgggttcctgctttgcagagaaggagccggggaccagcttgaagactggctctgggacacactgaccattgtgaaattcagccttccctgtgggtctccataccattttatgatgtgtatgggacatacgttgttctcccctctctggatcaaggtggtgacaggcagcctgctgccgtatgcttcagtggcacacaccaaaaaaccgggattatttacagcagccactattcaccccttttggcagactctccacctgagttcagtgagagagaaaatgatttagatcttggtgctggggcaaggccatcagcttcagagaccttgccaggcccaggctgggtgccctgtggcctgagaactgagcccagactttgacaaacccacctcaacatcaagcctggggcaggtggaaggtcctgactgcactgtcttccatcctaatgcaaaggccaggaactcactcactgtcttaagtgagccagggcaaaatttacacccctcacgtttccctctcccttcttccccaccaacaaaacccaggaggtagctggcagagtagctgtcaggaaggagaaaggttctttctggctggttgtttttaattggcttagtgatctaaactggccccttcctcctctgcctggtgagttggcctaaacattcctcaagtctagcctcaggagacctgcccctcccccccgacctccaccccctcagactccatcccccacccccaggagcctggctgtctctagcgaggggtggagaatcagatttagagggagggagagtctgacctggatcctgacctgtaaccagctgaagacggtggaggctttgtggcttgctgagggtgggggttgggagagggactggaaaccttcctcctcgggaaagaaatgcctgggaggaagggaagcctgatattcagggtcaaaacagcccttctaattcacaaccccaaagcaggggtttctagaagttggtcaacagatctggtgagggaagtccccaggccagacgctggactcctgcaatgagggtggaggactcagcctggcctctgcctggcctgtttcaaagtctgggccactggcagccttctcttgctcaatccgaggtggaaaaagatcacctcccagtgacctccctcagcccccaggggagtaggtctgtgtccgaagctatgtggcaggcttgtttgaaggacccagaggggcccagctgacctgtctcactgctcctggcagcccagccccatcggcaggtggcccctgcctgggggttattcgggacggttcagccagggcctcccaggaagagtgctgtggagccacggtgactgtcctggacagcaaggagcatgctaccccagtgagcacttctttttgagggacttgatggggaggtggggtaggcagaagggacgtggcagaagcgggaagactttggtcaccatggctctgcaggccttctgcaaatcagtgctggcctgggctggaaacagctctgtgtgtgaaggtgaggactcttggaagcaggccatcctggccagacaccctagcaggaaggggctcacctgtcacccttaggcagcctgagggctggtggggacttttgagtcttgaggggatagcggaaaaagctgagctcataggtgcccagccagcctcccagctaaaggtgctcagagccccactgccccctctctctgtgcaggtggccagtgcccctccctgctctgggagcattgctagccttctaccccatccctggatccacaggggctatcgaggagacccagtgagaatgtagcattttgttcatccccagggtagctgccctggggtctgggcactctgcctctgggagagaggaagaagaaaggggccccattttttaaaaatctgtacagagcctttggctttatgtgtttatgttcttcacatgcatatgtgtgtatgtgtgtatatctttccccccatcaattggtacaatttttaataaaatcatttaaagcaaaaaaaaaaaaaaaaaa

SEQ ID NO: 4898 - DNA, 2197 bp, Homo sapiens
cgggagcgaaagtgcgctgagctgcagtgtctggtcgagagtacccgtgggagcgtcgcgccgcggaggcagccgtcccggcgtaggtggcgtggccgaccggacccccaactggcgcctctccccgcgcggggtcccgagctaggagatgggaggcacagctcgtgggcctgggcggaaggatgcggggccgcctggggccgggctcccgccccagcagcggaggttgggggatggtgtctatgacaccttcatgatgatagatgaaaccaaatgtcccccctgttcaaatgtactctgcaatccttctgaaccacctccacccagaagactaaatatgaccactgagcagtttacaggagatcatactcagcactttttggatggaggtgagatgaaggtagaacagctgtttcaagaatttggcaacagaaaatccaatactattcagtcagatggcatcagtgactctgaaaaatgctctcctactgtttctcagggtaaaagttcagattgcttgaatacagtaaaatccaacagttcatccaaggcacccaaagtggtgcctctgactccagaacaagccctgaagcaatataaacaccacctcactgcctatgagaaactggaaataattaattatccagaaatttactttgtaggtccaaatgccaagaaaagacatggagttattggtggtcccaataatggagggtatgatgatgcagatggggcctatattcatgtacctcgagaccatctagcttatcgatatgaggtgctgaaaattattggcaaggggagttttgggcaggtggccagggtctatgatcacaaacttcgacagtacgtggccctaaaaatggtgcgcaatgagaagcgctttcatcgtcaagcagctgaggagatccggattttggagcatcttaagaaacaggataaaactggtagtatgaacgttatccacatgctggaaagtttcacattccggaaccatgtttgcatggcctttgaattgctgagcatagacctttatgagctgattaaaaaaaataagtttcagggttttagcgtccagttggtacgcaagtttgcccagtccatcttgcaatctttggatgccctccacaaaaataagattattcactgcgatctgaagccagaaaacattctcctgaaacaccacgggcgcagttcaaccaaggtcattgactttgggtccagctgtttcgagtaccagaagctctacacatatatccagtctcggttctacagagctccagaaatcatcttaggaagccgctacagcacaccaattgacatatggagttttcgctgcatccttgcagaacttttaacaggacagcctctcttccctggagaggatgaaggagaccagttggcctgcatgatggagcttctagggatgccaccaccaaaacttctggagcaatccaaacgtgccaagtactttattaattccaagggcataccccgctactgctctgtgactacccaggcagatgggagggttgtgcttgtggggggtcgctcacgtaggggtaaaaagcggggtcccccaggcagcaaagactgggggacagcactgaaagggtgtgatgactacttgtttatagagttcttgaaaaggtgtcttcactgggacccctctgcccgcttgaccccagctcaagcattaagacacccttggattagcaagtctgtccccagacctctcaccaccatagacaaggtgtcagggaaacgggtagttaatcctgcaagtgctttccagggattgggttctaagctgcctccagttgttggaatagccaataagcttaaagctaacttaatgtcagaaaccaatggtagtatacccctatgcagtgtattgccaaaactgattagctagtggacagagatatgcccagagatgcatatgtgtatatttttatgatcttacaaacctgcaaatggaaaaaatgcaagcccattggtggatgtttttgttagagtagactttttttaaacaagacaaaacatttttatatgattataaaagaattcttcaagggctaattacctaaccagcttgtattggccatctggaatatgcattaaatgactttttataggtcaaaaaaaaaaaaaaaaaaaaaaaaaaaaaaaaaaaaaaaaaaaaagggcggccgct

SEQ ID NO: 4899 - DNA, 2146 bp, Homo sapiens
ttttttttttttttttttttttttttttttttttttttttgttttttaatatgctttattctgcatattagtatcacattacacagtttggtcatggtatttgtaacctggagagaatactagtgcagtcggtcttcataccaccccattcacaaccagcttaaatggcagtatccctctgtgaactcaactacccctcctgtgggtccaggctgagctctacaggtcagcctcttcatctcagcccttctaggtcctgctgtcagggctgagctgtcacttcacttttttcccagagtagtgcagcatcctctctgaaacctgagctatcatgacattttcttttttaattttataatttttatatttctctaatttttgattttagagacagagtctcattatattgccgaggctgaccttgaactcctgggcccaagcagtcctcccacctcagcctctccagtagttgggactgcaggcatgcaccactgtgccaggctaaaccgtaacattttcttgtggttgattatgtcacccttcagactcacgtagttcttgatgtctttccttgtaggaaagcagctgctgttttggatctcagtttgattgaggtggtgactatccctttggtaccattgagaccagaaaccagaccaccagttggacattgtttttttctggttatcctgtcctgccttactatgagatttacggatgtttggggacacaggtctctgggctcatttctttttctgaggattcatataattgcctagtttttggcttagaggttggtccttccctggtttaatgatgcttttgttcagactgtcctctaggacttgaatttgaagcagaaacagaacagcacctgatcctcagttatactgcaaagcagggcctcagaaagggtaactccaattactgactttcacctaaggtgaaaaagcatccggcttctttccccttggcatctttggatcttctgagaatggtggctgaaggcagagggcctggggacaagccagcctggacatgactcctctgctgcttattaattccttacctgaactactcttgggacctcgattccttcatgggcaaaatggtcacataatagcaccatcacaagacttgccaggaatctagagcaagaggataacgtctaaagcatctagctcaggtcctcacatctggaaggtattaaatacaggctagctccttccatagatgcccatccaaagatgcatacatgaggtggcaggggattaaactatatgacccctgagatcctttccagttcttagctttgagggggatcaatggcagtaattcagatatattgtttatcatagttaattgagtatcaacatgtcaaattggcatttattgtgttaccttgggcaaatgatataacttaagtcttaattttcttcattcttgaaatgggatagtaagagtacctacctcataatgttatgaaggtttaatgagatagcctcatgccaggcacagagtacacagtaagtgctcaatacttaactattattgttagatgttggtttgcttattcttctggctctgatttttttcccctttactctttttgtttttgtttgcatttcagggtgaaacttcctacatccgagtttatcctgagagaagcaccagctatggctactcacggtctcggtctgggtcaaggggccgtgactctccataccaaagcaggggttccccacactacttctctcctttcaggccctactgagacaggtgatgggaattttttctttattttttaggttaactgagctgctttgtgctcagaatctacattccagattgaggatttagtgtcttaggaaatttttttaattttttttttttaaagaagaaaaaaaactacataatttctaccagggccatattagcagtgaaacattttaaactgcagaaattgtggttttgggttcagaaacaagttgtatatttttcacccctggattatggggaaaaaaatcagttctggtctttgtgggttgctctactatggagatcaacagttactgtgactgagtcggcccattctgtttagaaatatattttaaatgtttagtaattgaaaaaaaaaaaaaaaaaa

SEQ ID NO: 4900 - DNA, 1427 bp, Homo sapiens
  misc_feature (1231)..(1231): n is a, c, g, or t
gaaggttaatttgcaagacttttaaaaccttagaaaagttttaaggttgcaaagttatcaacactggggcagagggtggagaggccaatgcgggtagaaggaggcagttatgtttatattgaaggtgaaatttttctttcatttagaatggaaaacatccccaaatgtatcattataaactagtcagccttgactacacaaaattgacctttaagttgcttgagaaaaacacaatgcaaatcgttcagaagggtcaacatcctttggtgctaaaatcttgtgtatgttttcagaatggctttttctgtatgttatagaataatcactaaaggaaaggtagttgaatttaaagtcatgaagcaagactctttaattcagttattttaaacaagaattaaaaccccaaacatccttggcaggctttgaagcacacagaattttctagtatttcttattaaatacaccaataataaacatatacttagtttacctgatgagtttagacataattctatataatgttcgcttatattcatttattaactagcaacacttgtgcaagaacaaggtattctgcttgaaaacactgatttttaagttcctgttgcccgattgtaaagaaaatcatctgacacagaagcctggattttgctctcctaacactggtgttttccttgagcctctaattcaaataaaacaaactgatacaccttacagccttattcatctgtgtctggataactcactttttcatctattgaataagacaaaagtggttcacccttaactaaaatcaaaaattggtgtcacctatttatctaaccgaaccctttgaaaccagtaagcccttgggaattctcatccatgtaaacccccaatttttttttaattttacccaaaacacccatctcccttttttaaagcaaccttttaaacaaccccctggtggcttgcccaatgttgggcacactttgccccccttcgcccacgtgtcttttaacacccacatgcgggtcccttctttccatctctgcccccctcacacttgcagggtaactcccctctgggttcgtcacaaactaaggggggtcggccgcgtctccacgaataattttagaaaagctggtgaagtaggcgcgccgtattacgtggattaacaccttttataactttcgtacgaaacactaatacaccgatttagacttgatgaattatatatgtggaagcaganttttatatacgtataaccacaaacagcacacgattattatatctcatttataaaccaacggaacacacacacacctatctcacatgtacatcttaatacattcgccctctcttgtacattttttccctaaccttctctttctatttattcctccctctcttctctcactacgttcctctcctcccttctacattct

SEQ ID NO: 4901 - DNA, 3419 bp, Homo sapiens
  misc_feature (624)..(646): n is a, c, g, or t
agcggattgtgggaagggcggccggtgcagccgcagctgccatcttaggggcgcctggcgctacgggtttctcgttggaggcggccttcgtggcagctgtagacgccgggaaaaggcataaagtccgttggccgacacctttctttcctccggcctcggtagaaccgccagcccgcgtccgaaggcggaggcgaggggaactggccgcgtgaggggcctgaggcgagcggttagagcgtctcccggaaggatgggccggtctcggagccggagctcgtcccgctccaagcacaccaagagcagcaagcacaacaagaagcgcagccggtcccggtcgcgatcccgggacaaggagcgcgtgcggaagcgttccaaatctcgggaaagtaaacggaaccggcggcgggagtcgcggtcccgttcgcgctccaccaacacggccgtgtcccggcgcgagcgggaccgggagcgcgcctcgtccccgcccgaccgcatcgacatcttcgggcgcacggtgagcaagcgcagcagcctggacgagaagcagaagcgagaggaggaggagaagaaagcggagttcgagcggcagcgaaaaattcgacagcaagaaatagaaaaaaaaannnnnnnnnnnnnnnnnnnnnnncgaagagtagaagaattggtagcaaaaagggtggaggaagaactggagaaaaggaaggatgaaattgaacgagaagttctccgaagggtggaggaagccaaacgcatcatggaaaagcagttgctcgaagaactcgagcgacagagacaagctgagcttgccgcacaaaaagctagagaggaggaagaacgtgcaaaacgtgaggagctagagcgaatactggaagagaataaccgaaaaattgcagaagcacaagccaaactggccgaagaacagttgagaattgttgaagaacaaagaaagattcatgaggaaaggatgaaactagaacaagaacgacaacgtcaacagaaagaagaacaaaaaattatcctgggcaaggggaagtccaggccaaaactgtccttctcattaaaaacccaggattaaattgcaaactctgaactttttacaaagaaaaatggaaaaactttgtatggtagcttcatgttgaagtggttttttgtttttgtttttgtttttttaatttgtaaaatctggaaagttagcttgttctaataggggctatgctctgcaattcccttttttttttttttttccttccactaagtcaaatccttatcagatcattgttgtattctaaggagtgacgtatttttcacctgtttggattctatattagtggtctgaggaagagcagatcacattgtaaaactatggatggtctgataaggcttttactgaccccactgacttcagagttatactctgcttgctacatcataatgctggttttgctgactttttgtttttttatatatttataaaaaaagaaaaagttggtgattgcattgggaaattcccagggtattactggacctatgtggtgtattgttaaaccagtgtccttgtgatactgtcgctcttgatgttcctgatacaggtaaggaaacagttggtcaactctgatacaaagtatatatacagttcagtattgtctctgttcattttgtttttatttcattgacaaaatcaaaccagcattccccattgtgtaaataaatgattttgctgaataaagtaaagtcttaaattcaaaaaaaaaaaaaaaaaattttaatgttatgttaagtcttaaagagggtggttcactttttgatggtcaaccatttagaagtcttagaactatatttcctcttgtttatacttttaacatagggtttatatgtacattaaatatacttgtgaattagtatttaatggctatttttacaaatatcaactttatgctgatagagcaaatggcatcagtgttacctttaagaaagactaacaacatccagaagatttaaattctcaaacctgtgcctctgttttaggatataagtattatcacaaagtatacttaataaaggctagaaaaatgcttttaaattatggaatctgagatcgttttcagagtgggccatcagaaagaacttagctttatactgtcaaaaaaaggctaagatggtcgagtcattttcattgtgtagtgtacttgcacgtttatttttaggacaaacacatttgaactttatgaatttttttttttttttgcatgtgaaatcttatgaatggctttcattttatacactagaatctgcctcatttactcttaacatatgtttaagtatactggtattaaaacattcaagaaaaggatattgatctaaaatgctaccgtgagatgcttaaacatgtcatcaagtagagaaaatatttttatttttgcccaatattttttagacagtttgattattcttaaaaattgaaaacttaagctaaagagatgactaaatggtagattattttgtgtgtgcatgctaggaaaaatgctgttgctttagttttgagctcttcaatgagtctaattgtggtaaggaacaatataaaatcagtttaaagatctttaaaggtagaattttaaataggcatgaaatatagtgagaacttttagtaaacatactacttactctaaaatcaaacattttattttcctaaagaatataggttgccaaaaaatattttatctctaaatataggttagctgtaattatttcatgaatttttttttttttcaatgtaactttttttggtgaagattcatggttcctaagttctgtattcaagtttttggaaatgtttatttaaaaactgttctatacaagtgttcaaaacattgtatctaaagagagtagcctggacttaaaatatttgaaatcagcttatgcgtgccttttaattttttttttaagtttcttactgccacatatggtgtgaagtgacagtaagttgcttaatgacatcctgcagtatctgcttgcttttggagactccagtgagatgttgaaattgttcctgtgcttggtaactactttcctctgccaggctatgggaaagaggatgtaattgtgaataatatacaccatccagtctttaatgtgctgcaacaatgtagtaatttgtttttttcatttgttcccactgcctttgtgtacatagaaaacttaaaaatttcccccagtctattagaagttaagatgttccctaatttattaaatatgcctttattcacaatttgtttttttaggttattcttaatgcattatagaattaagtatgactttgtttatttttattacagtatgtagttattgacatattgtggtttgcagaattatcaattgtataaactaaacctttaaattaaaaaaaaaaaaaaaaaaaaaaa

SEQ ID NO: 4902 - DNA, 1850 bp, Homo sapiens
  misc_feature (1054)..(1055): n is a, c, g, or t
  misc_feature (1112)..(1112): n is a, c, g, or t
  misc_feature (1143)..(1144): n is a, c, g, or t
  misc_feature (1152)..(1152): n is a, c, g, or t
  misc_feature (1176)..(1176): n is a, c, g, or t
  misc_feature (1192)..(1192): n is a, c, g, or t
  misc_feature (1208)..(1208): n is a, c, g, or t
  misc_feature (1222)..(1222): n is a, c, g, or t
  misc_feature (1243)..(1244): n is a, c, g, or t
  misc_feature (1249)..(1249): n is a, c, g, or t
  misc_feature (1259)..(1259): n is a, c, g, or t
  misc_feature (1323)..(1323): n is a, c, g, or t
  misc_feature (1332)..(1332): n is a, c, g, or t
  misc_feature (1336)..(1336): n is a, c, g, or t
  misc_feature (1387)..(1387): n is a, c, g, or t
  misc_feature (1406)..(1406): n is a, c, g, or t
  misc_feature (1426)..(1427): n is a, c, g, or t
atttcacccgggaaacgattagacatgattccgaatttatactaagcgctgacgcatgcgcatagctaaccgcacccggttcagctcgcctttcttggccagaggcgccggttggactcacgggcggggcatgatggtggtgggtacgggcacctcgctggcgctctcctccctcctgtccctgctgctctttgctgggatgcagatgtacagccgtcagctggcctccaccgagtggctcaccatccagggcggcctgcttggttcgggtctcttcgtgttctcgctcactgccttcaataatctggagaatcttgtctttggcaaaggattccaagcaaagatcttccctgagattctcctgtgcctcctgttggctctctttgcatctggcctcatccaccgagtctgtgtcaccacctgcttcatcttctccatggttggtctgtactacatcaacaagatctcctccaccctgtaccaggcagcagctccagtcctcacaccagccaaggtcacaggcaagagcaagaagagaaactgaccctgaatgttcaataaagttgattctttgtaaaaaaaaaaaaaaaaaaaaaaaaaaaaaaaatcacgagagatacatagtcagggtgggggagaaaaaggggaatggacatgggcaccatggggcagtagactagcttcacggaacccaaggctttcccttgaatagagaagacggctaccaccctggcacggaccccccccctacataagtgacggcccgacattttacactcctccggaataacaggcgccaggactccaaaccccctgaaacttgaaggtcggagagtacggggagcgtggagatagacactcacgcggagagaaactctcttctaaacgactccagcctcccttaggcggtctcacgcgcgactggctcatcactcgtcgcaactacgcgagaggagcggacgctacccactatctgcagggcgtcgttcatccccaatacccacaatccgcccagagaccaaacatcgccacatcactcgccatcgaccccggnngtaaagaaagcgggaccaccccgcgcatgaccaatcccaatcaacgccgcctcccgncacccatagccgcgcgaggacactgatgcgnncgaaccgngcgctcgtgggctttctcaaaccntctccaatgcaaagcncccataccgcaagganaatctccagcaagncgtttttcaaacctcacctgnncgctnctggcgagcntgacgccttaacataaacactcacgcaccggcaagtgtgcccctgcgtgcgcccggcggggggnacgccgtgnattngggggcgccccggaattcctacgcggcggcggcaaggtgaaaaccccgcancttccatccccagtcgccnaaccaagcgatcctaatgcnngttccgaatacaaatccccccacgccctttggctgctctctccaagactacgggccctgggaagcgggggtaacgataacgaagtcctcgggcggcaaccattatcttccattcccgttacactcctaccccacttttctgtccacccttgtgcgttaatcgggggcagtgcacactctatcgggcgtatgccgtaatgggtcgcgtatcacgctgaactatccggggtacgaaccgcccgcagcgcgataaaccacagccccacggaagagctagagtaatagtaggaaggagggaacaggcccggccccgggccggcgctcagacctgtaggaggatgggtaggccaaaggggtagcaaagaagacgggcgatatagaagcgagcagaggcgcgggggagactggcagcacacgagctcca

SEQ ID NO: 4903 - DNA, 2439 bp, Homo sapiens
  misc_feature (714)..(730): n is a, c, g, or t
cgcccgggcaggttagaattcagcgaccgcttaattctaggctcagtcccgacgtggaactcagcagcggaggctggacgcttgcatggcgcttgagagattccatcgtgcctggctcacataagcgcttcctggaagtgaagtcgtgctgtcctgaacgcgggccaggcagctgcggcctgggggttttggagtgatcacgaatgagcaaggcgtttgggctcctgaggcaaatctgtcagtccatcctggctgagtcctcgcagtccccggcagatcttgaagaaaagaaggaagaagacagcaacatgaagagagagcagcccagagagcgtcccagggcctgggactaccctcatggcctggttggtttacacaacattggacagacctgctgccttaactccttgattcaggtgttcgtaatgaatgtggacttcaccaggatattgaagaggatcacggtgcccaggggagctgacgagcagaggagaagcgtccctttccagatgcttctgctgctggagaagatgcaggacagccggcagaaagcagtgcggcccctggagctggcctactgcctgcagaagtgcaacgtgcccttgtttgtccaacatgatgctgcccaactgtacctcaaactctggaacctgattaaggaccagatcactgatgtgcacttggtggagagactgcaggccctgtatacgatcnnnnnnnnnnnnnnnnngatttgcgttgactgtgccatggagagtagcagaaacagcagcatgctcaccctcccactttctctttttgatgtggactcaaagcccctgaagacactggaggacgccctgcactgcttcttccagcccagggagttatcaagcaaaagcaagtgcttctgtgagaactgtgggaagaagacccgtgggaaacaggtcttgaagctgacccatttgccccagaccctgacaatccacctcatgcgattctccatcaggaattcacagacgagaaagatctgccactccctgtacttcccccagagcttggatttcagccagatccttccaatgaagcgagagtcttgtgatgctgaggagcagtctggagggcagtatgagctttttgctgtgattgcgcacgtgggaatggcagactccggtcattactgtgtctacatccggaatgctgtggatggaaaatggttctgcttcaatgactccaatatttgcttggtgtcctgggaagacatccagtgtacctacggaaatcctaactaccactggcaggaaactgcatatcttctggtttacatgaagatggagtgctaatggaaatgcccaaaaccttcagagattgacacgctgtcattttccatttccgttcctggatctacggagtcttctaagagattttgcaatgaggagaagcattgttttcaaactatataactgagccttatttataattagggatattatcaaaatatgtaaccatgaggcccctcaggtcctgatcagtcagaatggatgctttcaccagcagacccggccatgtggctgctcggtcctgggtgctcgctgctgtgcaagacattagccctttagttatgagcctgtgggaacttcaggggttcccagtggggagagcagtggcagtgggaggcatctgggggccaaaggtcagtggcagggggtatttcagtattatacaactgctgtgaccagacttgtatactggctgaatatcagtgctgtttgtaatttttcactttgagaaccaacattaattccatatgaatcaagtgttttgtaactgctattcatttattcagcaaatatttattgatcatctcttctccataagatagtgtgataaacacagtcatgaataaagttattttccacaaaaaaaaaaaaaaaaaaaaaaaaaaaaaaaaaaaaaacaataagcaaaaaaaataaaaaaaaaaaaaaaagagggggggggggcccacaaaaattctccccgcgggggggccccaatttggccccccccgtttttttaaaaaggggggccccacaaataggggcacgattattaaaacgcagagcgcgaggggcgcgcgagtatataaaaaacccgcggtgcagctaatggtagcgaagcaacacctcgttccgacgagcgaggggtctcatagtatgaggagaaggagcaccccacacaatccacgtgaggggggggggggggacaaccaataatgcggcggacacgcaacaccaacgcaagaagaatatttctacgcccccagcggaggcaaaatatccaaacagcttgacggaagttcattctatgtgtgttacacaccacacggccgcgattaattcggcagcgggcatcaaaaaaaatcgcttctgtcccaaccagcagtaatgtatattagtaaaagcaaaattttatagcacg

SEQ ID NO: 4904 - DNA, 1511 bp, Homo sapiens
  misc_feature (736)..(772): n is a, c, g, or t
  misc_feature (905)..(943): n is a, c, g, or t
  misc_feature (1117)..(1117): n is a, c, g, or t
cggccggatgatgtcatagaaaaagtctcgacttcacattaaaagtatacaaacaaacaaatctacaggcatgtctttatataccatcaggtctaagttttcaaagaaaattgtagatataactgtgcagataactcattacagtcataatctctgcccatgtgtattgagagggggcagtttgcacgaaaaagaattattggcccatttaataattcagctttaaatagactttgtcatatgcatgaatcatcagagatgaaactgtttgagagactcatgtgaccttacgaaaattacaacagcagtcttaaagtatgaaaaagatgcatcacagcagagacattatggcccagttgatatcaaatgtaaaatgtaaatgcatgtaaatgcacacttcattttatgtattatttagtaatttgcagtggtatgtgtttaatatttttgctacctacacattaggcaaaaaaaagatgtaaataatttgggagaaaaagaggaagaacagtgtaaaataaaactttctataagtactccatttcaatgtgttcaacatcatcctaaaaggcaagattttcccacgcaggtgacaaggtggtttatgtactatttaagggcggaaggtgcgtgcccgttcaataagcatgttttttgccaggtaggaaatatgttccatatctttacttatcattgcatttcagatgggaactagaaaaactggagagaaaaatgnnnnnnnnnnnnnnnnnnnnnnnnnnnnnnnnnnnnngtattcacttgctaaatacacatttcttcaaaatatttgaattcagatgtctttactgttccctataacatatggtgttaaggaacataagctcataaaatgttgagaaccagagtcaggttgctacataatnnnnnnnnnnnnnnnnnnnnnnnnnnnnnnnnnnnnnnnggttctatatttatggtgatgatgtgaatttttatgccctttaaattaagtattgttctttttaatgtcatacctaaaaaggaaatgtaaggataaatttttataatgtgtcattttcataatcagttggttttattcaggatccacaaagatgtcagatgactgttatgaaantgttatcttaaaggtcacagacaagcattttattaatatggagccactagtataatatgttaaaatcttgttttattagctcattttaaaacacaatttccattcaatttaatgaaactgtatcaggtttcatggtttcaaagacagacttaaataggattcaacaccccgtatcgtgtaataacttgttaactggtctaacaccaggacatctatactttaactgatgtatattatttgacgtccagtatgtttgcatactgttcctaagagaaacatttttggaaaaaaaaaaaaaaaaaatttgggggcggcgaaaattaaaatggggggccaagaaagaaggcgaaaggggagggggaaaaaaggggcgggaaaaagggtgtaaagaaag

SEQ ID NO: 4905 - DNA, 1250 bp, Homo sapiens
gcctgtcatttcctttctggcagacactaaaatggggagccctgccctcaggggggtgtcccaagtgccatcaggggaggcttggtgactcccagacacaagggaagctttagcgtctgccctcagggggagatggaggtatcgcctccggcctcagggaaccacagtctgagggggagatgcagcccctgccttcccattcagagaggggttttgtgaggtggcttgggggcatagggcagaagtggatcctacaggctgagctaaggccccaagagcctcagcagtgtacccatcacctgccacctggtctgccacagatccatgatgtgcagttctctggagcaggcgctggctgtgctggtcactaccttccacaagtactcctgccaagagggcgacaagttcaagctgagtaagggggaaatgaaggaacttctgcacaaggagctgcccagctttgtgggggagaaagtggatgaggaggggctgaagaagctgatgggcagcctggatgagaacagtgaccagcaggtggacttccaggagtatgctgttttcctggcactcatcactgtcatgtgcaatgacttcttccagggctgcccagaccgaccctgaaagcagaactcttgacttcctgccatggatctcttgggcccaggactgttgatgcctttgagttttgtattcaataaactttttttgtctgttgataataaaaaaaaaaaaaaaaaaaaaaaaaaaaaaaaaaaaaaaaaaaaaaaaaaaaaggggggggggcgcccaaaattacccccgggggggcgccaaaataaggggaccccggttttttgtgtgaaagggggggcccaataagagaggagggctggttgttaatgaaagacagggacgaagagtggacggcaggttttataaaaacagctgtggtgtagaggtggagaaaaacagcgtggtgattgtggaggaaacttgtgggaagagaggggagcccatcattaattagctggggggggggggagacaaattttgtggggcgacaaaatacctctagcagggaatattgtaagagcctcttagggggggagaaaaaataataaaacgatttaagaggtggtattatgaggggggtttacaacacaataggggagtatattaatcgcctgtggagtgtgagtagaaaaaaattgtcgtcgtacacagcgggaggagatatgaattactagagagacaatttttttatcacgaga

SEQ ID NO: 4906 - DNA, 2974 bp, Homo sapiens
gaagtttgcaggagacccgcgctgcctaggcaaagggacccggcgaccaagacacccccgcaagggcccagggcgcgtccctcccgccaggccccagactccggctctgcgccaccccctcctacgccccggcgcgggcgcagccagtccggcttcctccaggcccccaagtcccggaccgagtgtggggccgcctctccctctcggaaggagccatcgccgctttaagtggaagaggagaggaagggggcgggggagcggggggcggggagcggaggcggaggagggggagggggatccccctggctcccacgtggtccgggcgcctgtgaatcgcgcccaccggagggtctcacagcgaaatacaaaagcagctgggaagcggcggggactcgagttcccagcgccgggcggagcgccggacagagccccgcagcgccccgcggccgcgatggggccgaagcgcccgaagccccggagcccacaaactgccgggcccgcctcgccgccgggacccgggtgcctgggctcggcttgaagcggcggcggcgcaccggcacagccgcgggagcatgggcaggaggatgcggggcgccgccgccaccgcggggctctggctgctggcgctgggctcgctgctggcgctgtggggagggctcctgccgccgcggaccgagctgcccgcctcccggccgcccgaagaccgactcccacggcgcccggcccggagcggcggccccgcgcccgcgcctcgcttccctctgcccccgcccctggcgtgggacgcccgcggcggctccctgaaaactttccgggcgctgctcaccctggcggccggcgcggacggcccgccccggcagtcccggagcgagcccaggtggcacgtgtcagccaggcagccccggccggaggagagcgccgcggtgcacgggggcgtcttctggagccgcggcctggaggagcaggtgcccccgggcttttcggaggcccaggcggcggcgtggctggaggcggctcgcggcgcccggatggtggccctggagcgcgggggttgcgggcgcagctccaaccgactggcccgttttgccgacggcacccgcgcctgcgtgcgctacggcatcaacccggagcagattcagggcgaggccctgtcttactatctggcgcgcctgctgggcctccagcgccacgtgccgccgctggcactggctcgggtggaggctcggggcgcgcagtgggcgcaggtgcaggaggagctgcgcgctgcgcactggaccgagggcagcgtggtgagcctgacacgctggctgcccaacctcacggacgtggtggtgcccgcgccctggcgctcggaggacggccgtctgcgccccctccgggatgccgggggtgagctggccaacctcagccaggcggagctggtggacctagtacaatggaccgacttaatccttttcgactacctgacggccaacttcgaccggctcgtaagcaacctcttcagcctgcagtgggacccgcgcgtcatgcagcgtgccaccagcaacctgcaccgcggtccgggcggggcgctggtctttctggacaatgaggcgggcttggtgcacggctaccgggtagcaggcatgtgggacaagtataacgagccgctgttgcagtcagtgtgcgtgttccgcgagcggaccgcgcggcgcgtcctggagctgcaccgcggacaggacgccgcggcccggctgctgcgcctctaccggcgccacgagcctcgcttccccgagctggccgcccttgcagacccccacgctcagctgctacagcgccgcctcgacttcctcgccaagcacattttgcactgtaaggccaagtacggccgccggtctgggacttagtgtcaccgggaggaaaagagagagatctggggctggggtatggatgatggggggaagggcggtcgcctctgccactgtcagggaccagccggccaacgcccacccgcaaaggtgtctaaaaacttcagcttttcacccacctgcccctttctttcaatcccacgctgtttcctttcaaagttctgggaggacgaactcaccgaggcgagaagtgtaacattctctccacccagcttataaaaggattctttactgtgccagcacggggattggatccgaagaaactggctactggggtttggcccccgagtggccgtccctgtgggagatgcaccccattcttgggcccccctcattccctttccgaaaaaggaaaacttgcgtttgagccgttgagctaattctgcaattttctaccaaacagagcgctggtggccccggagcagggctgtgacattggctggtggagcccccttcctgtgttctccctttgttccagcgccgcgatggtgagatcactgttccaagcagggggacggctcgcgataggacaaagagagcaggacctccagactctggggagccctgcagaccttgacaatttgcctgactcattcctgacctcttgtcattttggcctgaaggctacaaattcagggtcagctgtatgcactaagtcaaataatgaatttcttcctccctctcgcaaccgaccaaaattttgacaacgatgatgttcaccagaaggaaaaaaaaatcagttttatgcactttattttgttttgattttcattttttattaagaaaaaattttattttacagaatttaccttctctgtatatatgtgcataaagtgtggtgtaaatatactaaacaaacttatatttcaataaaagggagtttaaaatttaaaaaaaaaaaaaaaaaaaaaaagttaaaattccctgagggccaagttaggtacccagttcttgtaaagggcccaagggacgattaagaggcggggcgtaaagctgcggaaacgctggtcgggactttggcggatgcaccccaatagggataatagtaggacgttggatgtggtcgg

SEQ ID NO: 4907 - DNA, 636 bp, Homo sapiens
  misc_feature (210)..(210): n is a, c, g, or t
  misc_feature (251)..(251): n is a, c, g, or t
  misc_feature (319)..(319): n is a, c, g, or t
ccgccctttttttttttttttcagttctttggggtcttttaggggacatcgctcagtcctgtactcacgaacagttcctgtggctttcaccccctttttcctcaaaatggacatcagtttaacacttgtgaaaaccttgtcaaaaaatcggtcgcgtggctcgacgccacgctcctgaagcgcatccacaaattttattaccatactgcntcctagatccaagctcctgtctggcttggtaaacagtgtancctgtgagggctcaaaccacaccaagtagcctctgctggttgtcccacaccgaaatcttgtagccaangtcgcacaggcttccccctgtgcagctgcttggacccccggtgcccaaagtactcacacatagactcgccaaagctgtagaactcttccaagggtgcatgcttctggaaattgctagttcatccggatgatgagaggtctgaccttggcaaacctatcacttgcatcaagttcgttgttatctggatgttgaagccatgatgaactgggaagatgaagctgtctttactcacagagtctaagaacctgccctaccccagacggagactcgcgagcccgaaccggaccatgagccgcgccgaatcggcagcgtgcgcc

SEQ ID NO: 4908 - DNA, 733 bp, Homo sapiens
ttgccccccccccccttttttttttttttttaaaatatttggaaatgggggggaaacccccttttttttttccccttcccccttggggaggggttttggggtgggcaaagaagaagctgacacaccgtatgttgttagagtcttttatctggtcaggggaaacaaaatcttgacccagctgaacatgtcttcctgagtcagtgcctgaatctttattttttaaattgaatgttccttaaaggttaacatttctaaagcaatattaagaaagactttaaatgttattttggaagacttacgatgcatgtatacaaacgaatagcagataatgatgactagttcacacataaagtccttttaaggagaaaatctaaaatgaaaagtggataaacagaacatttataagtgatcagttaatgcctaagagtgaaagtagttctattgacattcctcaagatatttaatatcaactgcattatgtattatgtctgcttaaatcatttaaaaacggcaaagaattatatagactatgaggtaccttgctgtgtaggaggatgaaaggggagttgatagtctcataaaactaatttggcttcaagtttcatgaatctgtaactagaatttaattttcaccccaataatgttctatatagcctttgctaaagagcaactaataaattaaacctattctttcaaaaaaaaaaaaaaaaaaaaaaaatagagggggggcgct

SEQ ID NO: 4909 - DNA, 6020 bp, Homo sapiens
  misc_feature (4032)..(4038): n is a, c, g, or t
  misc_feature (4050)..(4074): n is a, c, g, or t
  misc_feature (4093)..(4107): n is a, c, g, or t
  misc_feature (4179)..(4193): n is a, c, g, or t
ggccgcttgagttgactcttctgctcgcactgctgctgcagcacaaacgtgacttccaacattttttatttatctttcccttttcttttccaagatgtaactacggatcagacactaaggaccttcacgtttcgctgatgtagtttttggaggaaaaaggggggggagtgaagggcgtcggtttttttttgtgtgtgtgtgtatgtgtttcgggggaaattttccattatgagtgttttactaaagtgaatttttttttgtttgcttcgttcgtctttggctctttttttttccttcccaatttcggatttatttcaaggcgaatctggctttgggggaagaggaagaaaagtcggattacaagatcaaccaccaccaacaacaataaaaaccaccaggatatttttttgcaaatttctgacggctttaaattcatgaagcaattgtccccttttgcaatcagcatttggatctcagaatgagcaaggaaagacccaagaggaatatcattcagaagaaatacgatgacagtgatgggattccgtggtcagaagaacgggtggtacgtaaagtcctttatttgtctctgaaggagttcaagaattcccagaagaggcagcatgcggaaggcattgctgggagcctgaaaactgtgaatgggctccttggtaatgaccagtctaagggattaggaccagcatcagaacagtcagagaatgaaaaggacgatgcatcccaagtgtcctccactagcaacgatgttagttcttcagattttgaagaagggccgtcgaggaaaaggcccaggctgcaagcacaaaggaagtttgctcagtctcagccgaatagtcccagcacaactccagtaaagatagtggagccattgctaccccctccagctactcagatatcagacctctctaaaaggaagcctaagacagaagattttcttacctttctctgccttcgaggttctcctgcgctgcccaacagcatggtgtattttggaagctctcaggatgaggaggaagtcgaggaggaagatgatgagacagaagacgtcaaaacagccaccaacaatgcttcatcttcatgccagtcgacccccaggaaaggaaaaacccacaaacatgttcacaacgggcatgttttcaatggttccagcaggtcaacacgggagaaggaacctgttcaaaaacacaaaagcaaagaggccactcccgcaaaggagaagcacagcgatcaccgggctgacagccgccgggagcaggcttcagctaaccaccccgcagcggccccctccacgggttcctcggccaaggggcttgctgccacccatcaccacccccctctgcatcggtcggctcaggacttacggaaacaggtttctaaggtaaacggagtcactcgaatgtcatctctgggtgcaggtgtaaccagtgccaaaaagatgcgcgaggtcagaccttcaccatccaaaactgtgaagtacactgccacggtgacgaagggggctgtcacatacaccaaagccaagagagaactggtcaaggacaccaaacccaatcaccacaagcccagttccgctgtcaaccacacaatctcagggaaaactgaaagtagcaatgcaaaaacccgcaaacaggtgctatccctcgggggggcgtccaagtccactgggcccgccgtcaatggcctcaaggtcagtggcaggttgaacccaaagtcatgcactaaggaggtgggggggcggcagctgcgggagggcctgcagctgcgggaggggctgcggaactccaagaggagactggaagaggcacaccaggcggagaagccgcagtcgccccccaagaagatgaaaggggcggctggccccgccgaaggccctggcaagaaggccccggccgagagaggtctgctgaacggacacgtgaagaaggaagtgccggagcgcagtctggagaggaatcggccgaagcgggccacggccgggaagagcacgccaggcagacaagcacatggcaaggcggacagcgcctcctgtgaaaatcgttctacctcgcaaccggagtccgtgcacaagccgcaggactcgggcaaggccgagaagggcggcggcaaggccgggtgggcggccatggacgagatccccgtcctcaggccctccgccaaggagttccacgatccgctcatctacatcgagtcggtccgcgctcaggtggagaagttcgggatgtgcagggtgatcccccctccggactggcggcccgagtgcaagctcaacgatgagatgcggtttgtcacgcagattcagcacatccacaagctgggccggcgctggggccccaacgtgcagcggctggcctgcatcaagaagcacctcaaatctcagggcatcaccatggacgagctcccgctcatagggggctgtgagctcgacctggcctgctttttccggctgattaatgagatgggcggcatgcagcaagtgactgaactcaaaaaatggaacaaactatcagacatgctgcgcatccccagaactgcccaggaacggctggccaagctgcaggaggcctactgccagtacatactttcgtatgactccctgtccccagaggagcaccggcggctggagaaggaggtgctgatggagaaggagatcctggagaagcgcaaggggccgctggaaggccacacagagaacgaccaccacaagttccaccctctgccccgcttagagcccaagaatgggctcatccacggcgtggcccccaggaacggcttccgcagcaagctcaaggaggtgggccaggcccagttgaagactggccggcggcgactcttcgctcaggaaaaagaagtggtcaaggaagaggaggaggacaaaggcgtcctcaatgacttccacaagtgcatctataagggaaggtctgtttctctaacaactttttatcgaacagcgaggaatatcatgagcatgtgtttcagcaaggagcctgccccagccgaaatcgagcaagagtactggaggctagtggaagagaaggactgccacgtggcagtgcactgcggcaaggtggacaccaacactcacggcagtggattcccagtaggaaaatcagaacccttttcgaggcatggatggaacctcaccgtcctccccaataacacagggtccatcctgcgtcacctcggtgctgtgcctggagtgactattccctggctaaatattggcatggtcttttctacctcatgctggtctcgagaccaaaatcaccttccatacattgactacttacacactggtgctgactgcatttggtattgcattcctgctgaggaggagaacaagctggaagatgtggtccacaccctgctgcaagccaatggcaccccagggctgcagatgctggaaagcaacgtcatgatctccccggaggtgctgtgcaaagaggggatcaaggtgcacaggaccgtgcagcagagtggccagtttgtcgtctgcttcccgggatcctttgtgtccaaagtgtgctgtgggtacagcgtgtctgaaaccgtgcactttgctaccacccagtggacaagtatgggctttgagaccgccaaggaaatgaagcgtcgccatatagctaagccattctccatggagaagttactctaccagattgcacaagcagaagcaaaaaaagaaaacggtcccactctcagtaccatctcagccctcctggatgagctcagggatacagagctgcggcagcgcaggcagctgttcgaggctggcctccactcctccgcacgctatggcagccacgatggcagcagcacggtggcggacgggaagaaaaagcctcgaaagtggctgcagttggagacgtcagagaggaggtgtcagatctgccagcacctgtgctacctgtccatggtggtacaagagaacgaaaacgtcgtgttctgtctggagtgtgctctgcgccacgtggagaaacagaagtcctgccgagggctgaagttgatgtaccgctacgnnnnnnnacagattatcannnnnnnnnnnnnnnnnnnnnnnnnaagtgtctggtaaaaacgnnnnnnnnnnnnnnngtctcagtaaacccacaccaaaaagaggtccccgcaagagagcgacagtggacgtgcccccctcccgtctgnnnnnnnnnnnnnnntccaaaagtgcttcgagctacatcatgaagatgcccaacgcccgtggtcgatttatatatatttttttgtaattattatattctagtttggagtacttgctgtaggattcaagctgtctttgcactagctctaaagaagattttcttctggttttagagaactaattttgttttagcattaaactgttgaacttttttttgtacttagaaaacctagatactgcagtcagattttggaaactgccgtatagtcactgttttaaaaaccccggaggggctgtattaatttgtattgccccatggctgacaaaagcctttttttttggttttgatttttttttttttgtaactgttggggggaaaaaggctttttaacccatttttgaagagggtgaagtttggagaacaaatttaaaaaccatcagtcatgtgagcagattttttagaagggataggagacacacgcgcacacacacacacacacgaaacttgaaatggctttgctttggctgtcgtcttctgccgtgtgccagatgagcttgtgatctgggaagccggggcacccccgttttgtttctctgggcggttgtggcagctgaaggcggacgttgtttcctaaccataggtggaacgaggagacgggagcgagtgggctctccaccagcacatcactatgcatctgttccaggaaagaagaaaagcgagcgaggaagacggaaaagactgcctgccttggaggggtcacatgagggagacctgtgcctgatttcattaggaaatccattctgttattttttggtgctgttggctactttatcaaaaaacccttcaatagcatccttaagatttaaaaaaaaaaaaaaaaaaaaaggaaaaaaaagtgatggaagccgtaagtgcttctttgtcatcgacgtgcaatctttctaacattccatctccatctcaccgcttcttgtttgacaccttcacaagtcagcattaatctttcttttaaaacttgtttcatttatgatcatgtagagagccactaggaggcctgcagttatttttgaatgtgaaaatgcatttgcgttcatcttgtctattttttctcttcatgttgtaacaaaaaggaaaaaagaaaaaaaaatcccatcccttttgtacatatgcctgtaaattgttttaaatacttgagcctttttctcggtggggggtggggaggggggtgagaagacaagatgaagaaaagccttacatttcagtttcttcatcggttggattggatgcttacagggtttttcttgtaacatttataagtgctgcttacatcactgaacaacaacaaaaaaataataatggagtagctgttgcccttctccggttgtgtgtacagtatgtgtggaataaaaaagggaaactgttttcacaagctgttctttgtttcataattggattcatcaatcccgtagctacccatattgcactgagcttgccagtggtgactgccaggaacgtcctatgatccactttgttggttgttgttgcagaagactgaactgttttggaatatttaacaattacagaaacagtcaagtgttttccaatgtggttgtccggtttctatggccttgctgtgtactttccctctttttgacagtaaacttctgcctatggcttacagtttgacatttaatttattagcgctgctctgcacccctcccttgggagggagacttcatgtggtttattgcgagttttttgtttacttttcaggtttgtactacaaggtttaataataaaaacaaagttttttggaaaaaaaaaaaaaaaaaaaaaggatcc

SEQ ID NO: 4910 - DNA, 2081 bp, Homo sapiens
tagtccagtgcaaggtatacagtggtgctcattaaatacttgatgaatacaggaagctgtgcatgtgttcctacttttattcgaagctctcttcttccaaagctacatgaaaatagaattttaacagtcaaaattttatattaagtgccttagcaaaagagacatttaatatttcaaagaaatgcatatgtatgtatacatatatttgtgtatgcgtatgcaagaattcttgtataaagagaattcactccatgaatgatctcttctgtaagtcagtgtgaatcatgttagattttctgagagtgaaaacacctgccatctacaaattacaaggctggataacagctcactccatttgaaattcagtggaaacccaagagctaggttcttactgaatttgcatctcaatttgggaaactgaacttagctttcaaagatcataggaagtctggttggagaaactagggattattctggcaatgggtgcaggaaggtggtcagaataacccagtcgccattggttttgagaaacggaactatcttatgcagagcccggagggcaagtctcagacccatgggttgaagccatggagaaggaaatttggatccaatgtaatgaagcgctttctaagtcagaatttccctgcaatggtgtggcctgattcaataaaaattaagaataataaatataatggaaaaaaatctccactgattgagtgtttacttggtgccaagcactatgctaagttgttcattattttatttaattgttacagcaattttgagtatgcatctttcactattttataagtggaaaagagaagtgcccccaaaaagttagagctcaaacagcagcttattctaccagcccctgctcttgcggaggcctctggaaaagacctgaatgacacctattggagaatcacatctacaaggggcttcaaacagaccaaatagatcatcacctctgtggtcccttgttaactatatgttctgagacaaaggaaagctaccctaagggttagttaacctttgctgaggaaatttacattcatacttagagtgaattactcaggtgtgcttaggtgtgcaaaagggaaggagacctgaattcaccaagttaaatcttgctaaaccttatcataagcattttttgagcgcttagcatacaccaagccttgtggaaggtgctttcctgccatatctcatttaatcctcacagcaaacctatagaatatggcattatcgtctgagtctcacagaagtttagtcgtgtactcaaggtcttaccagctagtgaacagcagaccaagactggaaacccaggatagtctgatacctgagccatctcttcttgtgctacgcctagttattctgtcccccaaatcaaaaggcatgacctttataagaggcgctttactgacaatagctgcaattttaactttgaaaatgattcagaattatcaaagatagtagattcgaatgacatgattgtctataatctcgctagccttgtactgtgtgtgcatagcaattacagggaagtaatctagctcctgactattatgttgaactatgtcgctgctttttacaaacttgtcttgatccaaagcagtcacaaaccccctgcatatctggggaatccataaagtcaactatgtatccctgtgtgtgtatatatatgtatgtatgtatctattttcaaactgtgatttaatatttaaatattcctactgccatttttgtgactgaaaaactacacatgaggaaacgtcttagaattttccaatagaggaaaaataacacttgggcaatctgtcatgtttcacaacagttctcatttttctcatgatttgtgtagcgtggaatgtgtttgctcaatgtgaagggttttcattgctcaatttctctgtgtaagtcttttccttaaggtaataaaccatcagcaaagtcacatactggagttggtggcttttcttgtacaggcagttgttatgagacaatgatggagcattgagcatgttcaataaatgtgcagatggtggaaaaaaaaaaaaaaaaaaaaccacagggcggccgct

SEQ ID NO: 4911 - DNA, 1807 bp, Homo sapiens
ccctcctccacgcttacagccacacacacagtcacacagacgcgttctgagggtggctgcccgcttgggatggaggaatcacttccctcagaacccagccaagtcctctaggcctccttgggggtccttccagcctgaggggcttcggagctgaggagcagctgttctgatgcacgggaacaagcagcacctgcagaaggacttcttcctgtacaacgcctccaaggccaggagcaaaacctacatcaacatgcgggaggtgtcccagcgcttccgcctgcctcccagcgagtacgtcatcgtgccctccacctacgagccccaccaggagggggaattcatcctccgggtcttctctgaaaagaggaacctctctgaggaagttgaaaataccatctccgtggatcggccagtgaaaaagaaaaaaaccaagcccatcatcttcgtttcggacagagcaaacagcaacaaggagctgggtgtggaccaggagtcagaggagggcaaaggcaaaacaagccctgataagcaaaagcagtccccacagccacagcctggcagctctgatcaggaaagtgaggaacagcaacaattccggaacattttcaagcagatagcaggagatgacatggagatctgtgcagatgagctcaagaaggtccttaacacagtcgtgaacaaacacaaggacctgaagacacacgggttcacactggagtcctgccgtagcatgattgcgctcatggatacagatggctctggaaagctcaacctgcaggagttccaccacctctggaacaagattaaggcctggcagaaaattttcaaacactatgacacagaccagtccggcaccatcaacagctacgagatgcgaaatgcagtcaacgacgcaggattccacctcaacaaccagctctatgacatcattaccatgcggtacgcagacaaacacatgaacatcgactttgacagtttcatctgctgcttcgttaggctggagggcatgttcagagcttttcatgcatttgacaaggatggagatggtatcatcaagctcaacgttctggagtggctgcagctcaccatgtatgcctgaaccaggctggcctcatccaaagccatgcaggatcactcaggatttcagtttcaccctctatttccaaagccatttacctcaaaggacccagcagctacacccctacaggcttccaggcacctcatcagtcatgttcctcctccattttaccccctacccatccttgatcggtcatgcctagcctgaccctttagtaaagcaatgaggtaggaagaacaaacccttgtccctttgccatgtggaggaaagtgcctgcctctggtccgagccgcctcggttctgaagcgagtgctcctgcttaccttgctctaggctgtctgcagaagcacctgccggtggcactcagcacctccttgtgctagagccctccatcaccttcacgctgtcccaccatgggccaggaaccaaaccagcactgggttctactgctgtggggtaaactaactcagtggaatagggctggttactttgggctgtccaactcataagtttggctgcattttgaaaaaagctgatctaaataaaggcatgtgtatggctggtcaaaaaaaaaaaaaaaaaacgcaaaacaaaccacaaacgacagaacaaagacggcacgcaacacagaacaccacaacgagcgcccacgcccacacaaaaacccccaccggagcccacgacacacgcgccccccacacacgcgaacaaggagcggcccccacagag

SEQ ID NO: 4912 - DNA, 2338 bp, Homo sapiens
gcgacagttagatgcttaccaaaaaagaaaaaaagggagggtaggggacccagatgtacttgaatgtgcagaaaatacattcttgtcctcatcttccgtaattggagggctgggagaggcagctttgctcttcaccacaccttggacggaccaccttctttctgttccatggcctgaaggagtgcatctcctcaaagactcagcccctcacctgggagggcagtggtttgtgggcatccctccatgtacattttaggaaacacttgcaactctcatctgaagaagaaaacaactcatctttgggttcagattttgtgatggtattcagcaagtcacttgggcgagcacacttggtctatcctggaaagtctccttataagagaagttgtgtatttcatgtgcaccgagcaagggcattggaagacgtcatgaggctgtattttagcaggactgatcgtttttctaagtagacctgagctttgtttatcagtgaaattcaaggagaaaatgaggttaatgaagaggtatcagttaaatatccccttcttctcaccctgccaaaattagcagttggatttttggaaactctggaatattctgggtcattttgttttgtatgtttgttgtttttcgtcttccaaaggtgaaagctatgatacagttccacttaaattttagtgttttcttactcagctcaagcattaatttttgattaagtcttaatctgcatgacctgtgaatctgaatccatcatctccctttcctgccagcttttctacaaacattgaaatatgttatttggtcagcacttatttcctaggttcacagccttgggaggttgtggcatgtcctcccagtctggctgggaagagaccagctgtaccatccaaatgcttccctggtcttgatgatctcttccagagtcgatctgagtggccttttctgcaccctccccttttttctctttgaatggaattaaacccaatttggaaacaacattgacccagtcaaaagcttctaatggtttctttttcttcctccagttttagtttgcttttattaaaaaaagaaaatagtgcatggccatagctccttcagttctcttattgcagactaaccatcaggatggtatcaaagcacaaatactttggaggggaatgcgttgaactggggcaagtactctgtaacacaaagtgggaaaccacttcctggtgctgccgctcctgcccccactttaggtgggagggacgagttttgccctctagattttaatccagctggtgtccaccggatgttgccctcctggggagcagatatcagtctgtggaactctgggaaaaccacaggcacatttttcggtgcggacagatttgccagcacataactgggcagccagctagaatactttgtggaaattaagcgaggttttccatttcagccccatggtgcatggtggtggccgatgaatgtgtcagtctgctcagagaaaggacaaaaaggaaattattttcaaaactgtgttcactgtttgggtgtgtgtatggctctgcatgtgtgtgtttttgtctctgtataggtagaggtattcacatcttactccgactgtaaggttgtcttacttcatctctgcccccaccacagttgccattttgtaatgtccttccaacatggagaagacacgagctctctccagttggcatcatttgtcttttttgttgattgcctcattctccagtgaactccatctggccaattgattcagaatcaggcaagatccctgccctttggcacatccactgaaaggccaaacagcaagtccgagtgagttttaaatattaattaatcaccctttattttttacacttgagagtgattgtaataaaggctgtcattaataaacttggttctaccttaaaaaaaaaaaaaaaaaaaaaaaacagagacacacaccaagacaagacccaacaaaacgacacacaacgaaatcaaaataaagaaaaaaaagaggggggcaaagcaaaaacaccacagggcagagagcgtaaaagagaaccagaatattgaaaagaaagcggcacatgtggacaagacaaagagcccaaggcggaaatatcacggagtgggaagaaaaagcagcacgtacgcggaaccccactcggtggagggatagggcaagacacaagcaaagagcaaggccaacaaaagagcgtgtacacaaccgactcgagaaacacgagcgtatgacaaccaagcacaaaacctgcacacgagcagccggcgacacgcacacagagcgaacacaagcaaggagagacccacaagagaagaaagcacaatg

SEQ ID NO: 4913 - DNA, 895 bp, Homo sapiens
agtggcaccgctgactgccgagaggaagctcgcctctgcccggctgccctcttgtagtccgccggcgaggggcagttctcggtgaggaggaagagagcagcggacggcacagcacccgcgcgggccctcccacaacagctccagctggcagcatcacttcccgccaatttatccaacttctgccaaggctctgaaatgccaacaacgtcgaggcctgcacttgatgtcaagggtggcacctcacctgcgaaggaggatgccaaccaagagatgagctccgtggcctactccaaccttgcggtgaaagatcgcaaagcagtggccattctgcactaccctggggtagcctcaaatggaaccaaggccagtggggctcccactagttcctcgggatctccaataggctctcctacaaccacccctcccactaaacccccatccttcaacctgcaccccgcccctcacttgctggctagtatgcagctgcagaaacttaatagccagtatcaggggatggctgctgccactccaggccaacccggggaggcaggacccctgcaaaactgggactttggggcccaggcgggaggggcagaatcactctctccttctgctggtgcccagagccctgctatcatcgattcggacccagtggatgaggaagtgctgatgtcgctggtggtggaactggggttggaccgagccaatgagcttccggagctgtggctggggcagaatgagtttgacttcactgcggactttccatctagctgctaatgccaagtgtccctaaagatggaggaataaagccaccaattctggttgtaaactaaaactcaaagtttacttagagaagagaaaaaaaaaaaaaaagaaaaaaaattcttccaaacgt

SEQ ID NO: 4914 - DNA, 2422 bp, Homo sapiens
gaactataaggccctccagcataaacgctaaaagaatagatggtagcacaggccatgagggctgggggagagaagcagagtgaaccttagaaagatggctcagctattggagcactggatattttactgaagtatatttactgaggcaccatcactgttttgactgtacagtatagtttttcataaatttcatcacatttactttgttcagaatctgggcttgaatcttgagtggacaaaagcctatggtttcttttaaaaagtttcatcttgagctaatgctacagtttaaataaaatgtatgaaaggtagttatcaaaaacaatttgtatatttaaaattctattttgacatccattttttacagcgaattatagcaggttatgtgaaatttaaaaataaattttaggaaattttttttatcttgtaagtaagaattataaatctatctcagttaaaagtaggatctttgtttttattcagatattttgaaagtttagaagcattttgtatgctactttggtatttcttaagtatagtcagcaggaaagggtaacctgttttatgcaaaatttttttaatttgtcaaatgtttttagtgtgtctactttctgaaatagtctcaatatcctgtctgtatcctaggcagataactacacaagaacaaaacgctatatagaaaagaaaatatttgaggaaatcttaaattccataagaaagtaattcttgcaagaatgttggctacatatttttttttctgtcctgaataaattacatcattaggtctgttgaagcttttgaagctaccactattctttctgggataaaggctaattactgatttatctgccctcaaaatcccagagttaattctaattgagtactaaattaacagtaagtagttaacacagagaactaaaatttaaccgcattatatcactgtatatatttctcatgatttttgctaattagagcatttacttaaccagtaataaactacacacacacacacacacacacacacgtatacgtgtgtgtgtgtatatacttggctctgacacaactctggtgcttaattaggatatgttctattatgtattttgaatgtttatcctgctagtgcgatgaacttttgttggaaaagcagaattagaaggaacagtttttcaatcagtttcatttggtaattacaggaaaaccttgagttgctctaatttaatttttccaattaatacatttagactttaaattgcatccgtaattctcttggctgaaaaacagtggtattttaagacagttttgttatacatgtgacttacttttgactcagcctgagaggaggaaatgtaaagagataagagatttggcccaaagcagcaagagactagtaaccttgagccaggacgaagccaagacaacgtgactcccaagtagcaggagcagaggtcggtcacctgtggcattctgtttcattcccttttaaaattatgagactttataggcagtgtaaaacatcagcaggcagcgatgtgataggatgtgcgaaaaagctggtctgataccatggctataattacagagctttagttcaattaggattttgtaaatgagcaaatgacctttttttccagtgccccttgtaatagttaatatgagtccatgcaatcttgtgatgccattctcctgaaggtgttgatttctggtacccagccagcttagctttggctgctggaagcacagtaggtactgatgattacttcctggaaatcttgacaggcttattgtactgtgtaatggggaaaagttaaagtataatgtttggtgttaataaatgactgatgtgaaaataggaacatgtgtctttaatatcaaatatggctttatttggcagtggaaatctaaattcccttaattcctacagtagtattttcttgccctgtggttgttatattttcctaaatgacatttttgcctgacagttggctttaggccaagttggaacacacttagactgaacagtggttttaacttaaagagatcagtccagaaaccatggataaattaggaatctttattcctggaattaccaaattacaaatttaccaatcatggtccacgaagagaacaaacattcatggtttcctctatcctactgctcattttcaggtctgtgtctacatctagtctctactatttgtgaagctctgtccatccatcttctttacaagttcttctttgactttacctgaacacataatattccaaacttcttaatgctaacatggaacacgacacctaacactcctccgctttaccagaccttttcccacacagcgtccactcactaatcactctgtcactccacgcactcccccggcctgccagtacatcacgggcaccccacacgtgcacccggcatgcc

SEQ ID NO: 4915 - DNA, 855 bp, Homo sapiens
  misc_feature (14)..(15): n is a, c, g, or t
  misc_feature (32)..(32): n is a, c, g, or t
  misc_feature (81)..(81): n is a, c, g, or t
aggaaggtgctctnncaggaagggctgcaggnaccctgggaaccggaccagtccagctcacaagtatgaagagaatgtcgngagaggaagtggtggctatgagtcagcatgagtcatctcgttccaatgagaatgaaggctgaggtgtgcgccttttttttttttttccttcttagtcgtgtgtacatcattgggaatggagggaaataaatgactggatggtcgctgctttttaagtttcaaattgacattccagacaagcggtgcctgagcccgtgcctgtcttcagatcttcacagcacagttcctgggaaggtggagccaccagcctctccctgaataactgggagatgaaacaggaagctctatgacacacttgatctgaatatgacagacactgaaaatcacgactcatccccctccagcacctctacctgttgcccgccgatcacagccggaatgcagctgaaagattccctggggcctggttccaaccgcccactgtggactctgaggcctctgcatttgcgggtggtctgcctgtgatattttggtcatgggctggtctggtcggtttcccatttgtctggccagtctctgtgtgtcttaatcccttgtccttcattaaaagcaaaactaaagaaaaaaaaaaaaaaaaaaaaaaaattcgctctctctacccctctccctctacacctctaactccctccccttctacccaacaatttcggcccgcttggcccagcccatttttacctctgccaggtttatcaatgcgctccgaattcgggtccacttggcccaattcccccttaagggggcccgtttactccatggcccgcgttttcgcgtccg

SEQ ID NO: 4916 - DNA, 4507 bp, Homo sapiens
  misc_feature (1190)..(1211): n is a, c, g, or t
  misc_feature (2629)..(2648): n is a, c, g, or t
agcggagtccgctcccggttcctggctccagctaggctcggcagaaataggagcgcgcaggcgcgacgtgcggctcgcagaacggcgagtagcggagcgggacccgctggaatcatcatccagggacgtgccagaaaccacaagaaaacatggggagggttttcctcacgggagaaaaagccaattccatattaaaacgctacccaagagctaatgggtttttttgaagaaataagacagggcaacattgagcgtgagtgcaaagaagaattctgtacatttgaagaagcaagagaagcttttgaaaataatgaaaaaactaaggagttttggagcacctacacaaaagcgcaacaaggggagagtaaccgaggaagtgactggtttcagttttaccttacctttccgttaatctttggcctcttcattatcctccttgtcattttcctaatctggagatgcttcctaagaaacaaaactcgtagacagacagtgactgaaggccacattcctttccctcagcaccttaatattatcaccccaccccccccaccagatgaagtgtttgacagcagtggattgtctccaggctttctgggatatgtagttgggcgctcagattccgtctctactcgcctgtccaattgtgatcccccgccaacctatgaggaagccactggccaagtgaacctgcagaggagtgaaacagaacctcatttagacccacccccagagtatgaggacatagtcaactccaactcagccagtgccattcctatggtgcctgtggtcaccaccatcaaatgaagctgcaaacttctttttactctaatcatttttaaaatactaatggaagaactttctagcactttaccactacataaatgttcattgacttattttattggactcttaccgcataccacttcacacttgttttattttctttagttttgtttcttgttatagaatcattatccatgctcatttttgctaggggaaatatatgaagagggaaaacatactaatgggggtctttctgtgatgtgatgagacatacatgtaagtgtatatatgtgtgtataggcatatatacgtgtgtatgcatcaacacagtatatgtaaaactgtcttaaaaatccattaacttctacctaaatcacctggaaggagagcattactcaccaaannnnnnnnnnnnnnnnnnnnnnaatttgtgtaatagccagtgacatgctgtagatttttgcaaactggatgtacttagcatgttttctaattctgactggcttttgttaacttgataattcttcatctaccttaaaaagaaaaaaattacacatagtcattcttgatgttataaatagagaaaaagtgtgtgtgagcaataatgcataagctactgataacttgcttacagcagatagcaataaggtatttggtggcattcggcttgttttgtaatagggattttttttttggttgaccactcccccacacttccaaaattaaacagtgttttcttagcatcttgaatatctcctgcggtgtatattaacatcttgatgagacagatttccaggcaacaaaataatttctaaaatggatatatgtgtggattaatgacaggcagtaaatacccattactcctttactcatagctggtaaaattattcccactgttttattgccttttactgtacgttctacactctgtcctactcccacagaattttcaagcccttaagagtttagttaaaataaaatttttgaaattattgtcttaaaaaaaaaaaaaaaaaagatgtatttgaatcaagattgttaggaggtaattttccattgaattatcaactgtgatttttatattgccctccaagtggtagaagaagattgcaaagtccatgttatgctaggtgcacaataaatctagtaatagccccacacagatctcatcattgttgctacttccttttgtattttcatcaggtatttttttaactgtagggtttttacttttttcttggagcagagagaacaggctgtaaatgggttgccaacataagctggctgagaaataaaagaaaacaagacagttgttcataaagtttcattttgtatgcactgatggcaaattcattaggtcagttaagggaaatatttgtaccacttccaaacttttcagcgttggataaaatgattgatgaggcaggcagaaggaatgtaggtttcaggtgtgtcatttcctgctgcttccagctccatccctacagactcctccccgagtcctgccctggaaccaaaggaaggaggaacactgaggggaatcctgaagtaggagtcagatgacctgaactcagatctccctctatcacatgcttgccaccactgtaccttgagcaagaatcatatctgaccctcaacctcctcaactctaaaatggggataacatcatttgtcctgcacttctctaagggctttacaaggatcaaataagatggtgtgtatgtaagaaatttgtaaaatgtgaagagctatctacactaagttcgtaatgttattattattgtgcttcatggagaattttcccctctgttttcctaaattgtatgagagctttcacacagtnnnnnnnnnnnnnnnnnnnnccataaatgggtaacatattcctaatctgagtgtgtgggctgttagagaacccctgccatgctctggtctgttctgaaactgtgccaactgaaagatgatagtccacacagcacaaacaggtttaagcaaatgatagaaagggaagtaaggcgtgtgtgctagttaataggtttagtagcttttatggactaaaaatgattgattgtatcttgaccctggtctcagaaatgacatttttacttttgccatgagtacacatcagatatctttggcttctatttaaagctaaaggtagaagtgtttgatccagtgaactgtgtatgtatgtgtggggtttttttctttatttttaaatgaaaattaagacaccttttgtgtggacatgtttttgtctttaatgtcaggctttagattagaccagcagttttcaaagtatggccaatggacccctgggttccttgagagcctttcaggggggactatgagatcaaaatatttttattataatgtgaagacattgtcttttcactctatctcaaaaaaagtgttgcaaatgtaaaacattgccatcttctcacaaatctctttttttgtttttgaaaatatggccatttttcataaaatgttatttgtgttagcatgtaatgggtttactatgtttaaataagttaatactttaaaaattttcaggtttttttagtatggtgaatattgatagatataaacctcatgaacaaaagtactttggcatccagattctcaataaatgttaagagcgtaagtgtaagggggtccagagaccaaaagttttagagctacaggattagacataggagcaggatattctgttagtgtgatttcttgcaactttattttacattttaaactgctgatattggatataatgctgctttttagagacacctaaattgcagtatcagaatgaatgttgatgtttgaagccaaaaagccaaatgcttaaactgatcaatgactgtagctttttagactgttggtcaaagaacattctacttcacagtaatagctctatcagccacagatctcatggtggctgttgcatgataatgataggataaacaaaataccactgtcttcaagaaacattatcttaggtttgtttgtttggtttgagtttgatttggcttttatattttttaaaatcccttttgctaccccatctggttttataaactgagtttcttagcattcgttaaaattaaggggtttgtttggaataatatatattttttatgcttttgtctttcttacctgattgatattacattcacctttgattgttttttaaaagtttatttttacagaatatatttagtacctttcttaaggagtaactgaattgaatcaaccagtttgcatttaaataaaagaacaggctcagtggtcttcctgtagaatggtttacatgcctgcatgtgcagtagttgtgtctggaatcctagaattggcactttctgcctccttgctctaaatgtcacaaaaaattatacttccttaaagtaaatgtaatgatttcttcttttcctattgaccagtacagatagatatgttgtgtttgcttcatttttaatgatgacttcaagattgatgatgtgatccaataactgtggaggtagctttaacttggttctgtgtaaatagtatgtattttattataatatttctcattttaagatgcttggtttacattaaattatggtatttaactatttttatgtttatactaggtagggtctttcttatgtttctgtgtttttggtatgctaaataaagctatttttaaacccaagagaaaaaaaaaaaaaaaaaaaaaaaaaag

SEQ ID NO: 4917 - DNA, 560 bp, Homo sapiens
  misc_feature (426)..(450): n is a, c, g, or t
  misc_feature (551)..(551): n is a, c, g, or t
tttttttttttttttttttttttttttttttttttttttaaggtcttagttctctttattagaattgtttctatttgccaaagtaactcaagcacttggaacaaattaaacaatacagggatagataaagagaaatgtagcatcagtctcctcccaggcctactcctcccccaagccaggtacccagggctgcccagtgcaggggcgttggcagaggcagttggtacacagtaccctagttagtcctgaaagctacgcattcgaggctcagagagatgaggcaatttgcccaaggacccacagatggagacaggctgggggtggggcagggtttcagtcacctctccaagctctccttggagtccagagatgcagctcagcctggccctcctctcctctcctggtggcacctgctggccacgcgtnnnnnnnnnnnnnnnnnnnnnnnnnccggggcaagtctgcccagcccaggcctgtacaagccactgtgcccacaccccacactccatcccgcctggatctagcagggctggcattttcatctccantccggtcga

SEQ ID NO: 4918 - DNA, 2269 bp, Homo sapiens
agatgatgctgtttttaggagattgtttaaaagttcatgcttgttagtgtttggtacttaaagatacttttgaaaatggtttatttgccatctttttttgtgtgtgtgttgttttttgttttttggttttttgagatggagtctcgctctgttgcccaggctggatggagtgcagtggcgcgatctcggctcactacagcctctgcctccctggttcaagcagttctcctgcctcagcctccaaagtagctgggattacagtcatgtgccactgcacctgcctaattgggaaaacaagttttaaatgacatctcttttttccaccagatgttgctgtagcattacatttatctgctgtgttaaattgttactaatatgcaattatgtaaaataactttttaactgaaaatcttaagtgtagagatagcttactagctaatggttcaattgtaaattcagatgagccactgcgcctggcctatttgccatctttgagctaagctaaccgtacttaagagtttgttttcctttccaaagaaaggaatgtagagagtaatatgttggtaatatgatttatattagtgaagagtattatgaatggagtttctatttacttgttattaaacaagttcaaatgatttttttttttcttttagtgattagctttttcttactgcttcaaatttggtaaaagtgttctatgagatattattttatttattttttggagacggagtctcactctgtcacacaggctggagtgcagtggcacaatcttggctcactgcaacctccgcctcccaggttcaagcagttctgcctgccatagcttcctgaggtcaggagttcaagaccagcctagccaacatagtgaaactctgtctctactaaaaaatacaaaaattagctgggcgtggtggcgggcgcctgtaatcccagatactcgggaggctaaggcaggagaatcacttgaacccgggaggtgaaggttgcagagagccaagatcacaccactgcactccagcctgggtgaccgagcgagactccgtctcaaaaaaaaaaaaaaaaaagctttaaaaagctgaattttagaaatatttctagcagtgtcagtgagttcctcttttaatagtgttttaaagtataaatctggtaacatactgttcttgtagttttttgttagttttgtttttcaggttaattacccaaagcctcatccatcctcaaggtttttaaattttatttttttaaaataaattgtgcattgtatttgtgaatttttaaaatattactgttttatttaaatgccatgctgagcaattgttctctgtacatggtaaccaaaacttagagatttcgatcaattttgatcaatgtttagtaaaccaaaacatgtactgtgtacaacggaaataatatggcatattagccaggcatgatggttgcccaagacagttaaattaagctcaattctgtattttattagggctctgttatgtccttcatctgaaatgtacacatttttggtgtatgcttggtactggagattcatatatgcaaatattctcatgcaagaagttccacagtaacaacagcaaaaagaaaaaattagttgtccagccagtgctggaggaaaatgtttctggggaagatgactcagtcattttgtggcgagacaccctttggtaactcccactgaccagtcttgggagccttcctggaatgatcgtgggctgagcggagatgttttttgcaaaatgaaactgaagctgaaagaaaggagaattcgagtgaaccaagagaaatccaaagacctggggaaggaggacttaagatgaaagtgaagcaagagagggaaggggaaatgaagtgaaaatggcgtgagggtgtgagagaggtttgggtttaggaaacatgttttttagtgctatttccaaccaggggtcgcaaaactcagcaggctgtagaaaccaggggttggcgacggtgcgggggaaagcctgtgcccacacttttaaaagaggggggccatttgctccagccattgcacggaaaaaaaactgggggcaaccaagcttgggacaatcaggttatgtttcttctaaaaggtggaacctttgactgaattttcaaaacagaggtataattacaaaacaagatgttcccataaacaccgcatgtgggcgcccaatacatttttgttttgaagccctggggtggccaaccagattttgggacccacctgcccttaacgttggttaaacaaccc

SEQ ID NO: 4919 - DNA, 3511 bp, Homo sapiens
cgggtgccatgcagctttctctaatttgctctcagttcctggctatgaattgctaaactatcagtctcgcgctcaccgcccggctgaggaggtgaaagtttctccccaggaagataaaccgcaaaagacatatattgtgcatgatttgcgccttttctttggctttttctttctttcttcacccccccacccacttttttttttttttttttcaaaaagcagagagggaaaaacggagagtgaaggagcgaggaggcgagcgtgagagaaaggagagagagagaaaagaaagggcgaggggctagtggaggaagtaaggaggggcgcgctgcgcgaggcggagagagggcgaagcagtcgcggcactggcgctcacattcctctatgctacaaatccaggaggaagtttttttttagggggctgagatgctccatgcctttaaaagggcagccttgacgcgcggccctctcggcagagactgagcggcgagaaagtgcgagccgggccggcagaatctgcctggcgggcgctggagcctgcgttactcgcggcccgcagccgtccggctactttgcgtttggcccggccagcgccgcgcggcgcgcgcgcgccattgcctgcaggctaggacttcgcgaggtgggtcgactcaccctccctcctcctcttcttcctcctcttcctcctcctcttgttcctcctcctcctcccgattttccctcctcggctggcgagggtggggggggcgggggaggccggggctcgccccgagcagccacgatgctcctggacgccggcccccagtacccagcgatcggcgtgaccacctttggcgcgtcccgccaccactccgcgggcgacgtggccgaacgagacgtgggcctgggcatcaacccgttcgccgacggcatgggcgccttcaagctcaaccccagttcgcacgagctggcttcggccggccagacggccttcacgtcgcaggcgccaggctacgcggctgctgcggccctgggccatcaccatcacccgggccacgtcggctcctattccagcgcagccttcaactccacgcgggactttctgttccgcaaccggggttttggcgacgcggcggcggcagccagcgcacagcacagcctctttgctgcatcggccgggggcttcgggggcccacacggccacacggacgccgcgggccacctcctcttccccgggcttcacgagcaggctgccggccacgcgtcgcctaacgtggtcaacgggcagatgaggctcggcttctcgggggacatgtacccgcgaccggagcagtacggccaggtgaccagcccgcgttcggagcactatgctgcgccgcagctgcacggctacgggcccatgaacgtgaacatggccgcgcatcacggcgccggcgccttcttccgctacatgcgccaacccatcaagcaagagctcatctgcaagtggatcgagcccgagcagctggccaaccccaaaaagtcgtgcaacaaaactttcagcaccatgcacgagctagttacgcacgtcaccgtggagcacgtaggtggcccggagcagagtaatcacatctgcttctgggaggagtgtccgcgcgagggcaagcccttcaaagccaaatacaaactggttaaccacatccgcgtgcacacgggcgagaagccctttccctgccccttccctggctgtggcaaggtcttcgcgcgctccgagaatttaaagatccacaaaaggacgcacacaggggagaagcccttcaagtgcgagtttgagggctgtgaccggcgcttcgctaacagcagcgaccgcaagaagcacatgcacgtgcacacgagcgacaagccctatctttgcaagatgtgcgacaagtcctacacgcatcccagttccgtgcgcaaacacatgaaggtccacgaatcctcctcgcagggctcgcagccttcgccggccgccagctctggctacgaatcctccacgcctcccaccatcgtgtctccctccacagacaacccgaccacaagctccttatcgccctcctcctccgcagtccaccacacagccggccacagtgcgctctcttccaattttaacgaatggtacgtttaaaatcagaaacaaaacatcgaacaaaaccctatttaagagactgatcacacacgtatacacaacattactgaaagaaccctgcgaatcaaaacaacccccacacagaccccgcaatcctcttttaaaaaatctgccaatagacccaggacgagtaagagaggaagcatcaaccttttaaaaatttcctttcgctttcattatttttctttttttggcaaaggcttggtacccaaggtgcggtagggggtcgagggggaggaggccacctgaccaaatgccgccaaccccgagggccagtttcttgtcgaattggtacgggctctctggggcttcggcttctttttttctttgttttcttgtaaatacagaattattagcttaaaactgtactgttgaattctgtaaatagttatatctcggttggagcgggtgggtgggattgtggcgttgtggtctttgcattgggggaggggggagggaccggatgggcggggggagggggagggggaggggtgggcggccgaaagccaactgtttgtactgaatggcaagaatgttctagtaaatgtgtaccaaaatgtgaattactttgtacgattacagtctccacgtcgacctaacccaatattattggtattaatgtgctttttttgtataaagtgcaaacatttcgtcccaaagtctaagtactttagtgcagtaaaatgttgtttcatgtcctgtcaagaattcgtatagtacgagcctggatctgcgtgtcaaactgttccatttgtttatgtaaagtgatattaaaaaagatataaactataactgtccgttacttttggcaaaagatacaaccacataatgtatataattcctagtttccatatttatccgcatgtaaagggccggtttatccatgttacagctcttcaatatttatggctagaagaactcgtatgtacactttagtttccagaactgtttggtaacctttcgtaccttattaaagattcttaaatctcaaaaaaaaaaaaaaaaaaaaaacttcacccaccagcaacctgctgcctcttctgccagtcttaaagggtctccagaaaagctctccagtctcccttgccttccctttctgtcactgcaggtcgtataaacgtgataaatgaatgctaccctgctggctctccgagagagtgtaattagtatttatatcaaaatttatgaaacaaattttcggccgcagtataatttaaatgacctttgcagatgtgaaataacaaccattaaaataacaggaattagattgcccaagccaacatcaatatttaatgtagacgaaattgtcagaagcttcaggggctcgctctgcaaaaattgaaatgaactttgcacccgagggtt

SEQ ID NO: 4920 - DNA, 1051 bp, Homo sapiens
cgccctaggggctcggatcgccgcgcgctcgccgctcgcccgccagcccgcccgtggtccgtggcggcgcgctccacccggcacggggaggcgcggggcgcaccatggccgcagacacgccggggaaaccgagcgcctcgccgatggcaggagcgccggccagcgccagccggaccccagacaagccccggagcgcggccgagcaccgcaaggtggggtcccggccgggctttattggggcgaccggggggcgggagggacgcgggaatcagccggtgcccgacccgcagtcctccaagccggtcatggagaagcggcgccgagcgcgtattaacgagagcctcgctcagctcaaaaccctcatcctggacgccctcagaaaagaggtaagtcgggggcgaagcgcgtattaacgagagcctcgctcagctcaaaaccctcattcctggacgccctcagaaaagagagctcccgccactcgaagctggagaaggcggacatcctggagatgaccgtgagacacctgcggagcctgcgtcgcgtgcaggtgacggccgcgctcagcgccgaccccgccgttctgggcaagtaccgcgccggcttccacgagtgtctggcggaggtgaaccgcttcctggccggctgcgagggcgtcccggccgacgtgcgctcccgcctgctgggccacctggcagcctgcctgcgccagctgggaccctcccgccgcccggcctcgctgtccccggctgcccccgcagaggccccagcgcccgaggtctacgcgggccgcccgctgctgccatcgctcggcggccccttccctctgctcgcgccgccgctgctgccgggtctgacccgggcgctgcccgccgcccccagggcggggccgcagggcccgggtgggccctggaggccgtggctgcgctgaggctgtggccctgagactgcatcggaggcggcgccccgttctagggccgtggcctttgccgagactgtagcagagaaaacgtatttattattccagaaaaaaaaaaaaaaaaaaaaaaaaaaa

SEQ ID NO: 4921 - DNA, 2130 bp, Homo sapiens
gtagagaaaaacgcacaagaaagacaacgatctgatagtcagcttcctacgatgcatccacgtataacagagacgaagagcttaataacgtgggagaagactttcagggaggtgggttgcaaatttctaaggtaacaattgctctattgagtcaccacgaaaaggctggagcttcatgcatcctgggagactcacacatttgcatgaaggacttcctgttaaaaatggaacaagatacattgcagtgtcatttatagatccctaagttatttacttttcattgaattgaaatttattttgggtgaatgactggcatgaacacgtctttgaagttgtggctgagaagatgagaggaatatttaaataacatcaacagaacaacttcactttgggccaaacatttgaaaaactttttataaaaaattgtttgatatttcttaatgtctgctctgagccttaaaacacagattgaagaagaaaagaaagaaaaaacttaaatatttatttctatgctttgttgcctctgagaataatgacaatttatgaatttgtgtttcaaattgataaaatatttaggtacaaataacaagactaataatattttcttatttaaaaaaaagcatgggaagatttttatttatcaacaatatagaggaaatgtagacaaaatggatataaatgaaaattaccatgttgtaaaaccttgaaaatcagattctaactggatttgtatgcaactaagtatttttctgaacacctatgcaggtcttatttacagtagttactaagggaacacacaaagaattacacaacgttttcctcaagaaaatggtacaaaacacaaccgaggagcgtatacagttgaaaacatttttgttttgattggaaggcagattattttatattagtattaaaaatcaaaccctatgtttctttcagatgaatcttccaaagtggattatattaagcaggtattagatttaggaaaacctttccatttcttaaagtattatcaagtgtcaagatcagcaagtgtccttaagtcaaacaggttttttttgttgttgtttttgctttgtttccttttttagaaagttctagaaaataggaaaacgaaaaatttcattgagatgagtagtgcatttaattattttttaaaaaacctttttaagtacttgaattttatatcaggaaaacaaagttgttgagccttgcttcttccgttttgccctttgtctcgctccttattctttttttggggggagggttatttgcttttttatcttcctggcataatttccattttattcttctgagtgtctatgttaacttccctctatcccgcttataaaaaaattctccaacaaaaatacttgttgacttgatgttttatcacttctctaagtaaggttgaaatatccttattgtagctactgtttttaatgtaaaggttaaacttgaaaagaaattcttaatcacggtgccaaaattcattttctaacaccatgtgttagaaaattataaaaaataaaataattttagaaaaaaaaaaaaaaaaaatattggtgtttatcttccaaagtgaataccatgatggaatcgtcctgaaaaacacaaaaacaaaaacacacaaaaaaaaaaaaaaaaaaccacaacacaaaaacacaaaagaacaacacaaaaaaaaaaaaaaaacaaggggggggggcacaaaaaagacccaccgagaagacacaaacataagacaccaacatagtaaaacaacacgaccaaaagagagaaaataaaaacagcaaaaaaggagcaaataaaaaacggagaaggacaacacctcccaatacaacgaagagacaccccaacaagggggcgcacatgcagccgcacacctccaccacgaaaacacgcacgcagatcaaccaaaagggagtgacggggccaaccacacacccttactcgcggacgaaacacgccgcgcggatttaaaatacgaacaagacacacaacaatatcgataacaaccgtagcgaccgacagtgcactgacaccggccgaatcgacgcggacgccaaactccacacacaccacaagcacgcagcaaccaccgaacgacaccacacacatgcaccagca

SEQ ID NO: 4922 - DNA, 4775 bp, Homo sapiens
aactggaatgctctcccttcgctcagctcctcagtgtaggagtgatctgacagcaggacaagctcagcctgcagctgccgtgggctttgtgtggactggacgcagagcttgggagacgggggagggctattactccaattcactgtcaatggaattacagctatagcggcagtgtatataggattgctttttctcgtcttcctgggttctgaagtaacggaagctaccttgtataaagacctcaacactgctgaccatgatcagcgcagcctggagcatcttcctcatcgggactaaaattgggctgttccttcaagtagcacctctatcagttatggctaaatcctgtccatctgtgtgtcgctgcgatgcgggtttcatttactgtaatgatcgctttctgacatccattccaacaggaataccagaggatgctacaactctctaccttcagaacaaccaaataaataatgctgggattccttcagatttgaaaaacttgctgaaagtagaaagaatatacctataccacaacagtttagatgaatttcctaccaacctcccaaagtatgtaaaagagttacatttgcaagaaaataacataaggactatcacttatgattcactttcaaaaattccctatctggaagaattacatttagatgacaactctgtctctgcagttagcatagaagagggagcattccgagacagcaactatctccgactgcttttcctgtcccgtaatcaccttagcacaattccctggggtttgcccaggactatagaagaactacgcttggatgataatcgcatatccactatttcatcaccatctcttcaaggtctcactagtctaaaacgcctggttctagatggaaacctgttgaacaatcatggtttaggtgacaaagttttcttcaacctagttaatttgacagagctgtccctggtgcggaattccctgactgctgcaccagtaaaccttccaggcacaaacctgaggaagctttatcttcaagataaccacatcaatcgggtgcccccaaatgctttttcttatctaaggcagctctatcgactggatatgtccaataataacctaagtaatttacctcagggtatctttgatgatttggacaatataacacaactgattcttcgcaacaatccctggtattgcgggtgcaagatgaaatgggtacgtgactggttacaatcactacctgtgaaggtcaacgtgcgtgggctcatgtgccaagccccagaaaaggttcgtgggatggctattaaggatctcaatgcagaactgtttgattgtaaggacagtgggattgtaagcaccattcagataaccactgcaatacccaacacagtgtatcctgcccaaggacagtggccagctccagtgaccaaacagccagatattaagaaccccaagctcactaaggatcaccaaaccacagggagtccctcaagaaaaacaattacaattactgtgaagtctgtcacctctgataccattcatatctcttggaaacttgctctacctatgactgctttgagactcagctggcttaaactgggccatagcccggcatttggatctataacagaaacaattgtaacaggggaacgcagtgagtacttggtcacagccctggagcctgattcaccctataaagtatgcatggttcccatggaaaccagcaacctctacctatttgatgaaactcctgtttgtattgagactgaaactgcaccccttcgaatgtacaaccctacaaccaccctcaatcgagagcaagagaaagaaccttacaaaaaccccaatttacctttggctgccatcattggtggggctgtggccctggttaccattgcccttcttgctttagtgtgttggtatgttcataggaatggatcgctcttctcaaggaactgtgcatatagcaaagggaggagaagaaaggatgactatgcagaagctggcactaagaaggacaactctatcctggaaatcagggaaacttcttttcagatgttaccaataagcaatgaacccatctcgaaggaggagtttgtaatacacaccatatttcctcctaatggaatgaatctgtacaaaaacaatcacagtgaaagcagtagtaaccgaagctacagagacagtggtattccagactcagatcactcacactcatgatgctgaaggactcacagcagacttgtgttttgggttttttaaacctaagggaggtgatggtaggaaccctgttctactgcaaaacactggaaaaagagactgaaaaaaagcaatgtactgtacatttgccatataatttatatttaagaactttttattaaaagtttcaaatttcaggttactgctgcgattgatgtagtggagatgcctgaacacaattctatattttagtattttttagtaatttgtactgtattttccttgcaaatattggagttataaaccatttactttgtgttctactgagtaagatgacttgttgactgtgaaagtgaattttcttgctgtgtcgaacaatcaggactgcattcatatgagatccttgtagtataagcacaggccatttttcactttggtattaataaaatgtaaaaaaaaaaaactggctgaatggctgaatgagataaaatttaattttaaaaaatggttatgaaataatgttccaattattaaatttgtattatcccagtggtattcaataaatcaaaatgtgtgaagtaatgggcaatatcaaacttcctgcatatctccatttttgctctaggcaaattaattatccttaaaaaagttaagcatatcttctgaactgaatacatcagctggcataaaaggagcatgaagtctgttaaagccattgtcagcaaagctttgaaaataaaggacttcacaaaaacggtaatgtaaatgtgcttccaagttggggggaaaatgtgtacttaggaaaacatggaaacttagacttgtatagtgtaatgaacacaaataccaaaactgcattttggttttgcctataccatcctgatttttgaaaagtgaattataaacacaaaattgttagtgtttatgatgtttttatcataaaggatgtcagagaaactttatgcatattaaaaatgtaatgtaattataagcgattcccctcaacaatccagagaaagtagttctttaaataagagataatttaaagaaaaataaatactagacatcaaatttagatctggtttatgtcaaaggttttaacactgtacataaatgttcaatttacttttacaaagatcaagaatactgcccattactgtcacaattttccagatattatataatgaactcgtaatgtaacatttccttctagcttcctactgaattgtgagctgttacttgttgaaaaaccatatcacttttctgttgccatgattttttttttttcaacaaaaaaccaaagtgcattgtacgccctttggccagtcttgtatgtgccttgatccaacgctacatgtattcagcttttaaaactccacaaatttttcatactccttaaatatgaaaaattatggtcttattgctgaataaaacttttaaaaagtacagaataattgtgcttgctttttcaggattgtgttactatcactaagtagcaaattgcccagcacattagtcctaaacgtcccatgtatttttctaggcataaaaataaaagttggctaaaaattttaaaaaatcaacatcttgaggttgtgtatcattttacttcaaagagttcagtgtttcatgtataaatgtatttcctcttacttatacactgtatagatggaaaatttaagaaatggtttcaaagcctttctctcttaggcgcactgctgccactgtcctgatactttttaaggtggtctttgaaaaactgtttttttaaaatagccttttagtagagtgagttggcatttgtgatactgtgaaatacacactttctctttgtccctgtttctggcatacaactcctaaaatccttgcaatcttcaaagtgatatattttcatatgctaatgagttcactgatagctggcaggccctaggtagcttcaagataaagtctgatcattgaaaagaccaagacatgattatagggttgggacttacaaccccaaaccctaacctccagagagggcgaagtggatgaagattaagttgatcaccagtgaccagtggtttaatcaagcatgcctatgtaatcaagcctccataaaaaaacaaaaggtcaagatttggagagcttccagattgctgaacatgtggtggttcctgcaggatggcatgcctggagagggcatggaagctctgtgcccacctagacctcaccttatgtttcctgccatctggatcctttgtaacatcctttataatacgtcagtaaatctgtttccttgcattttgtgagctgttgtagcaaattaatagaacacaaaaaggggatcctgggaaaccaaacttgaagctgactagtcttgcaactggtgtctgaagaggaggcagttttgtgggaataagccctcaacctgtgggatatgacacaatttccaggtagacagtgtcgggattaaactgaattggaggacacccagctggtatctgctgaagaactgattgcttgcgtggtgtatggggcaaaacttgttaagacaagtcttctatgttgattattgttgaatgagagaattaaacacacatacacactt

SEQ ID NO: 4923 - DNA, 3289 bp, Homo sapiens
  misc_feature (434)..(452): n is a, c, g, or t
agcggaggtaaagaagaggcatggaggtgaatgcaggcagcagctttcagggaagaagaagcatcaggctgcagaccttgcctcctccctgccctgatggcaggactgaggcctcccagggatgaagaaactgaggctgaggcagttcaacaacttgcccaaggccacgcagcaggtaaacacagcaacaaaaaagttatgagaaccaagagctctgagaaggctgccaacgatgatcacagtgtccgtgtggcccgtgaagatgtcagagagagttgcccacctcttggtctggaaaccttaaaaatcacagacttccagctccatgcctccacggtgaagcgctatggcctgggggcacatcgagggagactcaacatccaggcgggcattaatgaaaatgatttttatgacggagcgtggtgcgcgggaannnnnnnnnnnnnnnnnnnggattgaagtggatgctcggcgcctgaccagattcactggtgtcatcactcaagggaggaactccctctggctgagtgactgggtgacatcctataaggtcatggtgagcaatgacagccacacgtgggtcactgttaagaatggatctggagacatgatatttgagggaaacagtgagaaggagatccctgttctcaatgagctacccgtccccatggtggcccgctacatccgcataaaccctcagtcctggtttgataatgggagcatctgcatgagaatggagatcctgggctgcccactgccagatcctaataattattatcaccgccggaacgagatgaccaccactgatgacctggattttaagcaccacaattataaggaaatgcgccagttgatgaaagttgtgaatgaaatgtgtcccaatatcaccagaatttacaacattggaaaaagccaccagggcctgaagctgtatgctgtggagatctcagatcaccctggggagcatgaagtcggtgagcccgagttccactacatcgcgggggcccacggcaatgaggtgctgggccgggagctgctgctgctgctggtgcagttcgtgtgtcaggagtacttggcccggaatgcgcgcatcgtccacctggtggaggagacgcggattcacgtcctcccctccctcaaccccgatggctacgagaaggcctacgaagggggctcggagctgggaggctggtccctgggacgctggacccacgatggaattgacatcaacaacaactttcctgatttaaacacgctgctctgggaggcagaggatcgacagaatgtccccaggaaagttcccaatcactatattgcaatccctgagtggtttctgtcggaaaatgccacggtggctgccgagaccagagcagtcatagcctggatggaaaaaatcccttttgtgctgggcggcaacctgcagggcggcgagctggtggtggcgtatccctacgacctggtgcggtccccctggaagacgcaggaacacacccccacccccgatgaccacgtgttccgctggctggcctactcctatgcctccacacaccgcctcatgacagacgcccggaggagggtgtgccacacggaggacttccagaaggaggagggcactgtcaatggggcctcctggcacaccgtcgctggaagtctgaacgatttcagctaccttcatacaaactgcttcgaactgtccatctacgtgggctgtgataaatacccacatgagagccagctgcccgaggagtgggagaataaccgggaatctctgatcgtgttcatggagcaggttcatcgtggcattaaaggcttggtgagagattcacatggaaaaggaatcccaaacgccattatctccgtagaaggcattaaccatgacatccgaacagccaacgatggggattactggcgcctcctgaaccctggagagtatgtggtcacagcaaaggccgaaggtttcactgcatccaccaagaactgtatggttggctatgacatgggggccacaaggtgtgacttcacacttagcaaaaccaacatggccaggatccgagagatcatggagaagtttgggaagcagcccgtcagcctgccagccaggcggctgaagctgcgggggcggaagagacgacagcgtgggtgaccctcctgggcccttgagactcgtctgggacccatgcaaattaaaccaacctggtagtagctccatagtggactcactcactgttgtttcctctgtaattcaagaagtgcctggaagagagggtgcattgtgaggcaggtcccaaaagggaaggctggaggctgaggctgttttcttttctttgttcccatttatccaaataacttggacagagcagcagagaaaagctgatgggagtgagagaactcagcaagccaacctgggaatcagagagagaaggagaaggaggggagcctgtccgttcagagcctctggctgcatagaaaaggattctggtgcttcccctgtttgcgtggcagcaagggttccacgtgcatttgcaatttgcacagctaaaattgcagcatttccccagctgggctgtcccaaatgttaccatttgagatgctcccaggcgtcctaagagaatccaccctctctggccctgggacattgcaagctgctacaaataaattctgtgttcttttgacaatagcgtcattgccaagtgcacatcagtgagcctcttgaatctgtttagtctcctttttcaacaaaggagtgtgttcagaaaaggagagagaggctgagatcattcaggagtttgttgggcagcaagcatggagcttcttgcacaaattctgggtccataaacaacccccaaagtccctgctgatccagtagccctggaggttccccaggtagggagagccagaggtgccagccttcctgaagggccagaaaatttagcctggatctcctcttttacctgctaggactggaaagagccagaagtggggtggcctgaagccctctctctgcttgaggtattgcccctgtgtggaattgagtgctcatgggttggcctcatatcagcctgggagttatttttgatatgtagaatgccagatcttccagattaggctaaatgtaatgaaaacctcttaggattatctgtggagcatcagtttgggaagaattattgaattatcttgcaagaaaaaagtatgtctcactttttgttaatgttgctgcctcattgacctgggaaaaatgaaaaaaaaaaataaagcaaatggtaagacccttaaaaaaaaaaaaaaaaaa

SEQ ID NO: 4924 - DNA, 3738 bp, Homo sapiens
  misc_feature (2142)..(2163): n is a, c, g, or t
  misc_feature (3561)..(3580): n is a, c, g, or t
gtaataagccatttatatcagaaaccttttttcctgccacagaagctttaaattttcccctaagagtacaaagccaagagagtgtggtttatctaaatgtcctgaaatccacttgtcattccttaatttctcctctatgcaattaaagagaaaggggaaatctataacatttcttttgcccaagtgacacaaaaatgattactgcatagaaatcaaatgtaagtttagcttctaaatgaaataatatataggagggatatcagaatgtctagatagagaaagtattttcaaattcttgaatatatggatgctattaaaagctgctttccattgcctggaaagagagcttttttccctcctctattcagtgtttcaaactttggtcatctcaaattattgtcacttttaaaatgttaatgtcattctgagcagaaatagatatattttcagatttttttacactgatgctactccgtaattgcttaggagtattgtccatcatagtattttagaactagaagtaaacacataaatccttataaattacccaagtccaagctttctcatattgcatgtagagaacctgagacacatatgaaagtctagaatccttaacttctccccatttggtttttttccgcctcataacaccatgctgcctttccctcatatgatcaccaaccagtagctgagttcaaaaactacatatttcttgggcagtcctctactggtatgtgatgccaacttttatttctttcgaagataattgccttctttgcctagccaagcagccaattttattggagaaaagcaagttatatgttcacaaaatggaaggctttctacctaaatttatttcatctgtggtcctcttattctcttccattgcttttgacatacagtggaaaaacttggccaacgatgtgctctaaatatagtgcttgtgttgggttaacttttccattaatttctcaacatcaattattcaggcccctacagttgtggtattgaggcccctaaaggcttctgcctttcaccaattagtgctgccagttactgaggcttctcccaaaaggtatcagtccagtcttaaagatatttcattgtgaaagaagaaactaaactatcaggcctcttttacaaaatgagagattgaatttaagcttgtcaagcacgtactggaaggtatgaattacactaccatgtgttttgtatcttccctttcaagtgatgatgttaaatgaaggtaagtttttcatccttttttaatttttgttttttataaatcatttcagctttttctggtttatagaggtgtcttatttctaatgcaacagacccccaactttaacagatttgatatggatgcatttattcacaagcaaccccaaaagtccaaaaatgtaataattttgacaaggcccaaagttgagatgctatgaagcttgtgtgtgtgaaaagtcagttatgattgtctggagagaagctgtggtgtgtatgctgtagagtttccacatttcacatgcagtgtactccaaaaagcgggtttgggtcaaccatttcccatctctttttaagaagtgactgctgttggggccaggggacatcatgggaggtggggctgtccagttagctgtgccctgcaccttcagcccaggaaagatttgaacagagcaaaggcttcaagagagggcagaatgtattcggcagaaaagggactcaggtaagcccagcctgggatgagagcagaaaagcattcaagatttgcaggccttgctatggatgcgcttaatcaccatggaggccagcaatacccatctcagcatggctttgatattctctacttcctggcctttaaaaatgacctataatttttcagtttgctttactatattttataaagaaaattctatcttatggttgattgagcattgagacttatgaaggcattaggatagatagctcaggaatgtaaaggttcagaaaaggtctgttttctcagattaacaaatatgatggattccatggctgaccttggtgcttaaaccaggaggtttcaatctagtcctagagttgtgtccctctgaaaggcccaatgccatgtaactaactttaaactggatatatactttgagccttacnnnnnnnnnnnnnnnnnnnnnntaactcagtatttttatttcaattaatgaaaacagtcctcttttcaaccccaggttgcttacattttgctggtctccccaagtgaccattggtggagaccaattaatgaaggaatgaaattcactttattgggactgtggtattcaacagagccacacttaaccactttttccaatgaagaatctccagaatgataatgcccaaatatggatggccaagaagaatttgtatctacggtgtgctttatgtgtttttgacactgctgtattctgtgtgatcaagtgatttgcagctggttccaatgtgactgagtgttctcaaagatttctagtaactaagtcaacttaattttcttaagcctggtattactatcagcctcacatttaccactttgattctagttttttaactgttcataacagggcataccgagggttgggatgagagcctacttcctacctcttaaggcactttcctcattattttgccatataatcttgaactgcatgataagctgtttaaatgtccatgacttctcccagagcaactagcaaagtatatgacattttgaatagagattagtggaaaggaaaatgtagagatttaagttcagaggtacaaacctcaataaaacctccttagagcacataccatgagtagagtatatgtaaacgtatatgagaagagagtcgctataatagtcctctctaagtagattagttcattgtctaatggaagtgaacatctttactcctgttatcaccatagtactgaatgaactgtataatgagtttttcaaacaagtatttaaaatagaactttcacgtacaaagcaagggcataaagattttggtttgtgtttctgtaagtgtagtttaccatctaaagctttggtttttaattttaaaaaaagcttcaaggtattgccattccttagcatccttattgattatgggtgatgagtttttaactcttaaaatcatatacgtgtattagtttatcttaactgttgccctaagcaaaagggaaggtatacacctaagggatgtacttattttgcatttttggtcatgggtgggaatggggtgggtgcctacttaaatagtttttaaaaaagaaaaaaatcacaaatatttttctactgttatatatgatcttcctttatactagtttctctctagtaaggcatgccagaagcccaagataccatatcatgaattcttacatattgtaccttttgttggtggttaaatcgcatcagatgcttggcattgctgccataattataaaatgcttgtaaaggatcaaatatcactaaatactttaaattgttttacttaagagtctaatctgggaagttttcaaatcatactattaatgtgtaatctaagctcttcnnnnnnnnnnnnnnnnnnnnctggaacaatattgcttgtattcctgtcatagaacaggttttgtaatctttaaaagaaatgaaaatttatataataaagtttcaaatcaaaaaaaaaaaaaaaaaaaaaattaaaaaaaaaaaaaaaaaaaaaaaaaagggggggggggaaaaaatcc

SEQ ID NO: 4925 - DNA, 810 bp, Homo sapiens
  misc_feature (795)..(809): n is a, c, g, or t
gcattccgtgctatgattcaggcctaattaagtgattgcgtctgggcacggctataaaccactagctgcttcaactggtaaatccagtcagtaggcaactgcaggggctcgccactgactgaaggcagtggaaggttggcagaaggaggctgttcaaggctgtttttgccttcactatggcaaaaatcattttgaggcacctcatagagattccagtgcgttaccaggaagagtttgaagctcgaggtctagaagactgcaggctggatcatgctttatatgcactgcctgggccaaccatcgtggacctgaggaaaaccagggcagcgcagtctcctccagtggactcagcggcagagacgccaccccgagaaggcaaatcccactttcagatcctgctggacgtggtccagttcctccctgaagacatcatcattcagaccttcgaaggctggctactgataaaagcacaacacggaaccagaatggatgagcacggttttatctcaagaagcttcacccgacagtacaaactaccagatggcgtggaaatcaaagatttgtctgcagtcctctgtcatgatggaattttggtggtggaagtaaaggatccagttgggactaagtgacatcgtatcggttcctgttcagatgacatggggaagatgatggttcagccactggtactacgagaatgtttgtattacccacatttgaaatgatttgctatgatttttatgaagaataaaaatatatacacagttactggtaaaaaaaaaaaaaatcttgattctnnnnnnnnnnnnnnnt

SEQ ID NO: 4926 - DNA, 726 bp, Homo sapiens
catctggcatgtcccaccaactccacatcagcttccctcaccttcctgcagctcttgcctcaggaggccgctggtcttagagacattggactgtagactcaggaacagccttctcctgcctcctctgcacctggacaactcaactcctgccaagatgtcctgccagcagaaccagcagcagtgccaacccccacccaagtgtccctcacccaagtgtcccccaaagagcccagtacagtgtctgcctccagcttcctctggctgtgccccaagctctgggggctgtggccctagctccgagggcggctgcttcctgaaccaccacaggcgccaccaccgatgccggcgccagaggcccaactcctgtgacaggggcagtggtcagcaaggcgggggctctggctgcggccatggctctggaggctgctgctgacctggatcctgatgctgagacaagcgattttggaggaaacaagaatcccaagggcccaggaaaaccccatcttgatgcatgagttcccagataccctcttctggctttcacaggctgagctaggggttttcctgtggaaggtctgagctctccccagaaggcacttcctgtctgatgtccaggatgtcacatgttcccttacccctgtacctgtgaaggattggcagtgcttgtgcctgacctcatcaaaaaataaagctccttgtcctcattaaaaaaaaaaaaaaaaaaag

SEQ ID NO: 4927 - DNA, 2704 bp, Homo sapiens
ttaaatgcgttttttttttttttttttgaatattcaagaaaggtgaagtttaatttgcatataggcataacctacacctcacttggcaagtgttaggccacagcacaaacccctctgtccaatcacaaatgtccacaaatttgcaaagtaactggacacgaacgatatgcttctcaaactcacacacatattcgtccatcacacacacactcaaatgataaagaaatacattgaaatcctctacaaaagagatctgaggacagtaatcagatgacctcatgtgcggacagcactttgcagtttacagtctaatccatttggtcctcacaatagccctgtgagataagcagcacagggattactattcacaccgttttgcagatgaggaaactgaggctcagggatgtgtaaacaccagcctaaggttttccagttggagactgggcctaggactcagggccgggatgcctaggccagctctctttcataactggctttctagtgaaaaatgaaatgagctgtgtaaaaaccaacatcattaagtataatagaactattattttccttgagcagatcagactagtgctatcaatcctaatgttaatgtcatgctgcatggcagctgagatgaataattttctgaatcgttcatgtgtttatacctacaacaaaatgactgttttccattttggctctgcctcatcttaattttaagtcaccaatggccgctgagaaatgacacactgattagatttcattgacttaagtcttctattacacggtggtatctataatggagccattaaacttacaatctgatttcttactgaaatgaaaaagagttttatttattgattccctctgtgcacattagcctggctatacccttcagccataaatagtatgttctcttttatgccttttcgatagttgtaaaaataatacattttgcaattggatttttaaaaacctttatactttaaagtgaagaggttttttttcaaggggataatcaaactttgaaaaaaaaaagctaagtaaaatctcttgcttttaaataaaagttaattttattgggaataatccctgtattgcattactcttttcagttaagaatttaaaagctgcccaatcgctgctggcccaaaagtctcgtcttatacaataacatgagagaaagggtgctgatccatcattattcactccacatgggaccataatggatttttctcttccaggtgattcagtttctctgagtttcatttgtttataagtagtactttaagacgtactgaaatttaacaaacagtaatgggacttggtatgagagccacttgaaaatattgcaatggccgtttaaaattccgtctttaaattccttcagaaaagcactaaggaaaagtgacgacgttttacttcatgcctgaatctgtcaaataatatattggattaggtaagagatttgtccctgtagcaaaactagatgtctcagttaataacgaaaaggcatcccctaaaagctccaagataatttcgttgacagtacaaaatgtgggcattcattcgaaagcatgaaattggatttttcttctgattttctaggttaattttacagtatacatgttcgctacttggctgttagaggttgacctcccatctcctcttagaaatgggtctccataatggactagaggcagatgcagctgggaatgcatgctttgtgtgtaggcagaagaggatgggtactttaacgaccagaaaaaacactgcaaattgctcttggggatttttaatttgaccaaattgaagggattttaaaatgtgcattcctctcccagctggcacacgaatagtgcaggtcatcaacagacactccctcagaggtggagctctctctcttgccctcttgcagctccaggaaggctgcagactccagaaagtggtgtaattctcaaacaaaaatgcgaaaggctagtgagtggcacacccctgcagtcccagctgcttgagaggctgaggcaggaagattgcttgagtccaggagttcgagaccagcctgggcaacatggtgagaccctgtttttcaaacaaacaaaaaccccctaaaagtcagcatagcaattgacagtgcctaatatgaccagtgcggggcagttccaacatcctgcaggaaataggcgcaaaagctttgtcactagttgaagaaaagctgcgatccaaaagggaaggagcatttggaaactcctgtcttattttttgttaataagaatggctgcagtgtctctggaacatttgggtcaaagaaatgagtccgaacttccagaaaaagtgcacacagaaccatccctttccctctgaaggactctggcaactccaaggcagagtagaatgcatgcacctttccacgtgttgtttggcccgaaactagtatgtgtgtggtcctctcacagatttgtcccggttttagttcacccttcaggactatgcttttgagccatgaaagctaacctttacttttcttctgcaagaccttgaggtgtttggtgcaactgatacatattatttcaaaccctcagtttctggagcactgagaaataaatcacaagttatgcgttgttaggatccaaacagcccatgcttctcatcatgcatcaagatgcgtcaacctcttatttgaaactaaagagaacaaacaagcaacttt

SEQ ID NO: 4928 - DNA, 1146 bp, Homo sapiens
  misc_feature (1013)..(1013): n is a, c, g, or t
  misc_feature (1098)..(1098): n is a, c, g, or t
aacgccgccgctgccgccgccgggggtgggagccgcgctcgcccgcccgcccctcgactcgcgagggcgtaaaagtttgtctcagctcgagcattcctagcgccaacacgccctcaggtaaaggtggaagtaaatggccacgctgtattgacagagcaggtagatgaaactcaagagaaaaggtgtggataaatgaaactagcccatgatgaacctgttttctccgtgaccacaatattaaccaggatgaatggcggtggcagtgggcctgcatcacaggttgcagcagatgttctcaatatttctattaaaatttccttatttccatatgcaagaggagccacagagctgcatccttatggtagctaccatgccgtgatgtaagctgccattcactggggagctttggcaatagaattggctagatcaggaagcctatgtcaactatggaacaacaacttgcagctcatctctattgatgatacactgcctctaggactgggacagatagccactgagtacctgcttcaaatcaccctgcacgttttctctttggaaagataagcactggagaaccatctcgttaccttcagcagaaatggaaacaaatcaagacattaagaatgccgcagtggacagcagttatgcaaggttcagcagaggaagttttcaagatggtgtgcctcactagccagaaatcagaaaagatcgaagctagccttttcatctcagctgctccttaaatcagtgcaacccctccaaattaatgtgaattgaaacttgcattgcttttcaacttaattgaatacttactatatgtgaaccactgcacaaaataggggaagaagatgtgggagacaaagatgtggagcctgtcttcaataaatttacagttagtttcagggtacattgtttttcttctgctgttaattaggtgtatccccaagacaataaatacatgaatggaaaagtaaagaaaaaaaaaaaaaaaactttaataaaaaacaaaacanaatccaaaaaaactcctaacatggcaactcaggacattttaatccttttttttgttgttgggcttctgataggatccattttatnggttccataaatatttagtagactttagaactattaaaaaaaaaaaaa

SEQ ID NO: 4929 - DNA, 941 bp, Homo sapiens
ggtgttgtttccgggcttattgttgtgggttttccctttttcccccgcgagttgttctccaggagttccccgtgctgttgtgtgcgtctgtgtgtgtatagcggctgtctctctttctgtatattgggcgctctttaggggccccttttgcagaaatctgggtatgtgttatttggtccctctctggtttctttttatcggcccccccccttttgtttcttttttttttgtcttgttttttttcctttgcgttgtttttttttgtcttagggggactgtgttaagttcagacaaatcatgctgggtgtgtagagagtgtgaaatacgtcagtgaagtaagtagcagtgagcgattgtgaatgtgtaatgtaaatggaaaaccgggttttaccgtgttaagttattcactagggagccagtcgtagttctttgtaatcctctttcttccaaacctgctttgctgaaagttgcagaaaaggaagtgtgtggagagaaacagaacccttcagggtgggtcagaggacgccatccacagtggattcgtgttcgtttgcaggtggaagcagtgatttttaggacccactgattaaaaacaaacattcccaagtgtctctgagagatgctgtttatttgttaattaaaaagcttttttctctgtcttttaaattatggctttcatgtaataaggatatttttagtgaaaaattgttttcctttcaaattacagaccttttaaaaaaacttaatttgagcgagtaccttttcatttgacacttttcctgtttctaaccttaggaaaccagaatagcgtttggcagacacgacgttttcagtttacctttgacacctgccccactccattttgctttgtgatgtcttcatttaacaataaattatctgaaaaaacaaaaaaaaaaaaaaaaaaaaaaaaaaaaaaaaaa

SEQ ID NO: 4930 - DNA, 1082 bp, Homo sapiens
  misc_feature (856)..(873): n is a, c, g, or t
  misc_feature (1002)..(1011): n is a, c, g, or t
  misc_feature (1015)..(1016): n is a, c, g, or t
  misc_feature (1023)..(1023): n is a, c, g, or t
  misc_feature (1066)..(1066): n is a, c, g, or t
cacacacgtatcagcgaacatactgaaataatctaaacgacgagagagaggtgcggatcgccgtaggcactgaggaacgtcgttctcccacagatactaataacgcgaggggcggttaagctttttataggagaatgggtacctgcgcccctctcaggtgttggcatcatcagcttcatatgcccataaggctctatccaagtttaattgttaacgcagccaaggtctttgaccacacagtttcaaacttagccccagtgattcttttattacccccgctcaaaagtttgagtcagcccatcctgttgggagccctggagagagtggcacatcggggtgcgaaggggggacactccaaggcccctctgtctcttgctattactgctgcttctgattcttcgtcttctgcgaattctgtgagccaagcagaccttccctctcatcccaaggagccagagtcctcccaagatcccctggaggaggagggatccctgctgcctgcactgggggtgccaattcagaccgacaagatggagcattgatgggggagatcagagggtctgaggtgactcttgcaggagcctgtcccctcatcacaggctaaagaagagcagtagacagccctggacactctgaagcagaggcaagacaaacacaggcgctttgcaggctgctctgagggtctcagcccatcccccaggaggactgggatttggtatgatcaaatcctcaagccagctgggggcccaggctgaagacctggggacaggtcgattgctggaccagggcaaagaagaagccctgccatctgtgccctgtgggccttttccctggggcagcaccttgccctccccannnnnnnnnnnnnnnnnncttctatgaagacggactcttcatgaggttgaatttcatgccagtttgtatttttataagtatctagaccaaaccttcaataaaccactcatctttttgttgccctccccaaaaaaaaaaaaaaaaaannnnnnnnnnaaannaaaaaanaaaaaaaaaatttgggggggggggggggaaagcaaaaaaaggnattataaggattttcg

SEQ ID NO: 4931 - DNA, 5501 bp, Homo sapiens
  misc_feature (5375)..(5375): n is a, c, g, or t
  misc_feature (5433)..(5433): n is a, c, g, or t
ttctttcctgtttttccgctgttccttgtgtcctgtgattttattctggagctttccggatttctggtttttgtgccgcagccgttccggggtgtgaaggtgccaccaatcttgtgagccgtggtgtcctgagtgggtgtgcggactgcggtctgcctggagcctgtcttagtccgaaatggaggtatcggtccttcgctcgaagttcttttcatcctgcacctaccagatgtggctcctgttggattgagcccttctgttttgcctcggatcacagccccgaaggaagcagcagcgtctactggctgcagggcttgacatccgggttttctagctctgaacgagaacagagtcctggaaactatcaaacacaacctcgcctgtggcaggctgcactcccacaatggcccataaaaatgttgcccttttttttgtccctaacattttccttgattttcagagatgcacagaagatagctggtagaagtatcagtcattatctcatcaacatttacagcatcatccagcttgattaggggattcacatcttctccaataagtgtagattttgtataaagggcagtcaatttccgggaaaagagtgaacttctgttgtctccaatggcctttaaatgctgcagtttcagtttgcttcacaactcccaccttatatccttttgcccaccaggcggcgtacatgaacaaacagtctgtgagtaggtatacttgctgtcataaagttgtgatctaaatggcaataaatattgagctctcgggctcaatttgcttttcccccaaagaatctatacttatatccacattccacacacaaactgcatctttgtgctgctgcttcatttctatgtattgtaattctagcggcgtatagatgcttttggaccgtttgttagctgatttggaagcagttttctgtaaattttcatgacttgtatttgatgatccaaactgactgagatcaaaaagtgttgtgtccttttgattaatttgacgtttcgaatcttcagaagaaactgcattctttgcgtgtagaagactgatatcatcaaaatcagtacattttggcagaactgcaaatctctcctgcagagattctgtctggactctactttgaggaagggcagaatcgcagcagaattctttcaatttttccagagactttgaaacattcctggtcctcagacatttctttggctcagagttgccagacattcccagatcacttcctccttccttttgttggactttctttactttctttttaacaggcccatcattttccgatggccctgcccagtcccagacagaacctactacgtgcggcggcagctggggcgggaaggcgggcgctgggggcgctgcggccgctgcagcgccagggtccacctggtcggctgcacctgtggaggaggaggtggatttcaggcttcccgtagactggaagaatcggctcaaaaccgcttgcctcgcaggggctgagctggaggcagcgaggccgcccgacgcaggcttccggcgagacatggcagggcaaggatggcagcccggcggcagggcccggcgaggagcgcgaacccgcggccgcagttcccaggcgtctgcgggcgcgagcacgccgcgaccctgcgtgcgccggggcgggggggcggggcctcgcctgcacaaatagggacgagggggcggggcggccacaatttcgcgccaaacttgaccgcgcgttctgctgtaacgagcgggctcggaggtcctcccgctgctgtcatggttggttcgctaaactgcatcgtcgctgtgtcccagaacatgggcatcggcaagaacggggacctgccctggccaccgctcaggaatgaattcagatatttccagagaatgaccacaacctcttcagtagaaggtaaacagaatctggtgattatgggtaagaagacctggttctccattcctgagaagaatcgacctttaaagggtagaattaatttagttctcagcagagaactcaaggaacctccacaaggagctcattttctttccagaagtctagatgatgccttaaaacttactgaacaaccagaattagcaaataaagtagacatggtctggatagttggtggcagttctgtttataaggaagccatgaatcacccaggccatcttaaactatttgtgacaaggatcatgcaagactttgaaagtgacacgttttttccagaaattgatttggagaaatataaacttctgccagaatacccaggtgttctctctgatgtccaggaggagaaaggcattaagtacaaatttgaagtatatgagaagaatgattaatatgaaggtgttttctagtttaagttgttccccctccctctgaaaaaagtatgtatttttacattagaaaaggttttttgttgactttagatctataattatttctaagcaactagtttttattccccactactcttgtctctatcagataccatttatgagacattcttgctataactaagtgcttctccaagaccccaactgagtccccagcacctgctacagtgagctgccattccacacccatcacatgtggcactcttgccagtccttgacattgtcgggcttttcacatgttggtaatatttattaaagatgaagatccacatacccttcaactgagcagtttcactagtggaaataccaaaagcttcctacgtgtatatccagaggtttgtagataaatgttgccaccttgtttgtaacagtgaaaaattgaaaacaacctggaagtccagtgatgggaaaatgagtatgtttctgtcttagattggggaacccaaagcagattgcaagactgaaatttcagtgaaagcagtgtatttgctaggtcataccagaaatcatcaattgaggtacggagaaactgaactgagaaggtaagaaaagcaatttaaagtcagcgagcaggttctcattgataacaagctccatactgctgagatacagggaaatggaggggggaaagctggagtattgatcccgcccccctccttggttgtcagctccctgtcctgtgtgtgggcggaacatagtccagctgctctatagcaagtctcaggtgtttgcagtaagaagctgctggcatgcacgggaacagtgaatgccaaacacttaaagcaattcgatgtttaagtatgtaagttcttttttttttagacagcgtttcgctcttgttgcccaggctggcatgcaatggtgtgacctcggcttactgcaacctccgccttcccagattcaagcgattctcctgcctcaggctcccaagtagctaggaccaggtgcgcgccaccacgcccggctaatttttgtattttgtatttttagtagagatggggtttcaccatgttggtcaggctagtctcgaactcgtgaccgcaagcgattcacccacctcagcctcccaaagtgctgggattaccggcttgagccaccacacccggcacatcttcattctttttatgtagtaaaaagtataaggccacacatggtttatttgaagtattttataatttaaaaaaatacagaagcaggaaaaccaattataagttcaagtgagggatgatggttgcttgaaccaaagggttgcatgtagtaagaaattgtgatttaagatatattttaaagttataagtagcaggatattctgatggagtttgactttggttttgggcccagggagtttcagatgcctttgagaaatgaatgaagtagagagaaaataaaagaaaaaccagccaggcacagtggctcacgcctgtaatcccagcgctttgggaggctaaggcaggcagatcacttgagaccagcttgggcaacatggcaaagccccatctctacaaaaaacacaaaaattagctgggcattgtggcgcacacctgtattcccatctagtcaggaagctgagatggaagaattaattgagcccacgagttcaaggctgcagtgagtcgtgattgtgccactgcactccagccggggtgacagaagagaccttgtctcgaaaaggaatctgaaaacaatggaaccatgccttcataattctagaaagttattttcaactgataaatctatattcacccaaataatcaagggtgaaggtaaaataatacatttttagacaagcaaagactcaggggttacctccatgtgccctttttagggaagctgttggagaaaatactccagcaaaatgaaggagtacacaaaccagagaatgacatgaatccagcaaataggatccaacacaggcaatattccagctatggagctagctttaaaaaggaacagtaaaaatattaatcggttagctgggtggaatggcccatgcctgtagtcccagctactcaggaggctcagcagcaggacgacttgagcccaagagttccagaccagcctggccaccttagtgagatcccttctcttaaaaataataacttattgccagatttggggcatttggaaagaagttcattgaagataaagcaaaagtaaaaaaaaaaaaaaaaaaaacaaggggaaagggttggttaggcaatcattctagggcagaaagaagtacaggataggaagagcataatacactgtttttctcaacaaggagcagtatgtacacagtcataatgatgtgactgcttagcccctaaatatggtaactactctgggacaatatgggaggaaaagtgaagattgtgatggtgtaagagctaaatcctcatctgtcatatccagaaatcactatataatatataataatgaaatgactaagttatgtgaggaaaaaaacagaagacattgctaaaagagttaaaagtcattgctctggagaattaggagggatggggcaggggactgttaggatgcattataaactgaaaagcctttttaaaattttatgtattaatatatgcattcacttgaaaaactaaaaaaaaacaataatttggaaaaacccatgaaggtaactaacggaaggaaaaactaagagaatgaaaagtatttgcctctggaaagaacaactggcaggactgttgttttcattgtaagacttttggagccatttaattgtacttaaccattttcatctatttctttaataagaacaattccatcttaataaagagttacacttgttaataaaaaaaaaaaaaaaaaaacaaaaaaaaaacttgtggtggggcgcgcccgggccccggaaaaggtttcccaaaaccccattcctgtggggcgcgggggccccaggtagggtcacgcggcacatggggccaaaggcgggctcccaaggagaaccgggccagggaacacgggggggntctcctccccccaattaaaaagcgccggggggcaccggcggcgtccggaccaacacanatggggccggacgcatcacgggtcccaacaccgggcccaggggccgatctccgcagcgggggggcgac

SEQ ID NO: 4932 - DNA, 458 bp, Homo sapiens
ttgagatggagtcttgctctgttggccaggctggagtgcaatggtgcaatctcagctcaccgcaacctccacatcccgggtccaagcgattctcccgcctcagcctcctgagtagctgggactacaggcgcacgccaccacggccagctaattttgtgtgtgtgtatttttagtagagccggagtttcaccatgttggccaggcgggtctcaaactcctggcatccggccctctgggcttctgagaaagttcttccaaacattccctgctgtggacagtgaacagcccaccataatgcagagccagaattaggataatgctaacaatatggatggcagagcccagaaacagagagaaacagtccctaaccgtcttgagaagcggaacccaaccctcactgaggcaacacagacgttattcttttccattttttccattatgaaacaagccgacttgag

SEQ ID NO: 4933 - DNA, 1717 bp, Homo sapiens
gaggttggtgcaaactgggaccctctgggcacctctcagggacacagactgtccagctggttacggaagcacatctcccacctgatttattcctaaataggagcgaggagggggacaatctttcccttcacccccacatcttcctttcctcttccctacctccctgtattaatactgagaaaccacacctgaacaatgaaatgactaggaactacggtttctggttgtgttcccaagtgggaatatgggctgttcacgacctcggaatgtagaatgccctcattatttattcagtagacatccaataaatgcggatcaacagcttgcctatctttgatagtttttggcagtgtgtgctggttttaatctttgtacttgtcccataagtgaccccatgactagagagtgggctcttccatcttgtaagagccttctgttcacgttctgttctttttatgagaaggaagttccagtgcatatcccaacataaagagaaacgttgaatacgtactgtttttctcttatatatatgctcaaaataacgactgtagtaaacagtcgtcatgattataggatgaattacgcagccattcatagatttttgtagttgtcatttacaagtggactatgcaatagttcataggcttatgaatacataatctaacaatattagctgggtgcagtggctcacacctgaaatcccagcacttagcgaggccaaggtagcttgattgctagagcccaggagttcaagactagcccgggcaaagggcaaaaccccatctctacaaaaactacaaaaagaaattagccgggcatggtggtgcttcccggtagtcccagctacttgggaggcaaaggtgggaaggtcacctgagcctgggggtgtcaaggctgcagtgagctgtgattgcaccactgcacccgagcctgggcgacagagtgagaccctgtctcaaaaacaaacaaacaatattatacttgtagtatttaaaaaacataattatctggtattcccatagctaatggaatgaaaggggagactttatctccctagacaggaagcacggtacctcctacactctcttctccccacatcaactggataggtgtgtgaacgcatttcaaagtcaagtatggttagtaattacttgatctttttccagccccttcagataagctgaattgaacacccaaaagtgatagtaacatcattttcctttgcaattacaaagaccattaacccaacagaatctccatgctttacctgtttgtgatgtttttgttccattttattaagtctgactcctgataaatgaatcactacacaattaattttttctcattctttagattcatacacacagacacatatatcaagcaaactataaattgctaaaatgacaggccagcagtgactacttgttatcacgtgtgtaacatctcttgagggctgctttgtaattcatttgtatggtgttgttgtaccagtgtaactgctaagtggtttctctggttccatgttcatttgtacatgaagttgtgcaatctccacataccagcagtttcaaagaatgacagtttgcatgaggccatcttaatagcaggtagcatgtaaccaacccatctgaattaagccaccattgcagaataaaacatttgacactaagccaggtatttcagtggatgagttgtattttggatttccaaaaaaaaa

SEQ ID NO: 4934 - DNA, 1515 bp, Homo sapiens
  misc_feature (17)..(18): n is a, c, g, or t
gcgagaagagttgccgnncccttcaggctcaacgagaactcaaagtgaacgagaaacacaggaagtcctggagaacctgaaggaccgctggtaccaggcggacagcccccctgcagacctgctgctgacggaggaggagttcctgtcgttcctccaccccgagcacagccggggaatgctcaggttcatggtgaaggagatcgtccgggacctggaccaggacggtgacaagcagctctctgtgcccgagttcatctccctgcccgtgggcaccgtggagaaccagcagggccaggacattgacgacaactgggtgaaagacagaaaaaaggagtttgaggagctcattgactccaaccacgacggcatcgtgaccgccgaggagctggagagctacatggaccccatgaacgagtacaacgcgctgaacgaggccaagcagatgatcgccgtcgccgacgagaaccagaaccaccacctggagcccgaggaggtgctcaagtacagcgagttcttcacgggcagcaagctggtggactacgcgcgcagcgtgcacgaggagttttgagcgcccggccgcgccccgcgccgccccccacgcaccaccgggggcggcctcgcgggtgactccgggctccgtggctgtcccggaccccacctcttccctgccgcccgccaccggccgaccgaccgcggctgccccagttgatgagcggcgtgtcccctctgcagcgcgcaccccggcggggctttggctgtgacgcggtcggggcgcggggctgggctgtggccccgcggcgccgcctcctccctggtccctcgaaatcgtggcatctcacttctgagaacgaaatctcgcttcagtcactctgccgaaggcgctgacggcatcgcggccggaacctctgggcccggcccctcccagggccgccgctccgtgggaaaaaacagctcctccatttccttgaaaactgaacgattattaaaaatagattaaacttcgctggaaatgagtagccaggaagttcaggggagggtgccgggtccttcccgggcctggcgtgtcggagccacccaggtcccgcagctgccgctgagaaaatgcaaatatttgttgtgacaagaatcacatacatttactttaaatatagttgccttttttggtcagataaaaaaaaaaaaaaaaaaaagaacagaacaaatagacaagaaaaaaaaaggacgggggcgcgcgcgccgcacaaaaaactatccccacagaagggggcgcacaagataagcggcatcaccacggtatgcatggcaccaaagggcgccccccatataatgagaagagcgagaaataaatagacacgcccataggaaccgagaggcagaccgagaagataaacaacaggagccgaggacaagggagaaaacaaagtgcaacaactgaggcagagacacgttgcaagagagagccaactaaatgctagggaagggcgaaacaaaccagggcgcacacagcacacatag

SEQ ID NO: 4935 - DNA, 4618 bp, Homo sapiens
  misc_feature (288)..(389): n is a, c, g, or t
  misc_feature (751)..(766): n is a, c, g, or t
  misc_feature (1695)..(1737): n is a, c, g, or t
gaatttgggttcccggataaacggtctccttttctcagatttgaaattggtaagatgtttacttggctgttccgttctgagggaccatagtgggatctgtctccaaggagccaaagtaacaggaaggaccctccacaagggaggttcaccgatctgagtcacggcaccaaatttcatgcatgtcaatcaaaggggattgttttctggtgggcaggatggggatcacaaggtactcagtgggggagcttctgagccaggatgagccaggagaaggaatttcacaagacnnnnnnnnnnnnnnnnnnnnnnnnnnnnnnnnnnnnnnnnnnnnnnnnnnnnnnnnnnnnnnnnnnnnnnnnnnnnnnnnnnnnnnnnnnnnnnnnnnnnnncacaggggatatgatggcttagcttgggctcagaggcctcagcctccgagtagctgggactacaggcatgtgccaccacacccagctaatttttgtatttttagtagagacagggttccactatgttggccaggctggtctcgaactcctgactttgtgatccgcactcctcggcctcccaaagtgctgggattacaggaatgagccaccacacccagcacagaagacttcaattttaagtagaaggtgtttcttagatttgccacagatgaggttgctaatcaatgagatgctgagagttctgaggccagaggtaaggaaggattgtgcatttccttgagacttggagaggccttgtcctnnnnnnnnnnnnnnnnggctgctagtacccatcaggcagtgtaaagcgcctcgtccccggccggcctcaagcggcgctagctctctggctggcgctggagtgtgccgcccctggcagccccgccgctgcagcggggagcctgggagagcggctctcggagtctcaggcagcaggaggagcgtgtgagctgtgggcgtccctttaagagcggctggccaggcacggcctccgcctctcagtacgcggagcgccggcggtcacctggggctcgcggagcggccagatcgcggcggagtcggcgcgcttccccgagggaaggtgggagaggggacccggacgcgaggtgccccgaagccctctcgagcgtaaccgtcccgcgcctctctgaggcggaggatgcgggagcgcatctgggcgccgccgctgctgctgctgctgccgctgctactgccgccgccactgtggggcggccccccggacagcccacgccgggagctggagctggagcccgggcctctgcagcccttcgacctgctctacgccagcggcgcggccgcctactacagcggagactacgagcgagcggtgcgcgacttggaagcggcgctgcgcagccaccggcgcctgcgggaaatccgcacgcgctgtgcccgccactgcgcggcgcgccacccgctcccgcccccgccccccggcgagggccccggcgctgagctgccccttttccgctccttgttggggcgggcgcgctgttatcgcagctgtgagacccagcgcctcgggggccccgcatcccgccaccgcgtcagcgaggatgtgcgcagcgacttccagcgcagagtgccctacaactacctgcagcgggcctacatcaagcttaaccagctcgaaaaagcagtggaagcagctcacacatttttcgtggctaaccctgagcacatggannnnnnnnnnnnnnnnnnnnnnnnnnnnnnnnnnnnnnnnnnnttgaagcattgcagttggtagacagagaagccaagccacacatggagagttacaatgcaggagttaaacattatgaggctgatgactttgagatggctatcaggcatttcgaacaagccttaagagaatatttcgttgaagatacagaatgccggaccctatgtgaggggcctcagagatttgaagaatatgagtatttagggtataaggctggtctgtatgaagctattgcagatcactacatgcaggtgcttgtttgtcagcatgaatgtgtgagggaacttgccacccgccctggccgcctctctcccatcgagaattttcttcctctgcactatgattacctacagtttgcctactatcgagttggtgagtatgtgaaagccctggagtgtgccaaagcctatcttctatgccatccagatgatgaggatgtcctagacaatgtggattactatgagagtctgctggatgatagcattgacccggcatccattgaggccagagaggatttaacaatgtttgtgaaacgtcataagctggagtctgagctgataaaatcagctgcagaaggtctggggttttcatacactgaaccgaattattggatcagatatggaggacgacaggatgagaatcgggtcccttcaggagtgaacgtagagggagcagaagttcatggattctcaatgggaaaaaagctatcacccaagatagatcgagacctaagagaaggtggtcctctactctatgagaacatcacattcgtctacaactcggagcagctgaacgggactcagcgggttctcctggataacgtcctgtcggaagaacagtgccgggagctccacagcgtggccagtggaatcatgcttgttgatgggatacacgaggaaaaaactttccccccatacacccaatgaaaagtttgaaggtgcaactgtcctgaaagcactcaaatctggttatgaaggtcgagtcccactgaagagcgctcgtctgttttatgacatcagcgaaaaggctcgaaggattgtagaatcttattttatgctgaactcaactctgtatttttcctatacacacatggtctgccgaacagccctgtctggtcagcaggatagaagaaatgacctcagtcatcccatccatgctgacaactgtttgttggatccagaggccaacgaatgctggaaggagcctcctgcttacacatttcgagactatagtgctctcctatatatgaatgatgactttgaaggaggagaattcatattcacagagatggatgctaagactgtgactgcctctataaaaccaaaatgtgggcgcatgatcagcttctcatctggaggagagaaccctcatggggtgaaggcagtcaccaagggaaagaggtgtgctgtggctctgtggttcaccttggacccactttatagagaattggagcgaatacaggctgatgaagtgattgcaattctggatcaagaacagcaagggaagcatgaactgaatatcaaccctaaagatgagctataaaaatgagaaagaatgttctatcaaatatttatttaaattgttaatcttatgagaacctttttatttttgtacagagccatggtataaattaacaggttaatgtcagtcatcagatcttccttctcttcctaaggatgcttgtgttgcctcaatctatcaatctatctttcttgttttgggttgttttctctctctctctctctctctctcttcttagagacatggtctaaccatgttgtctaggatatagggcagtggctattcacagatgtgatgatagcacactggagcctcaaactcttaggctcaggcgatccttcaagcctcccggggagctgggaccacaggcacgtgccaccacacccagctctctttcttggtttttcatcatttcatgtatctatcaaagcccagttcacctcctcccccaaacacacacacacacacacacacacacacacacaattaagttgctgcaaattcaaaagcttagagagaataagcttcttggtggtgaaactacaactctcacgtgtgctccagttctaaaattaacctgtgcctggtctctgaagccctttcttgctctgtgcctttcagccacatccttaggtgctaacggccatgagctccgactctccaaagtgagctccactttgggtctgaggagcccctggcagagtccacgctgcctcaggtatcatgggcgtaatgatcacccaggctccgggagatctcatggatgattactgtatgagacagaggggacttcagtctttccagggccttggtggaatttttggctctggtgttttcgccagacaataaacttacactggaagctttgattcaccctccacagtactccagaaaggactgtcctataagttgtacactttaaaaggtcatgtagaggttgtagtagaatggcttttcaccctggtgactttggaagaaactcttgaatactgcctgcatccgggcaccatggccaggttgcctaggagtggggtccactgatgaaaagaggtgttttgtacttacataagaaaaataaatttctgattgattttaaaaaaaaaaaaaaaaaattttgggggcccctcctcattgctgctatccagcacacagattggtgcttgtgtctgattcgtttaataaaggggggttcttccacaaccaaacaaacacataaccacacatcaaaaaaacaaccgcctttttgggcggaaacacatataaagggccggtcagtccagaccttataaggggaagcgcgccaggggattgaacgctatagacaaccacgcagtcaagacgcaccaggaggcacacctctcca

SEQ ID NO: 4936 - DNA, 1594 bp, Homo sapiens
ggcctgcgcctccacgtggatttggtagagaaaccccggactgggatcatggcagccgagactcggaacgtggccggagcagaggccccaccgccccagaagcgctactaccggcaacgtgctcactccaaccccatggcggaccacacgctgcgctaagcacaaacacaaagtaggatcccagtgcattaggcagccagtctcgggagaaggggaacttgtgccccagaaagggcagttacccggccagggtcacatcaaccgccagaagtggagttgggcagccctgtgaagccagaggagatggactggtctgagctatacccagagttcttcgctccactcactcaaaatcagagccacgatgacccaaaggataagaaagaaaagagagctcaggcccaagtggagtttgcagacataggctgtggctatggtggcctgttagtggaactgtcaccgctgttcccagacacacttattctgggtctggagatccgggtgaaggtctcagactatgtacaagaccggattcgggccctacgcgcagctcctgcaggtggcttccagaacatcgcctgtctccgtagcaatgccatgaagcaccttcctaacttcttctacaagggccagctgacaaagatgttcttcctcttccccgacccacatttcaagcggacaaagcacaagtggcgaatcatcagtcccaccctgctagcagaatatgcctacgtgctaagagttggggggctggtgtataccataaccgatgtgctggagctacacgactggatgtgcactcatttcgaagagcacccactgtttgagcgtgtgcctctggaggacctgagtgaagaccccgttgtgggacatctaggcacctcaactgaggaggggaagaaagttctacgtaatggagggaagaatttcccagccatcttccgaagaatacaagatcccgtcctccaggcagtgacctcccaaaccagcctgcctggtcactgactgcttactctaccttagctggacctcgtctcccagggattagagaaaagagcaggagtcctgggtcttcccagttgagactgctggagctgagacacagtactctcttaaagaaggtggggagctgcccagggcagaacccactggtgttcatgactacccctggctcctctcaccttgtccctccactgccaacagaaaacaaagcagctgactgagatggtcaaaggactttggaccataggggatctttggaaggctgtggggtcttgctcttccttagcactcctttctccttgtgagatctctcctcagctggaatgaggaatgtagtccatctaaactgcttgctaggctcaattaccacttctgtttgctttgtggatcctgggataacatgtatatgtgtacacatgcctattctgccatttctcaggaaagggtggagtatgtatcatatgccttctaccatcctcctgtcctctccctgcgtaagacttgacctggggaatctgtgttccctaaaaaaaaaaaaaaaaaaaaaaaaaaaaaaaaaaaaaaaaaaaaaaaaaaaaaaaaaaaaaaaaaa

SEQ ID NO: 4937 - DNA, 3319 bp, Homo sapiens
  misc_feature (2294)..(2301): n is a, c, g, or t
  misc_feature (3117)..(3118): n is a, c, g, or t
  misc_feature (3306)..(3306): n is a, c, g, or t
gctcccggcttgggggctgctggctgcccttccctaattgggattctcggcctctcggaggccccggctgcggactggggcttccagcgggaggctgggccgcagggctcgggagccttcccggggtgggaaggcgcgttggaccgagggcggggctacgcgcccggggcccgggctggaccagctgcgcttacctccccggcaggctcagtgagaaccgtgcgcccggcggccccactctcctcccaggccgctgccacgccctccaggaaagctcttgtaaagggattagcacttttttcctttgctcctcttgccccgagggtctctgcttacccctaaaccaagtccgtgggagcccggggcacaggcggtcccggcagtcagccttcgattcccgccccatccccatccccctttgtccgcggtggatgcggcgtccgttctcaacccgcagggcctggggccgggcctcggcctcttttccccgtggcagccgcaggccctgtgtggcagggatggggccccgcgatctcccaggcaggtccgagagggatgtgtagattcattctcctgtggagaacaggtggccccgagatcaggcccttttttgctctttgtattttattttgaaactgtatttaatgcttttatatgaaagggggaggggcggggacagagctgacccagtcacccttatgtgcaaatgtcttatttattgtgcgtgtatcagagataagctgtgaggtggtggagggaggacctgaaggaaggaggagcgagggcagaggcggggacgggaggaccccaactagctgtgctgatgttaatcccgctgggagactccgggccctactgtctgctcttcacaaagccaggctgctgcaggaacagttcccgcggtcctaaagccggggcggggaggctagtgggtggaacttgagggttgggtctggaggaagagatgcctgggcagcgtggtccagcccctgcctcggggtggaaaggcagagagcaaagaggaggcccctcttattccggacccccaggccagagcccaggagtgggaaagcagagggcaaagaggaggcccctcctctcatccctgacccccaggccagagcctaaggttcaagtgcctcaggcccagtccccttgacgcttcctgtttgggagttggattttataccacggattttatagcatttttatataattgaggattgtcagaattggaaagggccctggagatcactagtactaccctcctcaccttcacagataggtaaattggagcccaggaaccgagatgatcacacagccaggtagggacagtacaagaactagaatgaaaatcctagctcctgactcagtgttctttgcacgatgccacactgcttcccaattcgctggtcagttattaaaatttgtcaggcctgccgaaggattgacatgctgggcaatgcaggccaccacggtggatctgtgactcctgaaggtggcaaagccctgcacactgccttgggatgagcacactgagctctgcagggcctcagctggaaggcgccatccaatcgtccttcccctccccagcagaactccagaggtggggcggctgccgcagggcccaaggctgcctcggcagggggctttgtgctttttgttgtggaggccaccagggattcaggaagatcctgaatgggttgtcaattgactgaaaagtaaattcccagtgagtttgaaccctccacgggtttttgagacagtattaaaagcttgagaacggagattatggatggcaccaggctgggcactgccattcttttactttccttcatgcattttttcggatccagagtattaacaccactttttttactctgcccattcaaaaacagtaggcaaattgggggaaccaatttataatcactcaagcccactgccaaagttcggataagccagggcagaggggttagattcccccccctccgtaggcagagagaggcctcaggagagtggacatctttactgagacagccccaaacacaccagtggctctcaaagtgtgtccctgagaccagcagcatcaccttaggaatctgctagaaataaaaattcttgggccataccccagggttactgaatcagaaacttggttggggcctagcagtgttttcatgagccctccattgatcttgatgcagctgaagtgccgggcaccagtgaaagggaagggctgcggtagtgatttttaacaccactttctttgatggaagttatggcctcacaggttnnnnnnnngcaagttgagttggcccttcttgcctaggtgtgcctccttgccttgggattctgacatgaacaggtgaagtctcttcatgattttttttgttgttgttgttaatggtatgcttgctattatggccaatatgtaaatgttactctgaatacatatttatataccatgttacttagtgacattattcaaacatttgtatgcgtatttgtgaaattgtttgcatcagtcatttaaaaaatatttcagcctaagttttctaagaggtatgttgaatacatttttaaaagccagcttaagggtcacagcagccttagtttaggagaagagctaatcacaggtgaccactcaagttctttcaatgaagacctgatgatgtatttagttcccattttccacggtgattgactcaatttaagtgtattgtggctatatgtaatttacaggctgctttgcgttgcaggtgggaaaatctcccaggctggtgtgaggctgaactggggtaaaagaccccctgacccctcctcattcttctaaggtcaccacctcttagagggtctcttattttctttcagagatcaaatgcacagttatgctgtacaactaaattctgcagtcttgggaatccttacgagtaccaactattagtcactttttaaagtccccaaagtggagtgaggatagggggagtggaagcagtgtttggttcttactttacccaaactgtgtataaagaataaagttagcagaatgatgccaaaaaaaaaaaaaaaaaaaaaaaaaaaaaaaaaaacacccactcaacttaatttacaacctannataaagggccggcccggcctctaaaaattattcccctcccagggggcccccaaggtttacccgtgtaccccagtgttttcctttggaaacaaaaggggggccccccctataagggggagaggccgtatttttataaagcttataggcccacttgtggcccgcgctcccttttttttaaacaccccgcncccgggagaatgt

SEQ ID NO: 4938 - DNA, 1184 bp, Homo sapiens
  misc_feature (16)..(16): n is a, c, g, or t
  misc_feature (47)..(47): n is a, c, g, or t
  misc_feature (62)..(62): n is a, c, g, or t
  misc_feature (95)..(95): n is a, c, g, or t
  misc_feature (111)..(111): n is a, c, g, or t
tcctccggcatccccnaaagtttggaatgccccccagaatcccttcngtctgaagaactggnttaaacatttttttaaagcggatccttggttangaattcccctcagctngccttccattggagaatgtctttattttatttccattcttttattcccagtaaaatagaaatttttactggatatagaattcttgggtgacagttatttcaaaactaaaaatgttccacttctttctggcctctatagtttctggtgaagatccagtctttcaaagaattgttcacctgaatgaaatgtatcgtttttctctggctgatcttatttttcttggtctttagttttcagaagtttctttatgatgtgtctaagcttggacttttgttgttaatttatccagttgtgtggttcactgagcttcttggtttgtaagtttatatctttttccaaactatcatctaatttatggactccatgctttgtcatttccattctgtttaagaatattcaccaatactttctgaaggctggttataaatagctgctttgaagtctgtatctgatcattcccatagttgaatcatctcaggatgggcatgtattgatcatcttcttttctcccatgttaagattttcctggttttcctacactgggttattttggataacctggatattgtaaatattatgttgagactctggaccttgtttaaatcctaagcagaatgttgactgtttaaagtgtttgcactactagtcatattagtcctgtatctacaccggtcagtctgggacctgcaatgtgcatctagggtcagccctgtgcgcatgcttggcagcaagccaatgaccttcacatatcactttatcggatcactcacttcatctctcccttctctgtactctccctgaaacacaacagctccctgcaacatccctaccaagacctccagccactaatctggggctctttccctacctagccctgctgcatactgcctgaaactgcatccagggcccagcgcaggggggcagaaaggagctgcagaatgttgttgccccatgcttttgggccatggctcctctagacagaggtagcgttaccctctcaggtttcacagtgcgtacccagctcacactaccgacacttgcatccagcggggacctctagaacagctatccaa

SEQ ID NO: 4939 - DNA, 5038 bp, Homo sapiens
  misc_feature (2499)..(2592): n is a, c, g, or t
aaaacagcggcagaacaaagttcaaaagaacgagtatcgatcgcctaatgaataccctggtgctctggatttttggattcctggtttgcatgggggtgatcctggccattggcaatgccatctgggagcacgaggtggggatgcgtttccaggtctacctgccgtgggatgaggcagtggacagtgccttcttctctggcttcctctccttctggtcctacatcatcatcctcaacaccgttgtgcccatttcactctatgtcagtgtggaggtcatccgtctgggccacagctacttcatcaactgggataagaagatgttctgcatgaagaagcggacgcctgcagaagcccgcaccaccaccctaaacgaggagctgggccaggtggagtacatcttctccgacaagacgggcaccctcacccagaacatcatggttttcaacaagtgctccatcaatggccacagctatggtgatgtgtttgacgtcctgggacacaaagctgaattgggagagaggcctgaacctgttgacttctccttcaatcctctggctgacaagaagttcttattttgggaccccagcctgctggaggctgtcaagatcggggacccccacacgcatgagttcttccgcctcctttccctgtgtcatactgtcatgtcagaagaaaagaacgaaggagagctgtactacaaagctcagtccccagatgagggggccctggtcaccgcagccaggaactttggttttgttttccgctctcgcacccccaaaacaatcaccgtccatgagatgggcacagccatcacctaccagctgctggccatcctggacttcaacaacatccgcaagcggatgtcggtcatagtgcggaatccagaggggaagatccgactctactgcaaaggggctgacactatcctactggacagactgcaccactccactcaagagctgctcaacaccaccatggaccaccttaatgagtacgcaggggaagggctgaggaccctggtgctggcctacaaggatctggatgaagagtactacgaggagtgggctgagcgacgcctccaggccagcctggcccaggacagccgggaggacaggctggctagcatctatgaggaggttgagaacaacatgatgctgctgggtgcaacggccattgaggacaaacttcagcaaggggttccagagaccattgccctcctgacactggccaacatcaagatttgggtgctaaccggagacaagcaagagacggctgtgaacatcggctattcctgcaagatgctgacggatgacatgactgaggttttcatagtcactggccatactgtcctggaggtgcgggaggagctcaggaaagcccgggagaagatgatggactcatcccgctctgtaggcaacggcttcacctatcaggacaagctttcttcttccaagctaacttctgtcctggaggccgttgctggggagtacgccctggtcataaatggtcacagcctggcccacgcactggaggcagacatggagctggagtttctggagacagcgtgtgcctgcaaagctgtcatctgctgccgggtgacccccttgcagaaggcacaggtggtagaactggtcaagaagtacaagaaggctgtgacgcttgccattggagacggagccaatgatgtcagcatgatcaaaacggctcacattggtgtggggatcagtgggcaggaagggatccaggctgtcttggcctccgattactccttctcccagttcaagttcctgcagcgcctcctgctggtgcatgggcgctggtcctacctgcgaatgtgcaagtttctttgctatttcttctacaaaaactttgctttcaccatggtccacttctggtttggcttcttctgtggcttctcagcccagaccgtctatgaccagtatttcatcaccctgtataacatcgtgtacacctccctgccagtcctggctatgggggtctttgatcaggatgtccccgagcagcggagcatggagtaccctaagctgtatgagccgggccagctgaaccttctcttcaacaagcgggagttcttcatctgcatcgcccagggcatctacacctccgtgctcatgttcttcattccctatggggtgtttgctgatgccacccgggatgatggcactcagctggctgactaccagtcctttgcagtcactgtggccacatccttggtcattgtggttagcgtgcagattgggctcgacacaggctactggacggccatcaaccacttcttcatctggggaagccttgctgtttactttgccatcctctttgccatgcacagcaatgggctcttcgacatgtttcccaaccagttccggtttgtggggaatgcccagaacaccttggcccagcccacggtgtggctgaccattgtgctcaccacagtcgtctgcatcatgcccgtggttgccttccgattcctcaggctcnnnnnnnnnnnnnnnnnnnnnnnnnnnnnnnnnnnnnnnnnnnnnnnnnnnnnnnnnnnnnnnnnnnnnnnnnnnnnnnnnnnnnnnnnnnnnnggccgcactggctcccggcgctccggctatgccttctcccatcaggagggcttcggggagctcatcatgtctggcaagaacatgcggctgagctctctcgcgctctccagcttcaccacccgctccagctccagctggattgagagcctgcgcaggaagaagagtgacagtgccagtagccccagtggcggtgccgacaagcccctcaagggctgaaggccgaggatggatgccctgtgccagtgaccagagcacccagggctggccagtcactgagggaacagcgtctcggaactgctggtcctcattccttgcttcccgtccccccggtagactctgtcctgctggtcccaccacacatggctgggacatctgttcccagctgtaggcccttccaccagctggggagctagagggagcaggcccaagggcagagcagaggctgaggcacggggagccagccccactcggggaccagaagtggaaccaaaaacaagaaaaaactgtgagagattgtgtctgcccctgccctgcctgggacccacagggagactataatctccttatttttttactcctactccccagaggggccctagtgcctctgttcctgaattacataagaatgtaccatgccgggaagccagagacctgcaggggcctcggcccctcacatcgtgtatgtctctccttgatttgtgttgtgtccagtttggttttgtctttttttatttggcaagtggaggaggcttttatgtgacttttatgttgtggttggtgtcttaactctcctgggaaaaggaggctggcacacactgggatgccgcagcctggccggctgtggggtggtttgggaggatccatgtcggctctgcctgcagtgaccagtgctctgtggggcagaggagctgaccagggagggaggtacccatgagcagagggtagtgggagagtgtaaaggagggtttggtcctgtctgcttcctcaccttgagagtaaagtgctgccctctgcccccaacacacacacatatcaattcctggattccttagtcctgctggccttgggctggagcctaggaaagtggcccccaaatccttagtgagctaaagctgggtctgaaatttggtcagtggggaggggtagttttcttttcttttttctttttctttttttctttttttttttgagatggagtctcactcttgtcacctaggcaagagtgcaatggcacaatctcagctcactgcaacctccacctcctgggttcaagcgattctcctgcctcagcctcctgagtagctgggattacaggcacacaccaccacgcttggttaatttttgtatttttagtagagatgtttcaccatgttggccaggctagtcttgaattcctgacctcctgacctgcccacctcaacctcccaaagtgctgagattacaggcgtgagccaccacacccagctcagggaggcgtagttttctttaattttaaatttaaacccaagtttattggcagactcccttttgacctccctttgcctccccatctggtgctttcttgcatctacaccccagggccctgtggtggggctgcagggggaagctgtgcacctgagatgaggctggaacgggaattggcctctctgctcccttcttcagtaagcaaggagccccgcccctcaggcccagcctctggcaagaggtggtggaatccttgtgccgggtagtagaggaggataagggcaaaaccaggcccaggccagtgcctggcttggtctggatgggacactgtcagagtttggccacagcctgtcctttacttcatccacacctatgaagctattccctaaataaggcatttcccaagttagtcgctacctaatcagccttgagaagaatcctttcctcttctttgatagtgggtcgggggattcttcaggaatggtttggagctgggagtgggtagggggattttaaatgttccatatgggagccccaaaggaactggatgggctgcagtgaggtgggggcgggtgggcagggaatgggagaggggaagtcttggcagggaaatcccttttggccacacagtttacaaacccagtatcatgtctgtctgtgtgtctctcaaggtgagagtctgatttttataccaaagaggaaatgatttttttcatattttgtttgtctatattatataaatatatatatacagttatatatatatatattattttttggttctctctcgttttttagggagggaagaaagtaccaagttgcattgagctgtaattaaggaacattataatttatgacacatttctatacttgcaaaaattatatcattttatggatataagagaaaaatgcctttttataaaatttcaatttctgagaaaaatgtaatttgtctcttttctgatgtttaccagactcaggt

SEQ ID NO: 4940 - DNA, 4649 bp, Homo sapiens
  misc_feature (1813)..(1830): n is a, c, g, or t
ccgcggcggagccagaggctgcaggaagagcccgcgggggcccggagggtgcgattcctcggcccccgcaaaacaatgtgtgttgtgagccaggacgcaacttgccggaggcggcgggggcgcgccgagcccgcctgagaccgcgctgaccttctccccccgccgtccgttgggcccgagcgcccagctcctcgctccccagttcgcgggggccgggccgagccgcggggcggggccgcccctccgtcgccgctgcctcctcccccacccccagccgcggaggatgcggacggcccccggcggcgtctagcggccccgggcccaggcgcgatggtgcagcagcggggcgcgagggccaagcgggacggcgggccgccgcccccgggacccgggccggccgaggagggggcgcgcgagcccggctggtgcaagaccccgagcggccacatcaagaggccgatgaacgcattcatggtgtggtcgcagcacgaacggcggaagatcatggaccagtggcccgacatgcacaacgccgagatctccaagcgcctgggccgccgctggcagctgctgcaggactcggagaagatcccgttcgtgcgggaggcggagcggctgcggctcaagcacatggcggattacccggactacaagtaccggccgcgcaaaaagagcaagggggcgcccgccaaggcgcggccccgcccccccggtggtagcggtggcggcagccggctcaagcccgggccgcagctgcctggccgcgggggccgccgagcagcgggagggcctttggggggcggggcggcggcgcccgaggacgacgatgaagacgacgacgaggagctgctggaagtgcgcctggtcgagaccccggggcgggagctgtggaggatggtcccggcgggacgggccgctcggggacaagcggagccgcgcccaagggccgtcgggcgagggggcggccgccgccgccgccgcctccccgacaccgtcggaggacgaggagccggaggaagaggaggaggaggcggcagcggctgaggaaggtgaagaggagacggtggcgtcgggggaggagtcgctgggctttctgtccaggctgccccctggcccggccggcctggactgcagcgccctggatcgcgacccggacctgcagcctccctcgggcacgtcgcacttcgagttcccggactactgcacccccgaggttaccgagatgatcgcgggggactggcgcccgtctagcatcgcagacctggttttcacctactgagcccaccgtcagcggggcgcgcacgcccccaaaccagctgtttacatacaggaatcaggtattggggcccctcggaggccgaggctggcaccccatctcccgcgcagcctgccccctcctggacgtgcccatcccccctcagatccagacatcccctcccccgcagacacaccccaaggcagtccaacccccaccccttccccgacacccaagcccctccccacgtcgccccctcctgcacagccaccagcagccagccccctccgatacacctcccgtcctctcctacagacctgcacccctccccccttttgcacacgcccctcctcgtggccggaggacccgccccctcctttgctccggaatctctcctccctcgcccggcccgccttctctgggttaggggggcgatgcggccgggtggcaacgcacgcgcctcctgcgcccctcccttccctggggggaggggcgcaccccttttatccccggagcgctagggcccgcccctccgctggggcccacccccttcgtgcnnnnnnnnnnnnnnnnnngggaggagggggctggtcccagcggagccgcactcttcgcccgctccgggcaaaagcgggggcgagtgtagagcgatcctgggaaatcctttgatccgggagccctaggtttcctctccagccagcggggcgtcgctgccttaatgggaggagcactcggaagggttggtttgggcctgaaactctcccaagtggcatagccccttttccggtatggggtctcctacacccacgcgcaccacctctccggtcgcgtggctgcctctacagcctacctatacgtccctttttccccccaactgggaattgagaggtaaggtctttctctggaaatccagcagtagaggaagggaccacccaagaaaactaaaaaccaaggcaccttaccagtctgtctggggacaggatccctgctgcaccttccccaccccctcctgggaagtgccccctcacctcagggcacccgcaacctgggctcctccctgagcgcaccggcccttcctgtcacccaggtccaccctcagtactcaagctgcagtatacagcgggaaaaactgaggcactttggtgctaggggtttgggactgaggcgtggagagcagatgtgatggcaggaagactctcgcttttaaacatctgggtttggggagagaccatcgacttggccagtgagactgagaatggattccgagtagtgatgggccgtttgcacctcggtttttccacgtgagaaatggggagaacgctgctgttaggaggaagttgtgtccagttcagggtgccctcgggagccctgtccctgttgctgtggcccctctcacgccgccatctctctgccccgccccgcccctccggcctccccacaccccccttgccctcactacctgtatctcaccggcgtgtgttcaccctcccgggtggctcacacactctcattcacacacacaaatctcaggaacaaacggtcccagagtcctccggacccctgcccagggtctctgcaggtctctgccccacgcgttcccgtcgctgacaaagccaccagctgcctcctttaagcttggtgctccggctctgggcctttcttgcgctcttattttttttttttttttttttaagaaaaacaacaacaacaaaaaaagacaatgaaaaaaaaaacgtcatgtgagtgaagagatgtcactgtctgtggtcttggagaactagtctcgtagctgaggggtggggtccctctgtctggggcactggcacccacagcaggactccgccagtctgatgccaggactgaataaagtgtatttgccccgaccttgccctgtggttctgcatgtctgtgctcttcctcaaccctccctaaacagtttgccagattcaagtccgtgtgatttgggcccgagctgggtgtcccagggcaagccaccttgcctgtctaggcctctatgtcaggactccctggccttcatgaagaatagcaaactcatccctgtagggaccaggcaggtaacatagacgagtgactctgggtggacagtggtgtcatgacccacttcaaggggcctacctcctgccagttgtgaccctgtgggaatgcagtccacagtggccaggtggccagatttttcaagaaaagctggatggatgtttctgagtcatcttaatttcaaaatgagactcatattttaaaatttctgtgggccaaatgaaacaagtatgcaggcaggtctggtccgagggggctggcttggccatgcctttctgtgcctttaaatgaggactaagaagcaagattgggccacactgtctggactcaaagcccagctccaccactgagcacccgtgtgactctttccatatgtataacgtggggataataataatagctgcttcacaggatgaaatgaagtttgaggtgagaagcattcaccatggtgcccatcgtgttactccattgtcagaggaggaaacggggtcaggcaggaaagcaacttaaaggagggcctgcaagcagccagggtcagagacagggcttggttctgcttcctggtgaagcatggcttcggggtgctgcctctccctccctgtttgaatctgcagattgtgttaggcccccagctgagggcctggagtggtgggattggtcccagtgcctggcgcacattggcctgcagagtagattaactgaatgaccaaagagcaacagaagtctagtgattcttgtctttgaggttctgactggtgttttacaactgagtccaaggcttttccctcctttgtccctctgacacccctccccctaattctcatctgtcagatccagtgtattcctaagctgggacaaagcctctgttttcccagtaggagccagggctgagtgtggaaattacagtgactgcttcttctcagcttctctggttgaaagcaagctggcgaagtaagaggaggtagagttgagaaggtgtggaagatagggacagctgcccccagaactcccttcaagggaggacttccccagctatgggaagtgccatcagggtggccgcagctgcagagagccacttcacctgagaccacgcccttcctggggcagcctgtatctggtgtctgagtgaggcatggtataaacacctggtcatttcaatccaacatgggacggacactgacagacagtactcccagcaggcccaggccagccagggcttcgtcaggcctgcagcacaatttgacttcctatgcccaggcctgcttcctcttcttcctcttcttttcacaggtgcttattcctaataaacatcttgcaacccaaaaaaaaaaaaaaaaaa

SEQ ID NO: 4941 - DNA, 867 bp, Homo sapiens
tgggattacaggcgtgcgacctcacccggcctattgatccatattctgtaatcaaaatatcataagcctccataatgtagtggggcatacaaaaggctttcatccattcaggtgaaaggtgaagtttgggtgtggtggtgcatgcctgtaatcccagctacttgggaggctgaggcaggagaattgtttgaacctgggaggtggaggttgcagtgagcccagatcacaccactgcactccagcctggacgacagagcgaaattctgtgtaaaaaaaaaaaaaaaaaaaaggtgaggtttcagatgtgtatgttaatctactcaatctaattagtttattgaattgctacaatgtattcagtattgtgctttataatatggaggatgatgtctctgtgcttttgctcattcttatccttgacttcaaattatttcctattattctagcctcatctgttaaaatcctaccctcctttccctcaagagccatctaaagatgacacctttgtcacaaagcctttcatgatctcacagccacgaatttagaacttcctcctatagcattttctatcttttttatggcatttattttattctatcttgttatgattacataatctgtttaatccccaattatatattgtaaataccttgaaggaaaggagtctttattatctttggtgcctggtgtttagttttaatattttattaaatacatccaaggaaagtttttggtttctgcctttacttcaagaagaaagttgtagaacagataatagttgttccatttccatgggttactgagtaaagactcaccagttcgccataacagacataagagtgacaaaaaaataaaccttcattgtgt

SEQ ID NO: 4942 - DNA, 2508 bp, Homo sapiens
gcttctataccgtggaaaccatcacctcaggctcgtcgtgcaagtgtgcctgtgtagcacccccatcggccctcaatccctgcgagggagacttcaggctccagaagctgcgggaggcagacagccaggacttgaagctctccacaatcatagacatgttggaaggagcgttctatggcctggatctcctgaagctacattcagtcaccaccaaactggtggggcgagtggataaactggaggaggaagtgtctaaaaacctcaccaaggaaaacgaacaaatcaaagaggacatggaagaaattcgaaccgagatgaataagcgaggcaaagaaaattgctcgtgaaaacatcctagatagcatgccagacatccgctcagccctgcagagggatgcagcagcagcctacgcccacccagagtatgaagagcggtttctgcaggaagaaaccgtgtcccagcagatcaactccatcgaacttctgcagacgcgacccctggctctgcctgaggtggtgaagtcacagcggcccctgcagaggcaggtccacctgagaggccggccggcctcccagcccactgtcatccggggcatcacctactataaagccaaggtctctgaagaagagaatgacattgaagagcagcaaggtgagtttttcagcggtgacaatggagtggatttgctgattgaagatcagctcctgagacacaacggcctgatgaccagtgtcacccggaggcctgcagccacccgtcagggacacagcactgctgtgacaagcgacctgaacgctcggaccgcaccctggtcctcagcactgccacagccctcgacctcagatcccagcatcgccaaccatgcctcagtgggaccaacactccaaacaacctcggtgtctccagatcccacaagggagtcagtcctgcagccttctcctcaggtaccagccaccactgtggcccacacagccacccagcaaccagcagccccagctcctccggcagtgtctcccagggaggcattgatggaagctatgcacacagtcccagtgcctcccaccacagtcagaacagactcgctggggaaagatgctcctgctgggcggggaacaacccctgccagccccacgctgagccccgaagaagaagatgacatccggaatgtcataggaaggtgcaaggacactctctccacaatcacggggccgaccacccagaacacatatgggcggaatgaaggggcctggatgaaggaccccctggccaaggatgagcggatttacgtaaccaactattactacggcaacaccctggtagagttccggaacctggagaacttcaaacaaggtcgctggagcaattcctacaagctcccgtacagctggatcggcacaggccacgtggtatacaatggcgccttctactacaatcgcgccttcacccgcaacatcatcaagtacgacctgaagcagcgctacgtggctgcctgggccatgctgcatgacgtggcctacgaggaggccaccccctggcgatggcagggccactcagacgtggactttgctgtggacgagaatggcctatggctcatctacccggccctggacgatgagggcttcagccaggaggtcattgtcctgagcaagctcaatgccgcggacctgagcacacagaaggagaccacatggcgcacggggctccggaggaatttctacggcaactgcttcgtcatctgtggggtgctgtatgccgtggatagctacaaccagcggaatgccaacatctcctacgctttcgacacccacaccaacacacagatcgtccccaggctgctgttcgagaatgagtattcctatacgacccagatagactacaaccccaaggaccgcctgctctatgcctgggacaatggccaccaggtcacttaccatgtcatctttgcctactgacacccttgtccccacaagcagaagcacagaggggtcactagcaccttgtgtgtatgtgtgtgcgcgcacgtgtgtgtaggtgggtatgtgttgtttaaaaatatatattattttgtataatattgcaaatgtaaaatgacaatttgggtctatttttttatatggattgtagatcaatccatacgtgtatgtgctggtctcatcctccccagtttatatttttgtgcaaatgaacttctccttttgaccagtaaccaccttccttcaagccttcagcccctccagctccaagtctcagatctcgaccattgaaaaggtttcttcatctgggtcttgcaggaggcaggcaacaccaggagcagaaatgaaagaggcaagaaagaagtgctatgtggcgagaaaaaaagttttaatgtattggagaagttttaaaaaacccagaaaaacgcttttttttttttaataaagaagaaatttaaaatcaaaaaaaaaaaaaaaaagggcggccgccacaaagacacaccccccttttgcgcccccctgccacccctagaa

SEQ ID NO: 4943 - DNA, 2181 bp, Homo sapiens
cggcctgccggatgctgtgtgctgtggacccacctggggttcatggaagtgggccacggggcccagccctaagcactgctgcgcccaggctcgccgcgcctcctgctgaggggtccccgtgccactggtctctcaccattgccctcgcctgccgtatggcctctgctgcccagcctggggccagctctaccgcctgagccccctgccccactccaggactcaccgtaccccgatggggtaacgtgacacagtgccccacacgtcagatggccgctgtccccacggccactgcccgtgacccctggcccaaggcagctggagttggttcagttcaagttcattcttcctctggcccttgggggcttggggcccacctctgagtgaagggggctgtctgcccatccaccaatgtggagagggcgcccccggtgtggggtccagctctggacactgcttggcggccgggttcactttgagtttttaagttttctttgctgagcttttttggttgttctttttattttttgcctctttatgactatccagctctgagagacgggagtttggagttgcccgctttactttggttgggttggggggggcggcgggctgttttgttccttttcttttttaagagttgggttttcttttttaattatccaaacagtgggcagcttcctcccccacacccaagtatttgcacaatatttgtgcggggtatgggggtgggtttttaaatctcgtttctcttggacaagcacagggatctcgttctcctcattttttgggggtgtgtggggacttctcaggtcgtgtccccagccttctctgcagtcccttctgccctgccgggcccgtcgggaggcgccatggctcggatgaaccgcccggccccggtggaggtgagctacaaacacatgcgcttcctcatcacccacaaccccaccaacgccacgctcagcaccttcattgaggacctgaagaagtacggggctaccactgtggtgcgtgtgtgtgaagtgacctatgacaaaacgccgctggagaaggatggcatcaccgttgtggactggccgtttgacgatggggcgcccccgcccggcaaggtagtggaagactggctgagcctggtgaaggccaagttctgtgaggcccccggcagctgcgtggctgtgcactgcgtggcgggcctgggccggaagcgccgcggagccatcaacagcaagcagctcacctacctggagaaataccggcccaaacagaggctgcggttcaaagacccacacacgcacaagacccggtgctgcgttatgtagctcaggaccttggctgggcctggtcgtcatgtaggtcaggaccttggctggacctggaggccctgcccagccctgctctgcccagcccagcaggggctccaggccttggctggccccacatcgccttttcctccccgacacctccgtgcacttgtgtccgaggagcgaggagcccctcgggccctgggtggcctctgggccctttctcctgtctccgccactccctctggcggcgctggccgtggctctgtctctctgaggtgggtcgggcgccctctgcccgccccctcccacaccagccaggctggtctcctctagcctgtttgttgtggggtgggggtatattttgtaaccactgggcccccagcccctcttttgcgaccccttgtcctgacctgttctcggcaccttaaattattagaccccggggcagtcaggtgctccggacacccgaaggcaataaaacaggagccgtgaaaaaaaaaaaaaaaaaaaaaaaaaaaaaaaaaaaaaaaaaaaaaaaaaaaaaaaaaaaaaaaaccctcgggaacaaaaaaaacaagacaaccacaaataacccaaaatacaataaaccagacgaacacagatataaataatcatcataaactcctttccaaaaaacaatactaaaagcacaatattccaatacatatgccaaacacattaaaataacattaacaacataacaacacaaacccttaccaacatgacaacaaaattatcaaaataaccacattagtcgtaaaaaaaactaccaaacctaataatattaaaacaaaacaatataacaaccacacagcaacacacacaagtataataccaaaaaatcaacatacacaacaac

SEQ ID NO: 4944 - DNA, 4190 bp, Homo sapiens
agacaaaaaattagggcataagggatagcgaagtgcaagctgagatggggggtttgagtccagcacgaggggtgcgcggagcggttcaccgtcttcggagcggttcggcccagcctttcgcccaggcgcccaggcccgctgcgcgcgtgcgtgagcgcgcctgcgccgccagggccgctgcaaggggaggagagcggccgcctcaggaggatcccttttcccccagaaattactcaatgctgaaacctctcaaagtggtattagagacgctgaaagcaccatggacgggttttatgatcagcaagtcccttttatggtcccagggaaatctcgatctgaggaatgcagagggcggcctgtgattgacagaaagaggaagtttttggacacagatctggctcacgattctgaagagctatttcaggatctcagtcaacttcaagaggcttggttagctgaagcacaagttcctgatgatgaacagtttgtcccagattttcagtctgataacctggtgcttcatgccccacctccaaccaagatcaaacgggagctgcacagcccctcctctgagctgtcgtcttgtagccatgagcaggctcttggtgctaactatggagaaaagtgcctctacaactattgtgcctatgataggaagcctccctctgggttcaagccattaacccctcctacaacccccctctcacccacccatcagaatcccctatttcccccacctcaggcaactctgcccacctcagggcatgcccctgcagctggcccagttcaaggtgtgggccccgcccccgccccccattcgcttccagagcctggaccacagcagcaaacatttgcggtgcccccgaacaaccacatcaggcccctggaagatggccaaagaatggaaaaccagtatccatcagaacagagatttcagagacaactgtctgaaccctgccaccccttccctcctcagccaggagttcctggagataatcgccccagttaccatcggcaaatgtcagaacctattgtccctgcagctcccccgccccctcagggattcaaacaagaataccatgacccactctatgaacatggggtcccgggcatgccagggcccccagcacacgggttccagtcaccaatgggaatcaagcaggagcctcgggattactgcgtcgattcagaagtgcctaactgccagtcatcctacatgagagggggttatttctccagcagccatgaaggtttttcatatgaaaaagatccccgattatactttgacgacacttgtgttgtgcctgagagactggaaggcaaagtcaaacaggagcctaccatgtatcgagaggggcccccttaccagaggcgaggttcccttcagctgtggcagttcctggtcacccttcttgatgacccagccaatgcccacttcattgcctggacaggtcgaggcatggagttcaagctgatagaaccggaagaggttgctcggcgctggggcatccagaagaaccggccagccatgaactatgacaagctgagccgctctctccgctattactatgaaaagggcatcatgcagaaggtggctggagagcgatacgtctacaaatttgtctgtgacccagatgccctcttctccatggctttcccggataaccagcgtccgttcctgaaggcagagtccgagtgccacctcagcgaggaggacaccctgccgctgacccactttgaagacagccccgcttacctcctggacatggaccgctgcagcagcctcccctatgccgaaggctttgcttactaagtttctgagtggcggagtggccaaaccctagagctagcagttcccattcaggcaaacaagggcagtggttttgtttgtgtttttggttgttcctaaagcttgccctttgagtattatctggagaacccaagctgtctctggattggcacccttaaagacagatacattggctggggagtgggaacagggaggggcagaaaaccaccaaaaggccagtgcctcaactcttgattctgatgaggtttctgggaagagatcaaaatggagtctccttaccatggacaatacatgcaaagcaatatcttgttcaggttagtacccgcaaaacgggacatagtatgtgacaatctgcatcgatcatggactactaaatgcctttacatagaagggctctgatttgcacaatttgttgaaaaatcacaaacccatagaaaagtaagtaggctaagttggggaggctcaaaccattaagggttaaaaatacatcttaaacattggaaagctcttctagctgaatctgaaatattaccccttgtctagaaaaaggggggcagtcagaacagctgttccccactccgtggttctcaaaatcataaaccatggctactcttgggaaccacccggccatgtggtcgccaagtagagcaagccccctttctcttcccaatcacgtggctgagtgtggatgacttttattttaggagaagggcgattaacacttttgacagtattttgttttgccctgatttgggggattgttttgttttggtggttgttttggaaaaacagtttataaactgatttttgtagttttggtatttaaagcaaaaaaacgaaaaaaaaaaaacaaaaacaaccttttggtaactgtgcactgtgtctttagccagggccgtgcaacttatgaagacactgcagcttgagaggggctttgctgaggcttccccttggccatgtgaaagcccgccttgttgcctgctttgtgctttctgcaccagacaacctgatggaacatttgcacctgagttgtacatttttgaagtgtgcagggcagcctggacacaagcttagattctctatgtatagttccccgtgttcactaacatgccctctctggaaagcatatgtatataacatgtgtcatgtcctttggaaacctggtcacctggtgaaaacccttgggattcttccctgggcatgactgatgacaatttccatttcatcagtttgttttgttttcctttttctttaaatcttggactttaaaccctacctgtgtgattcagtagggtttgagacttagctgtgatactgacaggtaagcaacagtgctagcattctagattcctgcctttttttaaaaagaaattattctcattgctgtattatattggaaaagttttaaacaaccaagctaaagctatgtgaaagttgagctcaaagtagaggaaaagttactggtggtaccttgctgcctgctctgctggtagaattctgtgctccccgtgacacttagtacattaagaatgactacactgttcctcgtatgtgaaggaggcagtgctgactccgtgagtgtgagacacgtgctttgaactgcttttctattcatggagcactccatagtctcaaactgtcccccttatgaccaacagcacatttgtgaagaggttcgcagggataaggggtgcactttatagctatggaaacatgagattctcctctattggaagctaattagcccacaaaggtgggtaacctgtagattgggccttaattagcattgtactctaatcaaaggactctttctaaaccatatttatagctttcttaacctacacatagtctatacatagatgcatattttacccccagctggctagagatttatttgttgtaaatgctgtatagatttggttttcctttctttacttaccctggtttggattttttttttttttttttttgaatggatttatgctgtcttagcaatatgacaataatcctctgtagcttgagctacccctcccctgctgtaacttacgtgacctgtgctgtcactgggcataggacagcggcatcacggttgcattcccattggactcatgcacctcccggatggtttttgtttttttcgggggttctttggggtttgtttgtttgcttcttttccagagtgtggaaagtctacagtgcagaaaggcttgaacctgccagctgatttgaaatactttcccctgcgcagggccgtatgcatcctgccaagctgcgttatattctgtactgtgtacaataaagaagtttgcttttcgtttaccaaaaaaaaaaaaaaaaaaaaaaaaaaaagagaaaaaaaaaaaaaaacaaagaggggggg

SEQ ID NO: 4945 - DNA, 1245 bp, Homo sapiens
  misc_feature (1241)..(1241): n is a, c, g, or t
ctctttgccctcgcgacgccgccacctccggaacaagccatggtggcggcgacggtggcagcggcgtggctgctcctgtgggctgcggcctgcgcgcagcaggagcaggacttctacgacttcaaggcggtcaacatccggggcaaactggtgtcgctggagaagtaccgcggatcggtgtccctggtggtgaatgtggccagcgagtgcggcttcacagaccagcactaccgagccctgcagcagctgcagcgagacctgggcccccaccactttaacgtgctcgccttcccctgcaaccagtttggccaacaggagcctgacagcaacaaggagattgagagctttgcccgccgcacctacagtgtctcattccccatgtttagcaagattgcagtcaccggtactggtgcccatcctgccttcaagtacctggcccagacttctgggaaggagcccacctggaacttctggaagtacctagtagccccagatggaaaggtggtaggggcttgggacccaactgtgtcagtggaggaggtcagaccccagatcacagcgctcgtgaggaagctcatcctactgaagcgagaagacttataaccaccgcgtctcctcctccaccacctcatcccgcccacctgtgtggggctgaccaatgcaaactcaaatggtgcttcaaagggagagacccactgactctccttcctttactcttatgccattggtcccatcattcttgtgggggaaaaattctagtattttgattatttgaatcttacagcaacaaataggaactcctggccaatgagagctcttgaccagtgaatcaccagccgatacgaacgtcttgccaacaaaaatgtgtggcaaatagaagtatatcaagcaataatctcccacccaaggcttctgtaaactgggaccaatgattacctcatagggctgttgtgaggattaggatgaaatacctgtgaaagtgcctaggcagtgccagccaaataggaggcattcaatgaacattttttgcatataaaccaaaaaataacttgttatcaataaaaacttgcatccaacatgaatttccagccgatgataatccaggccaaaggtttagttgttgttatttcctctgtattattttcttcattacaaaagaaatgcaagttcattgtaacaatccaaacaatacctcacgatataaaataaaaatgaaagtatcctcctcaaaaaaaaaaaanaaaa

SEQ ID NO: 4946 - DNA, 1941 bp, Homo sapiens
  misc_feature (25)..(25): n is a, c, g, or t
  misc_feature (37)..(37): n is a, c, g, or t
  misc_feature (41)..(86): n is a, c, g, or t
  misc_feature (1800)..(1886): n is a, c, g, or t
  misc_feature (1888)..(1940): n is a, c, g, or t
ggcgcctcccgattgaaccaccatnccccctcgaacncccnnnnnnnnnnnnnnnnnnnnnnnnnnnnnnnnnnnnnnnnnnnnnncattatggccggggacaaactttcagagacagcagagcacacaagcttctaggacaagagccaggaagaaaccaccggaaggaaccatctcactgtgtgtaaacatgacttccaagctggccgtggctctcttggcagccttcctgatttctgcagctctgtgtgaaggtgcagttttgccaaggagtgctaaagaacttagatgtcagtgcataaagacatactccaaacctttccaccccaaatttatcaaagaactgagagtgattgagagtggaccacactgcgccaacacagaaattattgtaaagctttctgatggaagagagctctgtctggaccccaaggaaaactgggtgcagagggttgtggagaagtttttgaagagggctgagaattcataaaaaaattcattctctgtggtatccaagaatcagtgaagatgccagtgaaacttcaagcaaatctacttcaacacttcatgtattgtgtgggtctgttgtagggttgccagatgcaatacaagattcctggttaaatttgaatttcagtaaacaatgaatagtttttcattgtaccatgaaatatccagaacatacttatatgtaaagtattatttatttgaatctacaaatatacaaatagcataattgaggccaagggccaagagaatatccgaactttaatttcaggaattgaatgggtttgctagaatgtgatatttgaagcatcacataaaaatgatgggacaataaattttgccataaagtcaaatttagctggaaatcctggatttttttctgttaaatctggcaaccctagtctgctagccaggatccacaagtccttgttccactgtgccttggtttctcctttatttctaagtggaaaaagtattagccaccatcttacctcacagtgatgttgtgaggacatgtggaagcactttaagttttttcatcataacataaattattttcaagtgtaacttattaacctatttattatttatgtatttatttaagcatcaaatatttgtgcaagaatttggaaaaatagaagatgaatcattgattgaatagttataaagatgttatagtaaatttattttattttagatattaaatgatgttttattagataaatttcaatcagggtttttagattaaacaaacaaacaattgggtacccagttaaattttcatttcagataaacaacaaataattttttagtataagtacattattgtttatctgaaattttaattgaactaacaatcctagtttgatactcccagtcttgtcattgccagctgtgttggtagtgctgtgttgaattacggaataatgagttagaactattaaaacagccaaaactccacagtcaatattagtaatttcttgctggttgaaacttgtttattatgtacaaatagattcttataatattatttaaatgactgcatttttaaatacaaggctttatatttttaactttaagatgtttttatgtgctctccaaattttttttactgtttctgattgtatggaaatataaaagtaaatatgaaacatttaaaatataatttgttgtcaaagtaaaaaaaaaaaaaaaaaaaaaaaaaaaaataaaataattaaatatattttataattatatattcatttatatatttataaaaattaaagggggggctggttccaattttgcctnnnnnnnnnnnnnnnnnnnnnnnnnnnnnnnnnnnnnnnnnnnnnnnnnnnnnnnnnnnnnnnnnnnnnnnnnnnnnnnnnnnnnnncnnnnnnnnnnnnnnnnnnnnnnnnnnnnnnnnnnnnnnnnnnnnnnnnnnnnnc

SEQ ID NO: 4947 - DNA, 3614 bp, Homo sapiens
  misc_feature (1479)..(1498): n is a, c, g, or t
  misc_feature (2004)..(2070): n is a, c, g, or t
gtggccgggagggcctgcttgggcagctgcggccgcaggatggccaggcccggagcagctgcagccccggcggccgaacgcccgcggcgcgggactccatcgtcagagaagtcattcagaattcaaaagaagttctaagtttattgcaagaaaaaaaccctgccttcaagccggttcttgcaattatccaggcaggtgacgacaacttgatgcaggaaatcaaccagaatttggctgaggaggctggtctgaacatcactcacatttgcctccctccagatagcagtgaagccgagattatagatgaaatcttaaagatcaatgaagataccagagtacatggccttgcccttcagatctctgagaacttgtttagcaacaaagtcctcaatgccttgaaaccagaaaaagatgtggatggagtaacagacataaacctggggaagctggtgcgaggggatgcccatgaatgttttgtttcacctgttgccaaagctgttaatttgaacttcttgaaaaatcaggtgtcaacctagatggaaagaagattttggtagtgggggcccatgggtctttggaagctgctctacaatgcctgttccagagaaaagggtccatgacaatgagcatccagtggaaaacacgccagcttcaaagcaagcttcacgaggctgacattgtggtcctaggctcacctaagccagaagagattccccttacttggatacaaccaggaactactgttctcaactgctcccatgacttcctgtcagggaaggttgggtgtggctctccaagaatacattttggtggactcattgaggaagatgatgtgattctccttgctgcagctctgcgaattcagaacatggtcagtagtggaaggagatggcttcgtgaacagcagcacaggcggtggagacttcactgcttgaaacttcagcctctctcccctgtgccaagtgacattgagatttcaagaggacaaactccaaaagctgtggatgtccttgccaaggagattggattgcttgcagatgaaattgaaatctatggcaaaagcaaagccaaagtacgtttgtccgtgctagaaaggttaaaggatcaagcagatggaaaatacgtcttagttgctgggatcacacccacccctcttggagaagggaagagcacagtcaccatcgggcttgtgcaggctctgaccgcacacctgaatgtcaactcctttgcctgcttgaggcagccttcccaaggaccgacgtttggagtgaaaggaggagccgcgggtggtggatatgcccaggtcatccccatggaggagttcaaccttcacttgactggagacatccacgccatcaccgctgccaataacttgctggctgccgccatcgacacgaggattcttcatgaaaacacgcaaacagataaggctctgtataatcggctggttcctttagtgaatggtgtcagagaattttnnnnnnnnnnnnnnnnnnnnctcggctaaaaaaactgggaataaataagactgatccgagcacactgacagaagaggaagtgagtaaatttgcccgtctcgacatcgacccatctaccatcacgtggcagagagtattggatacaaatgaccgatttctacgaaaaataaccatcgggcagggaaacacagagaagggccattaccggcaggcgcagtttgacatcgcagtggccagcgagatcatggcggtgctggccctgacggacagcctcgcagacatgaaggcacggctgggaaggatggtggtggccagtgacaaaagcgggcagcctgtgacagcagatgatttgggggtgacaggtgctttgacagttttgatgaaagatgcaataaaaccaaacctgatgcagaccctggaagggacacctgtgttcgtgcatgcgggcccttttgctaacattgctcacggcaactcttcagtgttggctgataaaattggcctgaaactggttggtgaagaaggnnnnnnnnnnnnnnnnnnnnnnnnnnnnnnnnnnnnnnnnnnnnnnnnnnnnnnnnnnnnnnnnnnncatcaagtgccgagcttccggcttggtgcccaacgtggttgtgttagtggcaacggtgcgagctctgaagatgcatggaggcgggccaagtgtaacggctggtgttcctcttaagaaagaatatacagaggagaacatccagctggtggcagacggctgctgtaacctccagaagcaaattcagatcactcagctctttggggttcccgttgtggtggctctgaatgtcttcaagaccgacacccgcgctgagattgacttggtgtgtgagcttgcaaagcgggctggtgcctttgatgcagtcccctgctatcactggtcggttggtggaaaaggatcggtggacttggctcgggctgtgagagaggctgcgagtaaaagaagccgattccagttcctgtatgatgttcaggttccaattgtggacaagataaggaccattgctcaggctgtctatggagccaaagatattgaactctctcctgaggcacaagccaaaatagatcgttacactcaacagggttttggaaatttgcccatctgcatggcaaagacccacctttctctatctcaccaacctgacaaaaaaggtgtgccaagggacttcatcttacctatcagtgacgtccgggccagcataggcgctgggttcatttaccctttggtcggaacgatgagcaccatgccaggactgcccacccggccctgcttttatgacatagatcttgataccgaaacagaacaagttaaaggcttgttctaagtggacaaggctctcacaggacccgatgcagactcctgaaacagactactctttgcctttttgctgcagttggagaagaaactgaatttgaaaaatgtctgttatgcaatgctggagacatggtgaaataggccaaagatttcttcttcgttcaagatgaattctgttcacagtggagtatggtgttcggcaaaaggacctccaccaagactgaaagaaactaatttatttctgtttctgtggagtttccattatttctactgcttacactttagaatgtttattttatggggactaagggattaggagtgtgaactaaaaggtaacattttccactctcaagttttctactttgtctttgaactgaaaataaacatggatctagaaaaccaaaaaaaaaaaaaaaaaaaaaaaaaaaaaacaacaaaaaaaaaaaaaaaagaaaaacaaaccacaaaacaagaaaacagagcacagaaaaaacacacgaagcaaagacaagtcagaagacaaccacgagaacaccacaaaaacaagaggtgggcaggcacgacgcaggacaaaaaaagaacctcgaagcgaggagcagaatagaaacagaccactagccgacacacagccgtgcagcagccgcggcggcgcgcctagtagaacaaagtaggataaacacgagagtaagggggcgcgcactgagcacaacacataggccgggaaggcagacgaacgctgaggagggcgaggaaacttactggcgagcacgcaccaaccaccgcgcgggaat

SEQ ID NO: 4948 - DNA, 1353 bp, Homo sapiens
ggtggcgaatttggcacgaggccgccttgtctctgggcgcggccatgttggaggctccgggcccgagtgatggctgcgagctcagcaaccccagcgccacagagtcagctgtgccgggcagatgctggaagtgcagccaggattgtatttcggtggggccgcggccgtcgcggagccagatcacctgagggaagcgggcatcacggccgtgctaacagtggactcggaggagcccagcttcaaggcggggcctggggtcgaggatctatggcgcctcttcgtgccagcgctggacaaacccgagacggacctactcagccatctggaccggtgcgtggccttcatcggtcaggcccgcgctgagggccgtgcggtgttggtgcactgtcatgcaggagtcagtcgaagtgtggccataataactgcttttctcatgaagactgaccaacttccctttgaaaaagcctatgaaaagctccagattctcaaaccagaggctaagatgaatgaggggtttgagtggcaactgaaattataccaggcaatgggatatgaagtggatacctctagtgcaatttataagcaatatcgtttacaaaaggttacagagaagtatccagaattgcagaatttacctcaagaactctttgctgttgacccaactaccgtttcacaaggattgaaagatgaggttctctacaagtgtagaaagtgcaggcgatcattatttcgaagttctagtattctggatcaccgtgaaggaagtggacctatagcctttgcccacaagagaatgacaccatcttccatgcttaccacagggaggcaagctcaatgtacatcttatttcattgaacctgtacagtggatggaatctgctttgttgggagtgatggatggacagcttctttgcccaaaatgcagtgccaagttgggttccttcaactggtatggtgaacagtgctcttgtggtaggtggataacacctgcttttcaaatacataagaatagagtggatgaaatgaaaatattgcctgttttgggatcacaaacaggaaaaatatgaacatgatattttatagcttgggaagaaacttgcagatgatatgtgctgcctttgcttcttatcattcatggcagattgtttgtgctttcaacatttcatttgaaatgggagaagataaaatcacttgatgtaacctggaaactatgctttacatggcaatccaagcttgatcatgtacattttatttgatattaaaatccttttataaccagaaaaaaaaaaaaaaaaaaaaaaaaaaaaaaaaagaaaaaaaaaaaaaaaaaaaaaggaaaaaaaaaaaaaaaagg

SEQ ID NO: 4949 - DNA, 2012 bp, Homo sapiens
ccttccaaccgcgccccccctcccggatggggaaaaaaaaagatgtcagctcctccgctgtagtattgctccttaaaaacccctctctctgaaaatgacatgccctcgcaatgtaactccgaactcgtacgcggagcccttggctgcgcccggcggaggagagcgctatagccggagcgcaggcatgtatatgcagtctgggagtgacttcaattgcggggtgatgaggggctgcgggctcgcgccctcgctctccaagagggacgagggcagcagccccagcctcgccctcaacacctatccgtcctacctctcgcagctggactcctggggcgaccccaaagccgcctatcgcctggaacaacctgttggcaggccgctgtcctcctgctcctacccacctagtgtcaaggaggagaatgtctgctgcatgtacagcgcagagaagcgggcgaaaagtggccccgaggcagctctctactcccaccccttgccggagtcctgccttggggagcacgaggtacccgtgcccagctactaccgcgccagcccgagctactccgcgctggacaagacgccccactgttctggggccaacgacttcgaagcccctttcgagcagcgggccagtctcaacccgcgcgccgaacatctggaatcgcctcagctggggggcaaagtgagtttccctgagacccccaagtccgacagccagacccccagccccaatgaaatcaagacggagcagagcctggcgggccctaaagggagcccctcggagagcgaaaaggagagggccaaagctgccgactccagcccagacacctcggataacgaagcgaaagaggagataaaggcagaaaacaccacaggaaattggctgacagcaaagagcggaaggaagaagaggtgcccctatactaaacaccagacgctggaattggagaaagaatttctgttcaatatgtatttgacgcgagagcgccgcctggagattagcaagaccattaaccttacagacagacaagtcaaaatctggtttcaaaatcgcagaatgaaactcaagaaaatgaaccgagagaatcggatccgggaactgacctccaattttaatttcacctgagagcgcggcctctcctcctcccttcccgctccttcctctccccgcccctcctccctttgtgcctggtgatatatttttttttcctccctgagtataaatgcaatgcgactgcaaaaaaggcaaagacctcagactctccttccaagggacctgtggttcgtgctgcgaagatgcttccacttaaagcatgagaaatggggtgccgggatgtggggtgtggtgtgtgccctcatagatgggggtgggagtgtggctggtgtgtgtgtcaaaccctcactcacccacgcactcacacacagcattctgttctccatgcaaagttaagatcgaatccatccgcttgtaggggaaaaaaaggaaaaaaattaaccagagagggtctgtaatctcgcagagcacaggcagaatcgttccttccttgctgcatttcctccttagactaatagacgttttggaaagttcggctagtgttcgtgtgtttgtcgtagcacccagagcctccaccaaaccctctccatgtctttacctcccagtcgctctaagaatctgcttgaagtctcgtatttgtactgctttctgcttttctcccacccctcctagcacccccacatcccccatctagtaacatctcagaaatttcatccagaggaacaaaaaaattaaaaatagaacatagcaaagcaaagacagaatgcccccccccaaatattgtcctgtccctgtctgggagttgtgttatttaaagatattctgtatgttgtatcttttgcatgtagcttccttaatggagaaaaaaaaatcctaataaatttccagaatcataatcctcaaaaaaaaaaaaaaaaaaaaaaaaaaaaaaaaaaaaaaaaaaaaaaaaaaaaaaaaaaaa

SEQ ID NO: 4950 - DNA, 1303 bp, Homo sapiens
ggggggcagtcgccccggcaacagccgcctccctcgcgtcccccactccccctctgtctctccaaggaaaactaggcccctgcgcggccaacgcccaggatccgcaagctgcgcgcccacgagtttcagcacccatttggactttcacaatcagagatggcagcggtaaaggcatcaacatcgaaagctaccaggccttggtattctcatccggtatatgcaagatactggcaacattatcatcaagcaatggcttggatgcaaagccatcacaatgcctacaggaaggccgtggaatcctgtttcaatcttccatggtacttaccttctgcgcttcttccccaaagctcttacgataatgaggctgcgtatcctcagtccttctatgaccatcatgtggcctggcaggactacccctgcagttcttcacatttcagaagatctgggcagcatccacgttacagcagtaggatccaggcatccacaaaagaagaccaagctttgtccaaagaggaagagatggagactgagtcagatgcagaggtagaatgtgacctgagcaatatggaaatcactgaaagagctccgccagtactttgcagagaccgagaggcatagagaagaacgacggcggcagcagcagctggatgcagagcgcctggacagctatgtgaacgctgaccacgacctgtactgcaacacccgccggtcggtagaagccccaactgagaggcctggtgagcggcgccaggccgagatgaagcgtttgtacggggacagtgctgccaagatccaagccatggaggccgcggtgcagctgagctttgacaagcactgtgaccgaaagcagcccaagtactggccggtcatccccctgaagttctgagctcagggcacagggtacccagcctctccttcttccttttgggtacacgctctttatctctccttctgtacatttcttagggaaaggggactttgtactggggtacaggcatgttcaccacagtcccagtgggcctgtcacggggtggatgtactatgccagccacttggaggtctgcaggacatgttctgttgccaacatgataaattttctcctgacataaaataattttgcatatacaaaaaaaaaaaaaaaaaaaaaaaaaaaaaaaaaaaaaaaattaacgttcttgcctaagagatactggcttggggtttggcataaaaatcttttcttgtctttaacctgtctgaactacacaaatggccttttaaaaaccagatatcctctttggactctaactccaataagccccac

SEQ ID NO: 4951 - DNA, 2638 bp, Homo sapiens
agttgatagagacaggtactcaaataatggtaacacctcgtgccgaattcggcacgagggtccgcggcgcagagcagcggcggcagcggcggcggcggcagcagccacccgatgtcttcggcgcccgagaagcagcagccaccgcacggcggcggcggcggcggcggcgggggaggcggcgcggccatggaccccgcgtcgtccggcccgtccaaggccaagaagaccaacgccggcatccggcgcccggagaagccgccctattcctacatcgcgctcatcgtcatggccatccagagttcacccaccaagcgcctgacgctgagcgagatctaccagttcctgcagagccgcttccccttcttccggggctcctaccagggctggaagaactccgtgcgccacaacctctcgctcaacgagtgcttcatcaagctacccaagggccttgggcggcccggcaagggccactactggaccatcgacccggccagcgagttcatgttcgaggagggctcctttcggcggcggccgcgcggcttccgaaggaaatgccaggcgctcaagcccatgtacagcatgatgaacgggctcggcttcaaccacctcccggacacctacggcttccagggctcggccggcggcctctcgtgcccgcccaacagcctggcgctggagggcggcctgggcatgatgaacggccacttgccgggcaacgtggacggcatggccctgcccagccactcggtgccccacctgccttccaacggcggccactcgtacatgggcggctgcggcggcgcggcggccggcgagtacccgcaccacgacagctcggtgcccgcctccccgctgctgcccaccggcgccggtggggtcatggagccgcacgccgtctactcgggctcggcggcggcctggccgccctcggcgtccgcggcgctcaacagcggcgcctcttatatcaagcagcagcccctgtccccctgtaaccccgcggccaaccccctgtccggcagcctctccacgcactccctggagcagccgtatctgcaccagaacagccacaacgccccagccgagctgcaaggcatcccgcggtatcactcgcagtcgcccagcatgtgtgaccgaaaggagtttgtcttctctttcaacgccatggcgtcctcttccatgcactcggccggcgggggctcctactaccaccagcaggtcacctaccaagacatcaagccttgcgtgatgtgaggctgccgccgcaggccctcctggtgcaggcaggcgggtcacagggaccctggaccggcacaagaaactgctttcttctcgaggtataaccgtcggcagaagaaaagggttccacctctccccaaccggagtttttggcaaggagtccccaatgcaaagacacagcgctgcggattggcacctccttcctcactccctcaaaattgttaagaaatgttagtggtgggtctgatctgactgcagccatcggtaaataaaagtttttgatcctgttgaacccgcctgagacggtgctgtgcaggggaaagccccgcacccacacaggaattctgctgaggtccccctccttccggccaatggcagaagtgggggaaaatttttagaagaaaagcaacatgtgagaccaatcattatcaaatacttttatttttgggtgagtattaaccttttaatttttaatttttttttgaaagaatgtcttggaatgcgcaagtctccctttagagccgtcttttgcagggagcgggaagtgacaagagctcagatctccctcccgatctccctccccacctccgaagtctcctccgtggaccacaggtggatctttgtgcgaacaacttgcatttcggaagccactgtccgtctttaaacagaaagtcaaaggagccacgaagcaagcggccgtccgggcgtccgcctccgtccccttccatgttcctcctcttccttcgcttcagcctcttctgttatgttttgtcttgaattttatttagactttttcagtgggtatttttctgtctcccaacctctactgtaaactttctggtccgagaacgagccgaacacagcgcgacgcagggactaggacggcccggtgaccgcgcggattcaggattgcggggacgcagaaaggttaaggcacttttaaaaactatagcaaggctcctgtttatttattctactttctttccctaataatcaaaacaccgcgtaggctcctccgtttatcagtattaatggtgtaactttgttggcaatatttgccgtgtagaattttttttagatatccattgtaaatttgaaacaaagaccgatctgtgtaaaaacaaatttccatatgttttatataaatatatatataatatgaaggactaccctcctttttttttttttgtattttggctgctagagtgcagcatttgtgacacgtatttgaaatttgaaatttccttctgcactgtataaaaggaccatttgaggatgttttgccttttgtgtattttttcctaaaaaaagaacaaaaataaaaatgtataacatttgtacatggcctttaaaattgtatcaactagaaataaaattgcatgagtattttattgggaaaaaa

SEQ ID NO: 4952 - DNA, 1095 bp, Homo sapiens
gattgcttgaggagagaagtatgtgatcagaaagcattctttgtctattaactcctgcccagcaaaagtgaaagaaaattcatgggagcatgcaagaacaaagagcacagcaaagctggacaaacacagcaatccaggcaggggatttccaactcaactctggtatgtaagctgcatgcaaagtcctttttctgtctctggttgatggccccttgtctgcagagatggctcccaatgcttcctgcctctgtgtgcatgtccgttccgaggaatgggatttaatgacctttgatgccaacccatatgacagcgtgaaaaaaatcaaagaacatgtccggtctaagaccaaggttcctgtgcaggaccaggttcttttgctgggctccaagatcttaaagccacggagaagcctctcatcttatggcattgacaaagagaagaccatccaccttaccctgaaagtggtgaagcccagtgatgaggagctgcccttgtttcttgtggagtcaggtgatgaggcaaagaggcacctcctccaggtgcgaaggtccagctcagtggcacaagtgaaagcaatgatcgagactaagacgggtataatccctgagacccagattgtgacttgcaatggaaagagactggaagatgggaagatgatggcagattacggcatcagaaagggcaacttactcttcctggcatcttattgtattggagggtgaccaccctggggatggggtgttggcaggggtcaaaaagcttatttcttttaatctcttactcaacgaacacatcttctgatgatttcccaaaattaatgagaatgagatgagtagagtaagatttgggtgggatgggtaggatgaagtatattgcccaactctatgtttctttgattctaacacaattaattaagtgacatgatttttactaatgtattactgagactagtaaataaatttttaaggcaaaatagagcattcaaaaaaaagcttggaattctaattctgtcttggataccttggtattttatgccaaaaactcctatctcctttccttttatgacacgagaagtaggttgagggttgggatccc

SEQ ID NO: 4953 - DNA, 6145 bp, Homo sapiens
  misc_feature (303)..(323): n is a, c, g, or t
  misc_feature (581)..(582): n is a, c, g, or t
  misc_feature (2965)..(2980): n is a, c, g, or t
  misc_feature (4338)..(4352): n is a, c, g, or t
  misc_feature (5784)..(5805): n is a, c, g, or t
gcccgcgccccccgccgcccccgtccccgccagcgccgctgcgcagccccccgccccagcctgggcctacgaaccccgagccgccgccgccgccgccagcagcagctgcagcagtggcagctgcagtagcggcagcagccccagcctcaaggccagtttaagctatgaagaaggacatccctcacactctgaaacagatctccttcagagacagagttttgcagcctctcatcagcttcctggatatgctcccacacctcagcctactggtctttctggaatatttgatactagtgtgaacannnnnnnnnnnnnnnnnnnnnaaagagtcttcagtgatgaattttctgtctactgctgaatcccgaactgctcaggctgctgcttcaggaactactctcttaccacaattcagggctccatcctggcagacaggcatgcattcctcagcagcaactgagctgtttgctactggacctttgccaagcactggaacacttccaccatctctctctgcttatcagcatcccaccaccttcagcaatagaaactttgctaccacttcacctttggtgcttcanngattcaacttttaacactacatcaaatggaattttaagtcatcatgaccctttgctacaaatcaagacttcccagggaactgttccaactgctttggcatttgagcgcctgggcagttctgtattaagtaacagcataccacctcagtcttcaacataccgctcagctcaagagtctgcaccccatcttttacaacctcaatttagtttgttgccttcagcacttgggggatcccagcagactcctcaagcctacagttcaactctctttactagttctactgcttccattgaaagagctcttcttcgagaatgtagtgttattaaacaccatcagcggccttcaggtacccagtcaattcaggcacaactgactggttcacagcactccttacatagttatctatcaaattcaagtgtagttaattttcaggaaacaaccagggcagtcatctttatcctgtagcccaattggagattccactcaggtgaggcaacggaggattacaacagaagacctcccaggtctcagtggaacttgctcagtcttactcatctgcgattccatcatcagggtatcctccttctactacaaaaataaaaagctgttctacagaacaaccactgacatcaaccaagacccctaaacctcaaagtataattcctcctgtgcaaacactaagctattccaaacctttacataatcagagttctgtaatatcgggccaagcacaaatttattctacagcgcagctaccaagccttttatcagttagtcagtcccaaaattacggtttagtacagccacataatgtgccatctattgttcattcacaggtttataggtccagcaaggttgagaaattgccacccttgtataaaacattgactttttctgggtcatctcagactataactcctgaaaatcagacgcttaattattcatctaatcagcaagaggtattgtcttcagttacaaatgagaattaccctgctcaaacaagagatctgtcttcagtaagtcagtctcaaagttactcatctggtcactctcagggtttatcaccagttagccagacacaggttagctattcatctcaatcacaagttttgtcagttgttagtctttcagaaagctatgcttcaggggagtccctaacattaacagccccttctctttcttattcttctgcctctcgggctcagaatttgccagactctagcccgacccagaattatatttctatgcattcttcccaaaatgttcagactcaagagtcatcatctccccagtcccagaagtttttgcctgctgtccagtcatcatcttttgcatcctctactcattgtcagacattacaaaataacataacttcccctgacccaaagtcttatgctgaaagaaagcttgactcagatgtgtatccatcttcaaagcaagaagatggttttccaatgcaagagttacaggtgttgcagccacaagcatctcttgagtcatcaacccaaaggctatctgatggagaaattaatgctcaagaatcaacttataaggtgtcaaaggcagatgacagatattctcagagtgtaatcagaagtaattcccgtcttgaagatcaagttattggggttgctctgcaagcatcaaaaaaagaagaaagtgttgttggttcagtgacacaacttaaccaacaaattggccaagtcaataatgcagctacccttgatcttaagaactcaactaatttaatacagactccacaaataaggttgaatactaaagacttaaagcagcaacatcctctcatacttaaggtgcatgagtccaaggtccaggaacagcacgatcaaataattaatgcttcatctcagattcaaattccaaatcatgctttagggcatggccatcaggcatctcttcctaatacacaggtccttttagattctgcctgtgatttacaaattcttcagcagtcaatactgcaggcaggtttaggtcaagtaaaggcatctttacaagcacagcgtgttcaaagccctcaacaaatagtacatcccttccttcagatggaaggtcatgttattcaaagcaatggtgatcattctcagcagcaactccatcctcaaaattctgaagttatgaaaatggacctctctgagtcttcaaaaccattacaacaacatctaacaacaaagggccattttagtgaaacaaatcaacatgattcaaagaatcagtttgtttctcttggatcgatgtgtttcccagaggcagtgcttcttagtgatgaaagaaatattttatcaaatgtagatgatatcttagcagctacagcagcagcttgtggagttacacctactgatttttccaagtcaacttcaannnnnnnnnnnnnnnnctgttgaagatggtgattctaaatctcattttcagcagtcattagatgtcaggcatgtgacttcagattttaactctatgacagctacagtaggaaagccacagaatataaatgatacttccttaaatggaaatcaggttactgtgaacctttcaccagtacctgcccttcagtcaaaaatgactcttgatcaacagcacattgaaacacctggtcaaaatataccaactaaagtaacttcagcagtggttggaccaagtcatgaagtccaggagcaaagttctggcccattcaagaaacagtctgctaccaatcttgaatctgaagaagacagtgaagctcctgttgatagtacattaaataataacagaaaccaagagtttgtttctagtagtagaagtataagtggagagagtgctacatcagagagtgaatttaccttagggggtgacgacagtggtgtgtcaatgaacccagctaggagtgcacttgcactgttggccatggcccaatctggggatgcagtcagtgtcaagattgaagaagaaaaccaagatttaatgcattttaaccttcaaaagaaaagagctaaaggaaaagggcaagttaaagaggaagacaacagtaatcagaaacagctgaaaagacctgcccaaggcaaacgccagaatccaaggggaacagatatttacttaccgtatactcctccttcctcagaaagctgccatgatggttatcagcatcaagaaaaaaatgagacagaagatcaaagaggtggaggaaaaacaaccggaagtcaaaacaggatttattgcttctttcttagattttctgaaatccgggcccaagcagcagttttccactcttgctgtacgaatgcctaacaggactagacggccagggacccagatggttcgtacattttgtcccccaccacttcccaagccttcatctacaacacccacacctttagtgtctgaaactggcggtaacagtccatcagataaagttgataatgaacttaaaaacttggaacatttatcttcattttcttctgatgaagatgatcctggatatagtcaagatgcttataaaagcgtctctactcccttaactactttggatgctacttctgataaaaagaagaaaacagaagccctacaggtggcaactactagcccaactgccaatactactggtactgctactacttcctcaaccactgtgggtgcagttaagcaagaacctctccactctacttcatatgcagtaaatattctggaaaatataagctcttcagaatcctcaaagcccattgaacttgatggttttccttcagaccagtttgcaaaaggacnnnnnnnnnnnnnnntagaaggttttacagatgaggaggacacagaaagcggaggagaaggccaatacagagagcgtgatgaatttgtggtaaagatagaagacatagagacttttaaggaggctttaaaaacaggaaaagaacctccagctatttggaaagtacaaaaagctttattacagaaatttgttcctgaaattcgagatggtcaaagagaatttgctgctacaaatagttatcttggatattttggagatgcaaagagtaaatacaaaagaatatatgtgaagttcattgaaaatgcaaacaagaaggaatatgtcagagtgtgttctaaaaagccaagaaataaaccttcacaaactatcagaactgttcaagctaagccaagtagtagcagtaaaacttctgatcctctagcatcaaaaactacaactacaaaagccccttccgtgaaacccaaagttaaacagccaaaagtaaaggctgagccaccaccaaagaaacggaaaaaatggaaagaagaattttcatcatcccaatctgactcatctcctgagatccatactagtagtagtgacgatgaggaatttgaacctcccgctccctttgtcactcgctttttgaacacaagagcaatgaaggaaacctttaagagctacatggaattgcttgttagcattgccttggaccctgacacaatgcaagccttagagaagagcaatgatgagctacttttacctcatatgaaaaaaatagatggcatgctaaatgataaccgaaagagacttcttttgaatcttcatttggatcaatcattcaagaatgctttggaaagttttcctgaactaacaataattactcgagattctaaagcaaagagtggaggaactgctatttctaaaatcaaaatgaatggcaaagcctataataagaaaactctaaggacttctaaaacaaccaccaaatctgcacaagagtttgctgtcgatccagagaaaatacagttgtattctttgtatcattcactccatcattataagtaccatgtttatctgatatgtaaggatgagatttcttcggtgcagaaaaaaaatgaagatttaggacaggaggaaattgttcaactttgtatgaaaaatgtaaaatgggtggaggacctctttgaaaaatttggagaacttctaaatcatgtacagcagaaatgttcctgacttttccacaaaaatcccatctttttatagcactaatgaaatggcagatatggggtggtcaaagataatcagatgtcaagtagtggccttctgcaggccggccgcttccatcatggaactgtcattaccacctctgctgaaggacagtggtgcggcctttaggaacgaagttagtcctctggaaatggacctaaatcccaccacatttttaccctaatgaatgatttttctannnnnnnnnnnnnnnnnnnnnntaacttgagtcatattttcagaaacattttttgacaaatgatgaagcatgcactaagtataatttttttttattgctagagaagtaacacttaaagtaacgattttttttttctgactccggctaaacaccagaatgacagagaagtggcagaaaccatatgtttgtactcacatctggccacaaaaccagaaatactgtacattatgtaaagaggtctggtgtggtgtgacatcctgtataagaatatcatcaatttaaaatataaaatttggaaactaaaaaaaaaaaaaaaaaaaaaaaaaaaaaaaaaaaaaaaaaaaaaaaaaaagaaaaaaaaa

SEQ ID NO: 4954 - DNA, 2401 bp, Homo sapiens
  misc_feature (481)..(555): n is a, c, g, or t
  misc_feature (2394)..(2394): n is a, c, g, or t
gtctgctccgggacttggaacaaaagggggaactctgatgaactctctttcctcccctctcccccggacgccggggtatctccctctcgcaactttgccgccccgactttctctgctgtcaggccgggaaaaagtgtccgaacgcctcgtggactgcagcgggggaaatgtcccttaaaagtgcgacgaagtggggaagaaggtgtaattactattatcagcatctagaaagcatcatgaatttgctggagtacttcctagcactgacctccttcattctgcgttgttcttactggatctttccatcagccaacaatatggaagtaccaatacaaggtcaaatcattcctggattcatctggagttgcttaaaagttaaatcattggaatttttgatgataccttttctatatggattacaatttgatcgctgggaattctccaccttaaagaagtaccctcaggtgactacagatgtgtnnnnnnnnnnnnnnnnnnnnnnnnnnnnnnnnnnnnnnnnnnnnnnnnnnnnnnnnnnnnnnnnnnnnnnnnnnnactggtgggtttgctgaagcattatcacaagacagtcagaatgactgatgagtgctcttcaggtgtgaatcatggcaatacagtgaaagacagtgatttactgcttttgagggcgtgcatgtatatgattaacggatggaagtgcaggactccaagatttacttccttccctttccagcagaattacctgagacgagtaaaatctactggtggagtcactccattattcttatctgtggagatctagatcttgatttgaaagtttctgagaaaatcttcagctcagacttgagggtcaactttaccagctgaaggatctgcatttactgctcaaccacatctaatttgatgtcctctgcagatttaaaatgtgtgccttctcttccgtcaccaagtcatccctgggttactactgaacatccttctcaattccccccgacccatggatggctgttctccattgtctgtttcaccagatgtcctcaaaacaaacagacagaagaaggaagtggctaatggagctgtggagtccaagtgtgactgccaagaggaatccagcaaagccaaaaagcccaagcatgtagccctgcccgaagcacgccacacgcatggaaaacccagaggaaatgagtgaggatcaatgggaagaagagagccagccaggaagttgaagatttgtccaggagcagatagctgaagagagagagagagaagagagaacggcttacagctcaggtcctctctccatgcttaggaaccactacaaatgctactgccttgagtctcattttgtttccctctggaaaccacatgtgtaccttgtttgcaacagtatgggctcacaggcagaaggaattttccttgtcttggatgagacttttgacttggacttttgggttaagttctggagaccagaaggccaaaatcaaaagtatgggcaggcttgatttctttagaagactccagcggagaactgtgtctccttgcttctgattctacatctccatccatgggccactgtttcagcaacctcagccagtgcaacacaacctcagccaagaagagtatgcagagaaaggagtcccctacctgccacaaaactgttgtctgaaaactgtctcatattgtctcaagttgtcattcattgtgaattagacctgtttaacatgtaatctgcaacatgcttcactgtctaattttccagagcccctcatataaggaactgtattattggtataatcatcatggtgaagaagttggtatgtgggggagagatgacagaaacagagagtaagtcagagctggctgcctgacagataaaaaggaaatgaccaaaaaaaaaaaaaaaaacacagaagaatactttgttgtccacacagaaacgggaagtataggtaagacagcagtagactaagattcttaagactcaagttctagtcttatttattagctatgggaggccttgagggagttctagaattaagtgatctctctttataaaataggaacagtaataacttcctggctaactccctggctgtctcacaatgctgtagtagtaagaaataattttataattaaagactattttagggctgattacatttttgggcagtggctcatacatgtaatttcaacattttgggaggccaaggtgggcggattgcttgagcccaggaattcaagaccaggctgggcaacacagaccttgtcactacaaaagaaaaaaacattagctaggcgtggtgatgtatgcctgtggtcccagctactcaggaagctgagacaggaggatcacctggagcctgggaggtcgaggctacagtgagccatgatcanactactt

SEQ ID NO: 4955 - DNA, 1119 bp, Homo sapiens
gtctccgcgcccggcgctgggcggcgctcgggtgtctccggccgatcgctcggcgctcgggtccgcggccgctgcggcgccgggcatttctccgcagctcggctcgcggccgcgcccgccgccgcccggcccgcgcccatgcaggccatcaagtgcgtggtggtcggcgacggcgccgtggggaagacatgcttgctgatcagctacacgaccaacgccttccccggagagtacatccccaccgtttttgacaactactctgccaacgtgatggtggacgggaaaccagtcaacttggggctgtgggacacagcgggtcaggaggactacgatcggctgcggccactctcctacccccaaactgacgtctttctgatctgcttctctctggtgagcccggcctccttcgagaatgttcgtgccaagtggtacccggaggtgcggcaccactgcccccacacgcccatcctcctggtgggcaccaagctggacctccgcgacgacaaggacaccattgagcggctgcgggacaagaagctggcacccatcacctacccacagggcctggccatggcccgggagattggctctgtgaaatacctggagtgctcagccctgacccagcggggcctgaagacagtgtttgacgaggcgatccgcgcggtgctctgcccgcccccagtgaagaagccggggaagaagtgcaccgtcttctagagccctggcccacccgagcctgagggctggcggggagcagccctggacgtgtccgctgttgtgttgagacgtgtggtgtccctgagtcggctgtggggagcggtgggggtgggccggggggaagcatggggatgaggctgggtggcaggatcctgtcctctctgccgcctcattctggggtgtggctccagccttccctggcccccgccggaggccgggagggagcagggtctccctcagggctgcaggggcaggtgcagggaagccccaggatgggcttccctggagggggagggtgggggggagttctgttccttgtgccccgaggtggggcagccccttctcattttatacaataaacattctccacccaaaaaaaaaaaaaaaaaaaaaaaaaaaaaa

SEQ ID NO: 4956 - DNA, 469 bp, Homo sapiens
  misc_feature (427)..(427): n is a, c, g, or t
ggtctgctttgttcttaaatgtatcccatttggcacgtaatagacatcaaaaaatatttactggctaaaaggatgaatgaatatcatcaatgctccaaaaaagggtacttgattaatgaagcgttgtaagagagagcaaccagcttggggtagggggcagagcgcctagctctcctcgtggcaggtaacactagtggggttttcaaggaaggacagaaaacatctcctaagaaaaggaaggacattctacacatcagctggcctgtaattaaaagtgtcagtgtcatgaaagatgaaggaagaatgaagaatgcttctagaatgaaggagactggaaagatatgacagctgggtatgagtgatccctgaaccggatccctttttgcctataaaggacggttacctggaatacctggagaaaactttnaggggttttatcagtgaaggtttataggagttcttattttta

SEQ ID NO: 4957 - DNA, 6849 bp, Homo sapiens
cccgcccgcgggcaccatgacagctctgagcgctggggttacagactgtggttttgtgcttgctcaccaaagctaacctcagcatgctcaaaaggaagcagagttccagggtggaagcccagccagtcactgactttggtcctgatgagtctctgtcggataatgctgacatcctctggattaacaaaccatgggttcactctttgctgcgcatctgtgccatcatcagcgtcatttctgtttgtatgaatacgccaatgaccttcgagcactatcctccacttcagtatgtgaccttcactttggatacattattgatgtttctctacacggcagagatgatagcaaaaatgcacatccggggcattgtcaagggggatagttcctatgtgaaagatcgctggtgtgtttttgatggatttatggtcttttgcctttgggtttctttggtgctacaggtgtttgaaattgctgatatagttgatcagatgtcaccttggggcatgttgcggattccacggccactgattatgatccgagcattccggatttatttccgatttgaactgccaaggaccagaattacaaatattttaaagcgatcgggagaacaaatatggagtgtttccatttttctacttttctttctacttctttatggaattttaggagttcagatgtttggaacatttacttatcactgtgttgtaaatgacacaaagccagggaatgtaacctggaatagtttagctattccagacacacactgctcaccagagctagaagaaggctaccagtgcccacctggatttaaatgcatggaccttgaagatctgggacttagcaggcaagagctgggctacagtggctttaatgagataggaactagtatattcaccgtctatgaggccgcctcacaggaaggctgggtgttcctcatgtacagagcaattgacagctttccccgttggcgttcctacttctatttcatcactctcattttcttcctcgcctggcttgtgaagaacgtgtttattgctgttatcattgaaacatttgcagaaatcagagtacagtttcaacaaatgtggggatcgagaagcagcactacctcaacagccaccacccagatgtttcatgaagatgctgctggaggttggcagctggtagctgtggatgtcaacaagccccagggacgcgccccagcctgcctccagaaaatgatgcggtcatccgttttccacatgttcatcctgagcatggtgaccgtggacgtgatcgtggcggctagcaactactacaaaggagaaaacttcaggaggcagtacgacgagttctacctggcggaggtggcttttacagtactttttgatttggaagcacttctgaagatatggtgtttgggatttactggatatattagctcatctctccacaaattcgaactactactcgtaattggaactactcttcatgtatacccagatctttatcattcacaattcacgtactttcaggttctccgagtagttcggctgattaagatttcacctgcattagaagactttgtgtacaagatatttggtcctggaaaaaagcttgggagtttggttgtatttactgccagcctcttgattgttatgtcagcaattagtttgcagatgttctgctttgttgaagaactggacagatttactacgtttccgagggcatttatgtccatgttccagatcctcacccaggaaggatgggtggacgtaatggaccaaactctaaatgctgtgggacatatgtgggcacccgtggttgccatctatttcattctctatcatctttttgccactctgatcctcctgagtttgtttgttgctgttattttggacaacttagaacttgatgaagacctaaagaagcttaaacaattaaagcaaagtgaagcaaatgcggacaccaaagaaaagctccctttacgcctgcgaatctttgaaaaatttccaaacagacctcaaatggtgaaaatctcaaagcttccttcagattttacagttcctaaaatcagggagagttttatgaagcagtttattgaccgccagcaacaggacacatgttgcctcctgagaagcctcccgaccacctcttcctcctcctgcgaccactccaaacgctcagcaattgaggacaacaaatacatcgaccaaaaacttcgcaagtctgttttcagcatcagggcaaggaaccttctggaaaaggagaccgcagtcactaaaatcttaagagcttgcacccgacagcgcatgctgagcggatcatttgaggggcagcccgcaaaggagaggtcaatcctcagcgtgcagcatcatatccgccaagagcgcaggtcactaagacatggatcaaacagccagaggatcagcaggggaaaatctcttgaaactttgactcaagatcattccaatacagtgagatatagaaatgcacaaagagaagacagtgaaataaagatgattcaggaaaaaaaggagcaagcagagatgaaaaggaaagtgcaagaagaggaactcagagagaaccacccatacttcgataagccactgttcattgtcgggcgagaacacaggttcagaaacttttgccgggtggtggtccgagcacgcttcaacgcatctaaaacagaccctgtcacaggagctgtgaaaaatacaaagtaccatcaactttatgatttgctgggattggtcacttacctggactgggtcatgatcatcgtaaccatctgctcttgcatttccatgatgtttgagtccccgtttcgaagagtcatgcatgcacctactttgcagattgctgagtatgtgtttgtgatattcatgagcattgagcttaatctgaagattatggcagatggcttatttttcactccaactgctgtcatcagggacttcggtggagtaatggacatatttatatatcttgtgagcttgatatttctttgttggatgcctcaaaatgtacctgctgaatcgggagctcagcttctaatggtccttcggtgcctgagacctctgcgcatattcaaactggtgccccagatgaggaaagttgttcgagaacttttcagcggcttcaaggaaatttttttggtctccattcttttgctgacattaatgctcgtttttgcaagctttggagttcagctttttgctggaaaactggccaagtgcaatgatcccaacattattagaagggaagattgcaatggcatattcagaattaatgtcagtgtgtcaaagaacttaaatttaaaattgaggcctggagagaaaaaacctggattttgggtgccccgtgtttgggcgaatcctcggaactttaatttcgacaatgtgggaaacgctatgctggcgttgtttgaagttctctccttgaaaggctgggtggaagtgagagatgttattattcatcgtgtggggccgatccatggaatctatattcatgtttttgtattcctgggttgcatgattggactgaccctttttgttggagtagttattgctaatttcaatgaaaacaaggggacggctttgctgaccgtcgatcagagaagatgggaagacctgaagagccgactgaagatcgcacagcctcttcatcttccgcctcgcccggataatgatggttttagagctaaaatgtatgacataacccagcatccattttttaagaggacaatcgcattactcgtcctggcccagtcggtgttgctctctgtcaagtgggacgtcgaggacccggtgaccgtacctttggcaacaatgtcagttgttttcaccttcatctttgttctggaggttaccatgaagatcatagcaatgtcgcctgctggcttctggcaaagcagaagaaaccgatacgatctcctggtgacgtcgcttggcgttgtatgggtggtgcttcactttgccctcctgaatgcatatacttacatgatgggcgcttgtgtgattgtatttaggtttttctccatctgtggaaaacatgtaacgctaaagatgctcctcttgacagtggtcgtcagcatgtacaagagcttctttatcatagtaggcatgtttctcttgctgctgtgttacgcttttgctggagttgttttatttggtactgtgaaatatggggagaatattaacaggcatgcaaatttttcttcggctggaaaagctattaccgtactgttccgaattgtcacaggtgaagactggaacaagattatgcatgactgtatggttcagcctccgttttgtactccagatgaatttacatactgggcgacagactgtggaaattatgctggggcacttatgtatttctgttcattttatgtcatcattgcctacatcatgctaaatctgcttgtagccataattgtggagaatttctccttgttttattccactgaggaggaccagcttttaagttacaatgatcttcgccactttcaaataatatggaacatggtggatgataaaagagagggggtgatccccacgttccgcgtcaagttcctgctgcggctactgcgtgggaggctggaggtggacctggacaaggacaagctcctgtttaagcacatgtgctacgaaatggagaggctccacaatggcggcgacgtcaccttccatgatgtcctgagcatgctttcataccggtccgtggacatccggaagagcttgcagctggaggaactcctggcgagggagcagctggagtacaccatagaggaggaggtggccaagcagaccatccgcatgtggctcaagaagtgcctgaagcgcatcagagctaaacagcagcagtcgtgcagtatcatccacagcctgagagagagtcagcagcaagagctgagccggtttctgaacccgcccagcatcgagaccacccagcccagtgaggacacgaatgccaacagtcaggacaacagcatgcaacctgagacaagcagccagcagcagctcctgagccccacgctgtcggatcgaggaggaagtcggcaagatgcagccgacgcagggaaaccccagaggaaatttgggcagtggcgtctgccctcagccccaaaaccaataagccattcagtgtcctcagtcaacttacggtttggaggaaggacaaccatgaaatctgtcgtgtgcaaaatgaaccccatgactgacgcggcttcctgcggttctgaagttaagaagtggtggacccggcagctgactgtggagagcgacgaaagtggggatgaccttctggatatttaggtggatgtcaatgtagatgaatttctagtggtggaaaccgttttctaataatgtccttgattgtccagtgagcaatctgtaattgatctataactgaattccagcttgtcacaagatgtttataaattgattttcatcctgccacagaaaggcataagctgcatgtatgatgggttactatcaatcattgctcaaaaaaatttttgtataatgacagtactgataatattagaaatgataccgcaagcaaatgtatatcacttaaaaatgtcatatattctgtctgcgtaaactaaggtatatattcatatgtgctctaatgcagtattatcaccgccccgcaaaagagtgctaagcccaaagtggctgatatttagggtacaggggttatagctttagttcacatctttcccatttccactagaaatatttctcttgagagaatttattatttatgattgatctgaaaaggtcagcactgaacttatgctaaaatgatagtagttttacaaactacagattctgaattttaaaaagtatcttctttttctcgtgttatatttttaaatatacacaagacatttggtgaccagaacaagttgatttctgtcctcagttatgttaatgaaactgttgcctccttctaagaaaattgtgtgtgcaagcaccaggcaaagaaatggactcaggatgcttagcggtttaaaacaaacctgtagataaatcacttgagtgacatagttgcgcaaagatgttaagtttcttaagaaaccttttaataactgagtttagcaaaaagaataaaactatatagctcaatttatttaaaaaaatctttgcatgtgtgatgttatcattggcttcatttcttacccaaggtatgtctgttttgccataaatcagcagagtcatttcattctgggtgatcctgacacaccattgctatgttagatttgaaatgacatctctgttaaaagaatcttctatggaaataatggtgccctgcaaaatcttcctctgaactcacaggttagggatcacacaacttacttaatcgttttttgtttttgttttttttccttatatgtcaatggcccatgtcctccgggaaaattagaaaagcaaaatgattacaaagtgctgttagatttcttgtgctgggccagccaagtagaagtggacttgacttggacctttaactattttattacagattggacatttgctgttcagatgttttttaacagagggattatctcagaatcctgtgacctccaggttgttttataatctatttttctctatttaacattcctcagatagataggcaaataggacattccttctgtgtcacagaagtatcgtggtagtggcagtctacagtttatatgattcattgtaactatgagataaagaacaaccagtcatgtggccaaaaggattagatttgatttgatgttcacttggagtttactttttgtacatacaagataaaataaatattggatttgtaaaataaaaaaaaaaaaaaaaaaaaaaaaaaaaaaaa

SEQ ID NO: 4958 - DNA, 1367 bp, Homo sapiens
  misc_feature (1215)..(1269): n is a, c, g, or t
tgtgtaagtataggcaagaatttgcggagaatctggggaaggatatggcggggtaattgggaccgcattgtgcgcgagtgagaaaattcggctttgtgccggtggaaggcttagagaacgccggtataggaaattattccccaattttgtgcggccccgacagggattaagggggttcctttcacgagaggtttgcccaagggtaagggggttcttccccgggggaagggcttttaaaaaggtgcgggccagacgggggggggtgataattcgggcgcccttattggggcccctttttggcaagaaaaggtgggagggcttaaaactggggcccctgggaggcgatattgtggagcggcgcccccattgggaagggtagttgtccatcatccagaaatgggttttattctcagccgagggacagcaggactggtagaaactgtcaggccacacggctgcctgcacagcacccccatgcttggtagggggtgggagggatggcgggggctggctgtccacaggccgggcatgacaaggaggctcactggaggtggcacactttggagtgggatgtcgggggacagcgttctctggtagttgggccacaagactccacaaggatagcacagtgactgattcccagcgctagaggcgaggcggttggccatgtgtaggtgtgtatatatatgagtatttatagatatttatagaacagggcaagggcataccacagaaggggcacaagttttcaccaacggtcacacctgaatgtatcagctcaccactacaacagattaagtcacagatgaagggggctggctttggggctgggggagccactgtcaagtcacagaacagccgtccaggcaggcttggaaagggaggtctccgagaagaggagggatctgtttagaggtcgaaggggggcctggggctctcaggacgggatggacttgcctgacccgatcggctggctgacgctcctcggggcactgatagtgattctggggaccccgggcggggcgcggttggggcgcgagggcacctgagggggagggccgaaagggtcaggggaagcccccggcctggagggcacggggggcgccccccccagggcggacccagcaggcggaggcccaggagcagggccccgcgacccgggccgggctgggggcacggcgggggctcggcgctgcggcgtggggctggacgtgnnnnnnnnnnnnnnnnnnnnnnnnnnnnnnnnnnnnnnnnnnnnnnnnnnnnnnnacgggcgggggcatgggcgtgctgacggtggtcgtgttgatgttgccgatgatgctgagcgcctccttcagtgcgtggtacatgcgcagcatctcgtc

SEQ ID NO: 4959 - DNA, 1885 bp, Homo sapiens; identical to SEQ ID NO: 226

SEQ ID NO: 4960 - DNA, 7826 bp, Homo sapiens
  misc_feature (112)..(208): n is a, c, g, or t
  misc_feature (422)..(533): n is a, c, g, or t
  misc_feature (618)..(860): n is a, c, g, or t
  misc_feature (881)..(905): n is a, c, g, or t
  misc_feature (974)..(1088): n is a, c, g, or t
  misc_feature (1094)..(1117): n is a, c, g, or t
  misc_feature (1163)..(1198): n is a, c, g, or t
  misc_feature (1301)..(1440): n is a, c, g, or t
  misc_feature (1815)..(1872): n is a, c, g, or t
  misc_feature (2102)..(2168): n is a, c, g, or t
  misc_feature (3591)..(3605): n is a, c, g, or t
  misc_feature (4589)..(4630): n is a, c, g, or t
  misc_feature (4830)..(4856): n is a, c, g, or t
  misc_feature (4867)..(4881): n is a, c, g, or t
  misc_feature (4917)..(4968): n is a, c, g, or t
  misc_feature (5071)..(5133): n is a, c, g, or t
  misc_feature (6219)..(6242): n is a, c, g, or t
  misc_feature (6259)..(6284): n is a, c, g, or t
  misc_feature (6408)..(6428): n is a, c, g, or t
  misc_feature (6594)..(6646): n is a, c, g, or t
  misc_feature (7335)..(7335): n is a, c, g, or t
ccagcaccccggggctgcgcactgcagctccccaggccacccaccacccttctggtctctgagcccaggatgcgaggatggccagaccatctctgtgcaccctggctcgtcnnnnnnnnnnnnnnnnnnnnnnnnnnnnnnnnnnnnnnnnnnnnnnnnnnnnnnnnnnnnnnnnnnnnnnnnnnnnnnnnnnnnnnnnnnnnnnnnngatggagattgaggagcccgaacggaagccacgaagtgacttggaggctggcaagaacctacccatgatctacggagaccccccgccggaggtcatcggcatccccctggaggacctggatccctactacagcaataagaagaccttcatcgtactcaacaagggcaaggccatcttccgcttctccgccacacctgctctctacctgctgagnnnnnnnnnnnnnnnnnnnnnnnnnnnnnnnnnnnnnnnnnnnnnnnnnnnnnnnnnnnnnnnnnnnnnnnnnnnnnnnnnnnnnnnnnnnnnnnnnnnnnnnnnnnnnnnnccgcctccctggtccaagaatgtggagtacaccttcacagggatctacacctttgagtccctcatcaagatactggcccgaggcnnnnnnnnnnnnnnnnnnnnnnnnnnnnnnnnnnnnnnnnnnnnnnnnnnnnnnnnnnnnnnnnnnnnnnnnnnnnnnnnnnnnnnnnnnnnnnnnnnnnnnnnnnnnnnnnnnnnnnnnnnnnnnnnnnnnnnnnnnnnnnnnnnnnnnnnnnnnnnnnnnnnnnnnnnnnnnnnnnnnnnnnnnnnnnnnnnnnnnnnnnnnnnnnnnnnnnnnnnnnnnnnnnnnnnnnnnnnnnnnnnnagcgtctttgcgctggtaggnnnnnnnnnnnnnnnnnnnnnnnnnaggcagaagtgtgtgcgctggcccccgccgttcaacgacaccaacaccacgtggtacagcaatgacacnnnnnnnnnnnnnnnnnnnnnnnnnnnnnnnnnnnnnnnnnnnnnnnnnnnnnnnnnnnnnnnnnnnnnnnnnnnnnnnnnnnnnnnnnnnnnnnnnnnnnnnnnnnnnnnnnnntgggannnnnnnnnnnnnnnnnnnnnnnncttctacttcctggagggctccaacgatgccctgctctgtgggaannnnnnnnnnnnnnnnnnnnnnnnnnnnnnnnnnnngtgcatcaagaccgggcggaaccccaactatggctacaccagctatgacaccttcagctgggccttcttggctctcttccgcctcatgacacaggactattgnnnnnnnnnnnnnnnnnnnnnnnnnnnnnnnnnnnnnnnnnnnnnnnnnnnnnnnnnnnnnnnnnnnnnnnnnnnnnnnnnnnnnnnnnnnnnnnnnnnnnnnnnnnnnnnnnnnnnnnnnnnnnnnnnnnnnnnnnnnnaggccaccctggccgaggataaggagaaagaggaggagtttcagcagatgcttgagaagttcaaaaagcaccaggaggagctggagaaggccaaggccgcccaagctctggaaggtggggaggcagatggggacccagcccatggcaaagactgcaatggcagcctggacacatcgcaaggggagaagggagccccgaggcagagcggcagcggagacagcggcatctccgacgccatggaagaactggaagaggcccaccaaaagtgcccaccatggtggtacaagtgcgcccacaaagtgctcatatgggactgctgcgccccgtggctgaagttcaagaacatcatccacctgatcgtcatggacccgttcnnnnnnnnnnnnnnnnnnnnnnnnnnnnnnnnnnnnnnnnnnnnnnnnnnnnnnnnnnattaccccatgacggagcactttgacaacgtgctcactgtgggcaacctggtcttcacaggcatcttcacagcagagatggttctgaagctgattgccatggacccctacgagtatttccagcagggttggaatatcttcgacagcatcatcgtcaccctcagcctggtagagctaggcctggccaacgtacagggactgtctgtgctacgctccttccgtctgctgcgnnnnnnnnnnnnnnnnnnnnnnnnnnnnnnnnnnnnnnnnnnnnnnnnnnnnnnnnnnnnnnnnnnnggggcgctgggtaacctgacgctggtgctggctatcatcgtgttcatcttcgccgtggtgggcatgcagctgtttggcaagagctacaaggagtgcgtgtgcaagattgccttggactgcaacctgccgcgctggcacatgcatgatttcttccactccttcctcatcgtcttccgcatcctgtgcggggagtggatcgagaccatgtgggactgcatggaggtggccggccaagccatgtgcctcaccgtcttcctcatggtcatggtcatcggcaatcttgtggtcctgaacctgttcctggctctgctgctgagctccttcagcgccgacagtctggcagcctcggatgaggatggcgagatgaacaacctgcagattgccatcgggcgcatcaagttgggcatcggctttgccaaggccttcctcctggggctgctgcatggcaagatcctgagccccaaggacatcatgctcagcctcggggaggctgacggggccggggaggctggagaggcgggggagactgcccccgaggatgagaagaaggagccgcccgaggaggacctgaagaaggacaatcacatcctgaaccacatgggcctggctgacggccccccatccagcctcgagctggaccaccttaacttcatcaacaacccctacctgaccatacaggtgcccatcgcctccgaggagtccgacctggagatgcccaccgaggaggaaaccgacactttctcagagcctgaggatagcaagaagccgccgcagcctctctatgatgggaactcgtccgtctgcagcacagctgactacaagccccccgaggaggaccctgaggagcaggcagaggagaaccccgagggggagcagcctgaggagtgcttcactgaggcctgcgtgcagcgctggccctgcctctacgtggacatctcccagggccgtgggaagaagtggtggactctgcgcagggcctgcttcaagattgtcgagcacaactggttcgagaccttcattgtcttcatgatcctgctcagcagtggggctctggccttcgaggacatctacattgagcagcggcgagtcattcgcaccatcctagaatatgccgacaaggtcttcacctacatcttcatcatggagatgctgctcaaatgggtggcctacggctttaaggtgtacttcaccaacgcctggtgctggctcgacttcctcatcgtggatgtctccatcatcagcttggtggccaactggctgggctactcggagctgggacccatcaaatccctgcggacactgcgggccctgcgtcccctgagggcactgtcccgattcgagggcatgagggtggtggtgaacgccctcctaggcgccatcccctccatcatgaatgtgctgcttgtctgcctcatcttctggnnnnnnnnnnnnnnnatgggtgtcaacctgtttgccggcaagttctactactgcatcaacaccaccacctctgagaggttcgacatctccgaggtcaacaacaagtctgagtgcgagagcctcatgcacacaggccaggtccgctggctcaatgtcaaggtcaactacgacaacgtgggtctgggctacctctccctcctgcaggtggccaccttcaagggttggatggacatcatgtatgcagccgtggactcccgggagaaggaggagcagccgcagtacgaggtgaacctctacatgtacctctactttgtcatcttcatcatctttggctccttcttcaccctcaacctcttcattggcgtcatcattgacaacttcaaccagcagaagaagaagttaggggggaaagacatctttatgacggaggaacagaagaaatactataacgccatgaagaagcttggctccaagaagcctcagaagccaattccccggccccagaacaagatccagggcatggtgtatgacctcgtgacgaagcaggccttcgacatcaccatcatgatcctcatctgcctcaacatggtcaccatgatggtggagacagacgaccagagccagctcaaggtggacatcctgtacaacatcaacatgatcttcatcatcatcttcacaggggagtgcgtgctcaagatgctcgccctgcgccagtactacttcaccgttggctggaacatctttgacttcgtggtcgtcatcctgtccattgtgggccttgccctctctgacctgatccagaagtacttcgtgtcacccacgctgttccgtgtgatccgcctggcgcggattgggcgtgtcctgcggctgatccgcggggccaagggcatccggacgctgctgttcgccctcatgatgtcgctgcctgccctcttcaacatcggcctcctcctcttcctggtcatgttcatctactccatcttcggcatgtccaacttnnnnnnnnnnnnnnnnnnnnnnnnnnnnnnnnnnnnnnnnnncttcgagaccttcggcaacagcatcatctgcctgttcgagatcaccacgtcggccggctgggacgggctcctcaaccccatcctcaacagcgggcccccagactgtgaccccaacctggagaacccgggcaccagtgtcaagggtgactgcggcaacccctccatcggcatctgcttcttctgcagctatatcatcatcnnnnnnnnnnnnnnnnnnnnnnnnnnnatcgccatcannnnnnnnnnnnnnnatgtggccacagaggagagcagcgagccccttggtnnnnnnnnnnnnnnnnnnnnnnnnnnnnnnnnnnnnnnnnnnnnnnnnnnnnccacccagttcatcgcctacagccgcctctcagacttcgtggacaccctgcaggaaccgctgaggattgccaagcccaacaagatcaagctcatcacactggnnnnnnnnnnnnnnnnnnnnnnnnnnnnnnnnnnnnnnnnnnnnnnnnnnnnnnnnnnnnnnnaggtcctgggtgactctggggaaatggacgccctcaagcagaccatggaggagaagttcatggcagccaacccctccaaggtgtcctacgagcccatcaccaccaccctcaagaggaagcacgaggaggtgtgcgccatcaagatccagagggcctaccgccggcacctgctacagcgctccatgaagcaggcatcctacatgtaccgccacagccacgacggcagcggggatgacgcccctgagaaggaggggctgcttgccaacaccatgagcaagatgtatggccacgagaatgggaacagcagctcgccaagcccggaggagaagggcgaggcaggggacgccggacccactatggggctgatgcccatcagcccctcagacactgcctggcctcccgcccctcccccagggcagactgtgcgcccaggtgtcaaggagtctcttgtctagcaggcagcatcggggtggccccactgagtctcggcatagtccccagagctcccccgtggtgcctgcacacagagtgagggaggagggctttgaatctgggactgtgcctggctccctgatgggggacagggatttggccacactggggctgacacccaggcccgagcgcctgcgttcccagaccatgggaaatgggaattgcgctcaggggctccatgctgggtctgaggcccctgcctccaagatttaacctgcaagttgctctgacctcctctgggccctgtcgcccctccttttggcctgggggaggtcagaacattcgaatctctgcccctcacttgaggaggagctggcctgcggtggagggatcagttgccccccatcaccagagtcttaagggtcactggcctctccccaggaagtgggctcagacccccctcagccccagcccagacaaagatgtcttaacctcagggagtgcagacacctaaccccagggcactgccagcccaccacctttgtctctggggtgcagcttcacccaccaggccagctcaggaattccctggaaaagggaaatgtgactggttcagaaatagctcctcaaagcctcaaaacctgattggccacnnnnnnnnnnnnnnnnnnnnnnnnatggtgactcctgaaannnnnnnnnnnnnnnnnnnnnnnnnngtagctcccctggctggctcctaggggaagagcagaaggaaggatgccacttgggaatgaattgtccttttctaggaagcacgggggagtgagacaggctgggtcctgccagctggatcgctgnnnnnnnnnnnnnnnnnnnnncctgagcgggagtcagggacctgctgctcagtaagaagattctcgccccttccctctctccctgcctcactcctccgtgagcaccaccagggctccaggagcctcatccagcctcagagatctcccttctcatctccccacgccccgtctctttctcacctttccnnnnnnnnnnnnnnnnnnnnnnnnnnnnnnnnnnnnnnnnnnnnnnnnnnnnnatttcgaccctggggcgtgcagcagggaaggcccaactggttcaggctcaaccttccaacttcctgtggcctgaagaagcacttctgctgcatcgctgttctgggcatggcagggccaggcctctgctggctcaggaggaggggtgagagacctgctcaggcgtcgctggatttattcacttgtgtgtgtacctgtggctgtgtgtctgcttgtatgcttttataggcctgtgtgtatagctgtgtgtgtgttcaagtgcgtgactgtatgtgtgtgtgtgaaccactgtgtgaaccactgtgtactggagcctgcattatgcacgtgtctgggtatctttgtatatatgtgtatatatgtgtgccctggactgtttcaaggtccatggagtacggctggtgtgtcatactgtgcaggcctgtccctgggagtgttcccgtgcctgggagagtggacctgtgctgtgagtgtgtggatgcgtgtgaacgcatgtggtaaggtgtgtactcagggcattctgttggcctaagtgcctcttctttttcttcttgtttctcatgaaaagtttgattaaaattcaggaagcagcaaaaccttcaaaacaagacatgtatgtgtgcttgagtgtgtgaacacgtgtgtgtgtgtgcacatctacatgccatgcctatgggccagagtagtgttnattgtcccccatgctatctcacctgcttcccagtcctgcctgaacagccctctctctcactcccctctcctccccttcctgtttctcgttgtcacacccatggcctcagccctgctccctgcctcctgcctatgtctcctctatggaaggaggcctccactccttccatctcttccttcagaagtttcgtctaatgggggcagtctccccttcctggcacattgcccctctgccttgccctcctgggccctgggctggcacagcccctggagcctcagaaatctgtttgattggatattctcctcggactgtgtgcaggttgcagaggaagagtagatgagccgggtccggcctctccctgcctgtggcccctcccctgcagacggatgcccattcctgcctggtccagtggggaacaggtcccacgccaggccagcaggcgggctcctttgtacagttcttacaataaaccctccttggtgcctctggac

SEQ ID NO: 4961 - DNA, 5247 bp, Homo sapiens
  misc_feature (73)..(73): n is a, c, g, or t
  misc_feature (75)..(75): n is a, c, g, or t
  misc_feature (77)..(77): n is a, c, g, or t
  misc_feature (79)..(80): n is a, c, g, or t
  misc_feature (83)..(84): n is a, c, g, or t
  misc_feature (87)..(87): n is a, c, g, or t
  misc_feature (1438)..(1438): n is a, c, g, or t
  misc_feature (1470)..(1470): n is a, c, g, or t
  misc_feature (1693)..(1762): n is a, c, g, or t
  misc_feature (2000)..(2015): n is a, c, g, or t
  misc_feature (2927)..(2927): n is a, c, g, or t
  misc_feature (4768)..(4784): n is a, c, g, or t
ataaaagaaacaataaatcgttcgaatcaacatgtccgcctttggcacttcggtttgctagctgtttttgtcncnananntannatnaggcaaacttttttttttttttttttttttcaaataaaccttttatttacaggcaaaggatatagtacaagaagaaaaagagaatacagatgacatcgggggtccaagagacattccatatttaagcttcataatgtccttatttgcacacatataccacactgccttcattttctccagctgatagatttgtgtaagaaatcttgactttgagagttcaatgtcattcccaacagggtctttatgtctgtctggtcatgttatcagccagtcttacttaatgtattaggccagttggaaaccatcattaaagaaactgaccctggtgatcaccagagtagtttcagactataaacaacacatcataaatcccactgcccttatcttggcccaaagacaaaactggacattctgatgaccccagagattatgacagtgttttctggtctaattaaaccatagtcttcatatacctttaccacgcctccttcctccaattaggaagctaagtgggtaagaaagaaaaaataaaggcagagcataacgatgtcacccatctttggcctcttagccggagctgatccttacatgggcagtagactataagtgtgttaattatttttcctactgcagagcttcttcacgttggaatggtgaataggtacacatttctcaaagctcaaagtgcaagtctaggtatattctctagtttcaatcttggtgaaatttttttctatgaattcattactttttagtttatttcagggagggggtggtgttttttaatgaattaatacaagtgtcagcatctttcatggacatccagacaatttcttaaagatgggagaggtaaaaaatcttcaggagaaactgtgcctgaactgtgagtatccagaagccattgaccatgttaatggtggagccaatatgaagtacttgctaaatcatgtggtgcgtgaaaggaagagcaatgttataattgcatcctcctaaagactacataaccatcatcactcatcatctctccctggtcccttccacctgccaaacccccataaaaacccataattgatgatacatattagtttataattaacggcgtacctaactgttctctactagtctgagcctctgtacagagaaatgtcagttttgtattcctggttcctggaaaagtacatatagaatagtataaatacaataaatgtttgaattatcgtataacttgagtctaaattttaagttagtatcctgtattaagaactgggttgatcaaatggttctttctttgcacatatcaaggctttcgactattcccaatcaggtcttcccaaatttgggcatattcctngcctctgcctaccctgttctaatttggcactnctaaagatagttcataaaaagcaagccaaagatagaaaagagagctaaggctacaggaggaatttactctttaacatttgggggaaggaaaatgaggcttgtctacagcagggactggctgtcttccagaaatggtttcccaaggtgttccctacctctctttttcttggatatctttttgcattatagatagccttgggaagggtgtcacctttatcctatnnnnnnnnnnnnnnnnnnnnnnnnnnnnnnnnnnnnnnnnnnnnnnnnnnnnnnnnnnnnnnnnnnnnnnggggcctgggaaaggagaaaaggaccaggagagaggaaggtatacttattgcagaggagaaaagccaaagaacgtttgcccatgggcagtcttagctatttaaaatcacccacttcttcatccggctcccttggcatatgtatcagcccatggattgggaggtgtaggaccattctttttctttctggaaggaaagcactgacatttaagcctgtgcggtctgctcaggggctgcccnnnnnnnnnnnnnnnntaggatattagagagattacgcatttgtggtctcaagttaggaaactgttgaagaacaaatatgtcccttattagagggactctttagatgtttagggtactcacaatccttgccaacctgatgtccttggaagctccagtctggctgtaaggagatgatgaggggttctgtgtgttggaggtgatgacctcattgagtctcagccacagcagggcattatgcaggaaagaattcaatggagttatttaatacctttccctattcccacaaaaatctggaactgggttctgaactgagaagtctgggttccctgagaattggacatcagttcaaccacaggaagcctctaaatttagcactctactcacagagggccaagaaaaattcacaaatgtcacaaacttaggaacttaggtatctagtcttctctgtcattttgtaatgagaaactgaggcccataggtaaaacatctcacctccagtcacacaggtaagtacatggcagggcaaggacaggcacccagttttcccaagtccagtggccttttcatgatacccatttctgtgtatcatttcattgattctgtgacagctggccctttgccccacatcaccaaatcttaactctttggactttaataatgtgcaaaattaagaggaagtctggcatcgggagctttacacaactcagagagaactgaggaaagtagttagcatgttaactgtgcctcaccttgacctgaagtgaagagcactcaccaagccacaacctgctatctgcacaccccacaccatgaggtaaaggacagccaaggaagagaaaggaaagaaaagcaatccggcagggagatcagggagcgaaacgaacagagaaacgaacagaggttttttccaagggccttctattttgncttagcgtggtcgcggccgaggtactgagacacattaagaagggcccactgaggccatcattcaccctactctcgggctgcttccatcctccaggcttctagaagttgagaaagtatgagcttcattgttaattatattacagaaaatgggaccagctgggttgcacccactcccctgtgtctggacctcctgcctatgtagcagaaaaggatctttctgctgaattaatattcacctcagagccctgggagatgtctgatgaaaagtagtttttgaagagtcttgtgacaaccagcaatttcggcaaagctatgtcctcaagagtcttccagatttccccaactctacagaatgcttttctttttaaataccataatcccataatctttctcaaaaattataaaactgtattttatttttctcatttatttgggagtttggtaagaaacgtttgggaagaaatgcttttatggagaaactactcagatttgaaactacctagtttatactaccagaagacagagattcaggttagctagtttgctaatcctcacagtttcagagatatgccttgtatttttccagattataggctttgaggacattcaccaatagcatcctcctctgaatgtattttggtccttttgctaagctatgtcttattttatagtcctccaaatgatgatctatgacttctctgcctgctcattagaggaagaaaagctcagatgcattgctaactattatttcaatgccagtggaactggagaaatgcttgaaaaagtaatctcaggttgtaaaaaagaactatctttttttggttgcaggagctagaaccctattattctgagagtaaattttctattattcctatctaattcattttcttgggagatgaaactccctcttttttttggtggggagacagggtctcactttgtcacccaggatgatgatgatggagtgctgtggcacgatcacggcacactgaagcctcgacctcctaggctcaagcgattctctcacctcagcctcctgaatagctgggaccacagacacacaccaccttacccagctaattttttgtatttttttgtagagacagggttttgccgtgttgcccaggctggtctcgaagtcctgggctcaagcgacccgctcaccttggcctcccaaagtgctgggattacaggtgtgagcccctcactgctcctggctccctcattattatatttcctgaagttgacatgatttgggtcctttacttagaaattgtcatcacacaatttcagaaaggtaaagaaatccatttttattggcaacttttgggctatgcttcatcctggcaaaaatttaaaagcagtacacttcccgggcgtgcgctcgaactttcctgcacacctcaggcagcttgtacagactatccaagaaaaaatgaggaggaaagtgctccatcaaggaagagggatgagatgggagcataattcacacactaagaactgagttctaaagtcacttgagctttctggagctcagttacctgtaaaacaaggaagaatgaatggtctttatggaaaatgaatggcagaataagtgatttgtcaagttcattgaactataaattccatttttactgtcatttatttataacaaagttcagatataaagaaaaatctgaacatacagtaggcacagataaacctatagcaaatattcacatgtggtttgaatgcatttattaatctctgtacttattagaattaataataatactaaaatgatttggagaattaatgattaataacagtggaaaatagccttcccattattgttagaggannnnnnnnnnnnnnnnntaaatgcctatctgaggggaagctcataaatattacttgacaatattacttgataaatatttgttgaaaaaagaaatgtagtaaagaagcaaggatggctgggcatggtggagcatggctgtggtcccagctaacttgggatgctgaggtgggaggattgtttgagggaagctgagtttgcagtgagccaagattgcactactgcactgcagcctgggtgacagagtgagaccctctccaaaaaagaaaaaaaaaaagagaaaaagaagcagcagcaacgaaaggagggaggaagggagaaagtttactttgatatgccatatgattgaaacaaatgctcttttttcaaagacaaggattatactcctttgctttccagctactttggtccattgtaacttggtaacctttgccttgaaaacaaaaagaatccctggatataatctccttccttgtaattttt

SEQ ID NO: 4962 - DNA, 1552 bp, Homo sapiens
  misc_feature (1488)..(1544): n is a, c, g, or t
tagaaatttttactcggagtatgtaattcttgggtgacagttatttcaaaactaaaaatgttccacttctttctggcctctatagtttctggtgaagatccagtctttcaaagaattgttcacctgaatgaaatgtatcgtttttctctggctgatcttatttttcttggtctttagttttcagaagtttctttatgatgtgtctaagcttggactttgttgttaatttatccagttgtgtggttcactgagcttcttggtttgtaagtttatatctttttccaaactatcatctaatttatggactccatgctttgtcatttccattctgtttaagaatattcaccaatactttctgaaggctggttataaatagctgctttgaagtctgtatctgatcattccaatagttgaatcatctcaggatgggcatgtattgatcatcttcttttctcccatgttaagattttcctggttttcatacactgggttattttggataaccttccacaaggccagacaattcggtacgagggttgggaagcagccgtccccgtccagagtcctctgtggtccctgctgccaccatggccactcaccgcctcgtgatggtccggcacggcgagacgacatggaaccaggagaaccgtttctgtggctggttcgatgcagagctgagtgaaaaggggaccgaggaggccaagcggggagccaaggccatcaaggatgccaagatggagtttgacatctgctacacgtcagtgctgaagcgggccatccgaaccctctgggccatcctggacggcacggaccagatgtggctgcctgtggtgcgcacttggcgcttcaatgagcggcattacgggggcctcacaggcttcaacaaggcagaaacggccgccaagcacggggaggagcaggtaagatcttggaggcgctccttcgacatcccgccgcccccgatggacgagaagcacccctactacaactccattagcaaggagcgtcggtacgcaggcctgaagcccggggaactccccacctgcgagagcttcaaggacaccattgcccgggccctgcccttctggaacgaggagattgttccccagatcaaggccggcaagcgagtgctcattgcagcccacgggaacagcctgcggggcattgtcaagcacctggaagggatgtcagaccaggcgatcatggagctgaacctgcccacggggatccccattgtgtatgagctgaacaaggagctgaagcccaccaagcccatgcagttcctgggtgatgaggaaacggtgcggaaggccatggaggctgtggctgcccagggcaaggccaagtgaggggtgggctttgggcaataaaggcacctcccccaacaaaaaaaaaaaaaaaaaaaaaaaaaaaaaaaatttttttttttttttttttttttttaaaaaaaaaaaaaaaaaaaaaaaaaaaaaaaaaaaggggggcggnnnnnnnnnnnnnnnnnnnnnnnnnnnnnnnnnnnnnnnnnnnnnnnnnnnnnnnnnttatgact

SEQ ID NO: 4963 - DNA, 779 bp, Homo sapiens
  misc_feature (735)..(735): n is a, c, g, or t
  misc_feature (747)..(747): n is a, c, g, or t
cgattagcgatttttttttttttttttttttgttttaagtatttcatgtttttatttcaaaagaaaaaaggataccaagaagcagaagaatgaagcagttaaaaccagcaaagctgcaaagtaggaaagaaagctgagggagagattgatccgatttcaacgatgtggccacttaatgcaaacacaggggtctgatgctgcaaacctaagtcacatgagtccagtgacttcagcaggtccactgatccaccacagtgacagggccaggccccttcctgctgaatcctaactttacacattctagacacatgtcatgcacatacaggttacactttatggttacatgaaattgcatgcaattcacacagagaatcattttgaaggcactgtattttgcagcaggagctgctactttctggcaagtccttcctaggttggctcacaagtggtcctcctttttatttattcctatatgaaactttggtccaaaaatcaggtgcagtctgatcctaccctcccagctgttttagtttcatgtctcaccttctcttccacgttcccttcttaaacgtagatgtcaagcttagaagatgtttcctgacaatgagatcctgtttaattcagattttcaaacaacttgagtcaagcaagcaggagcttatagtatgttgatttaaaacaagttgttaccagtttcccttacccttgaattcggcaaggccccattattcacanattccatgatangatacatgaggttctgtatgcctcgtgccgaa

SEQ ID NO: 4964 - DNA, 6229 bp, Homo sapiens
  misc_feature (1185)..(1205): n is a, c, g, or t
  misc_feature (3670)..(3690): n is a, c, g, or t
  misc_feature (3698)..(3749): n is a, c, g, or t
  misc_feature (4563)..(4576): n is a, c, g, or t
  misc_feature (5590)..(5607): n is a, c, g, or t
ggaaaggaaaccggcactgcctgccggctttacatctgttgatctgacctgactggaagcgtccaaagagggacggctgtcagccctgcttgactgagaacccaccagctcatcccagacacctcatagcaacctatttatacaaagggggaaagaaacacctgagcagaatggaatcattatttttttcccaaggagaaaaccggggtaaagggagggaagcaattcaatttgaagtccctgtgaatgggctttcagaaggcaattaaagaaatccactcagagaggacttggggtgaaacttgggtcctgtggttttctgattgtaagtggaagcaggtcttgcacacgctgttggcaaatgtcaggaccaggttaagtgactggcagaaaaacttccaggtggaacaagcaacccaggttctgctgcaagcttgaaggagcctggagcgggagaaagctaacttgaacatgacctgttgcatttggcaagttctagcaacatgctcctaaggaagcgatacaggcacagaccatgcagactccagttcctcctgctgctcctgatgctgggatgcgtcctgatgatggtggcgatgttgcaccctccccaccacaccctgcaccagactgtcacagcccaagccagcaagcacagccctgaagccaggtaccgcctggactttggggaatcccaggattgggtactggaagctgaggatgagggtgaagagtacagccctctggagggcctgccaccctttatctcactgcgggaggatcagctgctggtggccgtggccttaccccaggccagaaggaaccagagccagggcaggagaggtgggagctaccgcctcatcaagcagccaaggaggcaggataaggaagccccaaagagggactggggggctgatgaggacggggaggtgtctgaagaagaggagttgaccccgttcagcctggacccacgtggcctccaggaggcactcagtgcccgcatccccctccagagggctctgcccgaggtgcggcacccactgtgtctgcagcagcaccctcaggacagcctgcccacagccagcgtcatcctctgtttccatgatgaggcctggtccactctcctgcggactgtacacagcatcctcgacacagtgcccagggccttcctgaaggagatcatcnnnnnnnnnnnnnnnnnnnnncaaggacaactcaagtctgctctcagcgaatatgtggccaggctggagggggtgaagttactcaggagcaacaagaggctgggtgccatcagggcccggatgctgggagccaccagagccaccggggatgtgctcgtcttcatggatgcccactgcgagtgccacccaggctggctggagcccctcctcagcagaatagctggtgacaggagccgagtggtatctccggtgatagatgtgattgactggaagactttccagtattacccctcaaaggacctgcagcgtggggtgttggactggaagctggatttccactgggaacctttgccagagcatgtgaggaaggccctccagtcccccataagccccatcaggagccctgtggtgcccggagaggtggtggccatggacagacattacttccaaaacactggagcgtatgactctcttatgtcgctgcgaggtggtgaaaacctcgaactgtctttcaaggcctggctctgtggtggctctgttgaaatccttccctgctctcgggtaggacacatctaccaaaatcaggattcccattcccccctcgaccaggagaccaccctgaggaacagggttcgcattgctgagacctggctggggtcattcaaagaaaccttctacaagcatagcccagaggccttctccttgagcaaggctgagaagccagactgcatggaacgcttgcagctgcaaaggagactgggttgtcggacattccactggtttctggctaatgtctaccctgagctgtacccatctgaacccaggcccagtttctctggaaagctccacaacactggacttgggctctgtgcagactgccaggcagaaggggacatcctgggctgtcccatggtgttggctccttgcagtgacagccggcagcaacagtacctgcagcacaccagcaggaaggagattcactttggcagcccacagcacctgtgctttgctgtcaggcaggagcaggtgattcttcagaactgcacggaggaaggcctggccatccaccagcagcactgggacttccaggagaatgggatgattgtccacattctttctgggaaatgcatggaagctgtggtgcaagaaaacaataaagatttgtacctgcgtccgtgtgatggaaaagcccgccagcagtggcgttttgaccagatcaatgctgtggatgaacgatgaatgtcaatgtcagaaggaaaagagaattttggccatcaaaatccagctccaagtgaacttaaagagcttatatatttcatgaagctgatccttttgtgtgtgtgctcctggtgttaggagagaaaaaagctctatgaaagaatataggaagtttctccttttcacaccttatttcattgactgctggctgctttaaaaaaaaaaaaaggatccattgtaccgttgtcttcatcactgggaaatgattattacatagtacagaagattctttgtttttctccactgagcacttaacaattgctttctctctggcctggacattctctggcagcacctccaggatacataaattcaatggatcaatttatttgtcttcaaatggccttaacttggattgtctgtttggccaaccatgaaaattaaagagtgaagcagatgtaatggcctgacattccaaaaactctgaattgggtttattagcacaaatgttgtgttcatttgttgagccatatctcagaagaaggaaagggagctacagaaaggaggtttaggattgcagagaagatgcaagagcactttggcccaattctccagctcaacccagcagctgaaaagcttcaagagatctaggaaaagacattttcatgttaatgagaatttccaccattgtagagaatttccttcctactgagaatctacctctattccccctgccctagctcttctctaacttggttaaccataaccataaccagattcccttgcaatcgatttctctttagtcgttggtgttagaagtaccagcacaatttgagcattcccattaacaaaggtgttcacagttgagaaactctcctgccgggcgcggtggctcatgcctgtaattccagcactttgggaggcagagttgggaggatcacctgatgtcaggggtttgagaccagcctggtcaacattgcaaaaccttgtctctactaaaaatacaaaaattagctgggcatggtggcgcatacctgtaatcccagctacttgggaggctgaggcaagagaatcgcttgaacccaggaggcagaggttgcagtgagctgagatcatgccattgcactccaacctgggtgacagagtgagactccatctcaaaaaaaaaaaaaaaaaaaaaaaaaaaaaaaaaaaaaaaaaaaaatttgcactgactggagcagaaacagcaacctttctaaaaaagcaaacctttttcctgggaggannnnnnnnnnnnnnnnnnnnnaattcttnnnnnnnnnnnnnnnnnnnnnnnnnnnnnnnnnnnnnnnnnnnnnnnnnnnnctgagcccatataactgtctggaacccccaaatgtgtccacaggttgaatgtccatgagtgtgggaagaacacggctcatctggagcacagctgaggctagtaagagctaaatgactttccttgctatgacttggcttacctgaattagctgtaagagttgccgaatgggatgggttctgctatttaataaacagcattcatattcatttttccccagatggagttacctacctttccacacggtcagcttagaaatcttcccctaaagatgctaacctcctttgggctgtctcagaacacagtatccttcaaataagaaaaactgagtgggaagtgcagtgtttccaaacaatacctatcataactacgtattcattgtctacctgctaagtcaagggttcactgcatttctccttcctcagaatacactctggacctgtgctgtctaatatggtagccactaacaaaatgtggccattttgatggaaatccattaaaaatcaaagaaaatttaaaactcaattcctcaattgggctggccacatttcaaatgctcactacccacctgtggctagggtctacttctactgtattggcgagcatggatatagaacatttcatcacagttctgttggaccaatctagatagattcattatcccatctagagaagagaactttagtcactgtcttcttgcttcagacccatctatatttaaaacaaatttccctaaatcctgagactgagatggagctacaaattctcagatggcgaccgtgtaaatggtattagcggctgaagaaaaaaaatttnnnnnnnnnnnnnntttttaactgaactttatcattggcattgtgggctttgaagttgctgggataaattaatataattaaataaaagactgaatttaattgcataaattgtattaggtggcaattaacaaaaggacccaagatggcttattgcctaattgggtgaacaaagcaagaatatggtgtttcttgcttccttaaccagctccatgatttattactttattgcagaagtggctgtcaactcagtccctggctggtatttacagacccttaatttaagtaaaacagatgcctccatttagttctagaaggaccttctcctttagtgtaaccaagtgttcaaattcccttcttctctatgaactcagcattcattttatccataatgatcaatttaaaagtagagaaacttgtcagttgagagatctgattcccaagagattggtttcacttgtctacctgaattttgtgattggattttgttgttcgttttttaagattgaattttgttaccacccccaccaagttcatcatcattattaactataccactggggagaacagagagaagtgtccggccagcggtctagagtcccacattcttcatgctgtattacaacagtaagagcagatatccttcctggagagggcctgacctgtatcctctttggttttaatgccatagatcccactggaaaattcagaattccaactaacaaagacatggtggttgaaaagtcctcagtgacaataatgatggcaccactgcagcagaacttgacattttagaggtcatgttattgtgcttaatgtgagggggttctattctctactgaaaggctatgaaaaagccagttgggcaccaagtgatctgtgaccagtcaccaaatttggacaaacaaaatgcaaacaagttgcatttttaaaaagcattcaaaaaaaaaaaaagaaaaaaacagggatagtgtgcataatatgtagagttgtgcaaacattgtgcaaaacattgatacaggctgccttgnnnnnnnnnnnnnnnnnnattatgcacactatttatgttgttctttcgaagttcttttaaaagtgcaattgtctgtgatcacttttgggcaaagcccaaagcacctacaagtcctgcctcgattattcaaataccttgatttgggcatatttcaaatgatatgtcaagcacaataaccaaggaggtgctatttccagaattctagacccctctaccattcctgtattaataatagtccctccattggataaagaaaatgtggcacatatacaccatggaatactatgcagccataaaaaagaatgagttcatgtcctttgcagggacatagatgaagctggaaaccatcattctcagcaaactaacacaggaacagaaaaccaaacaccacatgttctcactcatacatgggaattggacaatgagaacacatgggcaagggaagggagagcatcaggacaaatacctaatgcatgcagggcttaaaacctagatgatgggttgacaggttgataggtgcagcaaaggaccatggcacatgtattcctatgtaacaaacctgcacgttctgcacatgtattctagaacttaaagtaaaataaataataatagtccctccaatctcaagaaaaaaaaaaaa

SEQ ID NO: 4965 - DNA, 702 bp, Homo sapiens
tttttttttttttttttgggtggatcgggtgccatgctacgggctcatttattgggaccgacggcatctgggacattccatccaggagcactcacaggcccacagccagctgtgagacaggagggagaggtcgatgttgggacagacagaacaggtggtaggagctgagagggggttgttctgatgggggagatcaggaaagccctcctggggagggggctgggccgaccccatcccctccctgccacggctaagccactaaactacaccagagctgaggtacagctgagcttaaaatcagagctaagctaccgctgacattacactcataaaagacaggcaggagccctgcatggaccaacagaaggcgcggcgtcccgggcctgggaacttcctggcactccctccaatgtgagcatgccacagaccacagtcgtgttcatgagcctctgccccatcaggagcagaagtcacaggtgccttcaaatcacgcggtcgccacagccggcatctccacgcgtccttcctgctcagcgccgacgctgcagctgcacaggccttactctgtcacaccttggggtttgggatattctgttaactgctgctcgatgtaattattttccttgtggctccgtggatttggggctgatttaaagacattatttgagctgggcgcagtggtgtggcactttgggaggcttg

SEQ ID NO: 4966 - DNA, 567 bp, Homo sapiens; identical to SEQ ID NO: 235

SEQ ID NO: 4967 - DNA, 896 bp, Homo sapiens
tgagcgttggtctagtgggtccaccatgctgtcagtcagtttgggaaggaaacagagaagctcggcatggggtccaccatggcggttaatgaggactggaaggaagcagagaagtttggccaggtgtccaccatgctgcctcgcaggtggggaaggaggaagacagagtggtccaaggcctccatcatggcgttagtcaggctggaagggagggggggcagtttggccacgacattcaccacacagcagggcaggctgggaaagagggagacatagcagttcatggtgtccaacctggggtccacgaggccgggaaggaggcagggcagtttggccagggagttcaccatacccttgaacaggccgggaaggaagcagacaaagcggtccaagggttccacactggggtccaccaggctgggaaggaagcagagaaacttggccaaggggtcaaccatgctgctgacctaggctggaaaggagctcaaccacggcatggacaaggttgcccatgagatcaaccatggtattggacaagcaggaaaggaagcagagaagcttggccatggggtcaacaacgctgctggaccagctgctggatggcaaccatcaaagcggatcttccagccatcaaggaggggccacaaccacgccgttagcctctggggcctcggtcaacacgcctttcatcaaccttcccgccctgtggaggagcgtcgccaacatcatgccctaaactggcatccggccttgctgggagaataatgtcgccgttgtcacatcagctgacatgacctggaggggttgggggtgggggacaggtttctgaaatccctgaagggggttgtactgggatttgtgaataaacttgatacactaaaaaaaaaaaaaaaaaa

SEQ ID NO: 4968 - DNA, 1736 bp, Homo sapiens
  misc_feature (297)..(377): n is a, c, g, or t
  misc_feature (543)..(568): n is a, c, g, or t
aattctcctagagatctcttagagatctttcacctccctggttagctgtattcctaggtattttattttttctgtgtgtagcaattatgaatgggattatgttcttcatttgactctctgctttactgctaggaatttttgcacattgattttgtatgctaagactttgctaaagtttatcagcagaaggagctttggggctaagactatggggttttctagatatagaatcatgtcatctgtaaacagagacagtttgatttcctgtctattcctctcttccctcctctatttggnnnnnnnnnnnnnnnnnnnnnnnnnnnnnnnnnnnnnnnnnnnnnnnnnnnnnnnnnnnnnnnnnnnnnnnnnnnnnnnnncttccgactagaagtgcgagaggggccagtgttgttgttacctgaaaggtaagtgcagcccacaaaaatgcagtgaagaagaagatatatgcatatgtttaagttaatacaattgggatacatttagcagacagaatcaatagagttgatgagtgactgactggannnnnnnnnnnnnnnnnnnnnnnnnnggtttttgacttgggcaaccgggcactcaagaaggaaaaagaggatccagggagaggaacttttctgaggactggggtagggctgaacagctgcattcgagactggtggagggtgggctgggcatgggatgcacaaatggaaattccactgggtctgcagctcacacataggcatgaccagcatagagatagagaggccccagtgctgctgagtaactgtgattccccaggtgatggcatcagctgagaagggaaggaagcccatgtgaggacactgaagaaggagtgagcagacaataagaagcccacagaagacagagaaggaacaactagagggagaagccaaggcaggcatgtgtgataacatataggaactgagggagaggacatttcaagatggaggggatgccatacaacaggactatgtgatggtttttggctgtgtccataggaagtcacaacaggcaagggaaagaaaccagaacccagtcatggagttaagaagtgagtcagagaggagatgggtagggacagtgaggtaaggcctctttctaaggaagtttggctgaaggatagactagctggacatatgctggctgtgtggggtagagggaggaatgatggagggtaggagagccttgagcctgcgagaagaaaaggagatccagaatcatgacagagagatgacctttgccaagagcacagccatctttcactgtcacagagaggtaggacaaaacgattggtgttcaagaattggtttgtagcacaatattttaactatgtcctttaaaaagtttctccacagacactacccaaagcagtccttcactacagtggcagacagacctgaaaattttcatctgaagcagcagagtgaactgcagagtcagagatagaatctcactatgttgaccaggctggtcttgaactcttggcacccaagcgatccttttgcctggaatcccaaagtgtcagatttactgaagaatatttcattgtaattactttttatactttataggtcaagagctctgttttaaagacaaaatttattgaatatactttttcaaacaaagtttcatgttctaatcattgtctgatttcagcattaaatgaaacacagtaaagaaagttgggctgaaaaaaaaaaagaaaaaaaaaaaaa

SEQ ID NO: 4969 - DNA, 5456 bp, Homo sapiens
ccagagcccggcttggtccggtccctctgcccccatcccgcacccttccacctcctccgagtcccactcctcacctaggacgccccaaactgccatgggttagggtggggatcgcgacccgcgcgaaagaccagccctgcgcttccgccgggggacgcggagcccaaacgccgctcaccgcttgcgggcgccgggcatggggagtgtggtgtgagcccgcacccggggaggacgcaggagctgcggagacgggcgcgaggaggaggagaggagtcgtggattggaaggacccgagggagggagggtggggaagcgagggaaaagtgaagctgggaggagaaggcggcggaaggtggagattgatgcttctgttttttgttgccgctgctgccctcgcgctgggagccgagccggagggaaggcggtggagagatgattgcagagttggtgagcagcgctctggggctcgccttgtatctcaacaccctgagtgcggatttctgctatgatgacagccgtgctatcaagactaatcaggaccttctcccagaaactccatggacgcacattttctacaatgatttttgggggactcttctaacccacagtggcagccacaagtcctaccggccactctgcactctttcttttcgcctgaaccatgccattggagggttgaatccctggagctaccatcttgtcaatgtcctgttgcatgcagcagtcactggtctcttcacaagcttctccaagatcctccttggtgatggatactggacattcatggctggcttgatgtttgcttctcaccccattcacacggaggcagtggcaggaatcgtgggacgagccgatgtcggggccagtctcttctttctcctctccttgctctgctacattaaacactgttctacaagaggctactcagccagaacctggggctggttcctggggtcaggactgtgcgcaggatgcagcatgttgtggaaggaacaaggagtgactgttctcgcagtttcagcagtttatgatgtctttgtctttcacaggctgaaaataaaacagatattacctaccatttacaaaaggaagaacttgtcgcttttcctaagcattagtttgttaattttctggggttcctcccttttgggtgcccggttatactggatgggaaacaaaccaccaagcttttccaactcggacaaccccgctgctgattcggacagcctcctcacccgcactctcaccttcttctacttgccaaccaagaacctctggctgttgctatgtccagataccctcagttttgattggtcaatggatgctgtgcctctgctcaaaacagtttgtgactggagaaacctacacactgtggccttctatactggactccttctccttgcctactatggtttgaagagcccgagcgtagacagagaatgcaatgggaaaactgtaacaaatggcaagcagaatgcaaatggacatagctgcctttcagatgtggagtaccagaactcagagactaagtccagctttgcatccaaagtagaaaatggcattaaaaacgatgtatcacagagaacccagcttccttctacggagaacattgttgttctgtctttatctttgttaatcataccctttgttcctgccacgaacctgtttttctatgtcggctttgtaattgcagagcgagtattatatattcctagtatgggcttctgcctactgattacagtgggtgctagagccctttatgtcaaagtccaaaagcggttcctcaagagcttgattttttatgctacagctacactaattgttttttatggactcaagactgcgatcaggaatggagactggcagaatgaggaaatgctttatagatcagggataaaagtaaacccagctaaagcatggggtaaccttggaaatgttctgaagagtcagagcaaaatttctgaagctgaaagcgcctatagaaatgctttgtactaccgcagcaacatggctgacatgctttataatttagggctacttctccaggagaacagcaggtttgcagaagcactacattattataaattggccattgggagcaggcctaccctggcttctgcatatttaaataccggtattattctaatgaaccaaggaaggacggaagaagcccgacggacattcttaaagtgttcggagatcccagatgaaaacctaaaggaccctcatgcacacaagagctctgttaccagttgtttgtacaacctaggaaagctgtatcatgagcagggacactatgaggaagcccttagtgtatacaaggaagcaattcagaaaatgccaaggcagtttgccccacagagcttgtacaacatgatgggtgaagcatatatgcgtttaagcaaactccccgaagcagagcattggtatatggaatcactgagatccaagactgaccacatccctgctcatctcacctatgggaagctgctagctctaacaggtcgtaagagtgaggctgaaaagctcttcttgaaggctattgagctggatcccaccaaaggaaactgttacatgcattatggtcagtttcttctggaagaagctcgtctcatagaagcagctgagatggcaaaaaaagcagctgaactagacagcacagagtttgatgttgtcttcaatgctgcccacatgctcagacaggctagcctcaatgaagcagctgagaagtattatgatctggcagccaggctgaggcctaattatccggctgctttgatgaacctgggagccattctgcacctcaatggcagactccagaaggccgaggccaactacctgcgggccctgcagctcaagccagacgatgtcatcacacagtccaatctccgcaaactgtggaacatcatggaaaaacaaggcttaaagacttctaagacctgacacaggaggcagaagcccatcctcctccatttttaaaagctggcttccttagcagacagaacttcccagcagtgctatgacaagagctggtgttagacttcaagaccagggcagaggtcattgaggtcactaccgcttctggaagaatccactttgctgtaggcacagctgttaacaccaaaaaggggaaagccggaaacctcctggaggatgtcattgttacccatagactgtaaaccagagcacttaaaacagaaccttttggcattcttaaaaagggaggggtgggtgtgtaagtcacagattttgttcattttctgaaagctaatttcaaaattatgttgttccttaaacactgtgagaggaagtcagagtgtccattcaggcatggcaaacaattagggttaagtgttacgagggagtgataaacacgtagtgtgagtcccagtgagccgccggttgtcctaacgctgctgtcttccctgtttgggacagcctgcttatcaatttctgaagcttagaacactttttttaatactgtgtcaagatctgtcagaatctgctatgtttcttgaccagtgcacataatgttttatgatttggatgtcagaggcttcattcttttggacatcatttgctttttatgttctgaaaaggatatggagagtagagctaaccatacttcacactcgagttgtatgagggactggggaggccttatatgtgtcaggcaggcattttttaaattttaatatcgtcaatattttcccccaaactgcccagtagaattcattgtattaattcttttgaaattacctttgaaaatagctattcctggagaatgtgcaagcttacataaggataaaggacaggggaggagtttgtaagccttgcagttccaataactaaccaacaggttattagacaaaagggaaggtgttttgtgcttctcagatgttgctggtttaggagtgtgtgatgatgcttgccagtgattttgtgttttggaaagggtaggtatcgaatgttaatcactttctaatgggtacctaaacagcaatgctgataaatgttcaaggaattattttcatcttagtttgttcttctcaaaaggcatcaaaaacaacttatttgaagctgcaatagagtgtagcattagcctgcatgtttctaggtcttctgccaagtgcttttctcagttgaaaactatttttcactagcaaaattggtattttatttcattacctgttagtaactacttcaatgatcatttcacaagaaaaagactataaattaagtagagaacaacatttttattgaacatttttggcttgcaatcaaactttgccactaaaaattaacttcataaaacactagtccgttatcaacttcttcacagagaaagtagctatactataccctacatatttatttatttattattctactatagcagaataacaaaacttgatgcattaagccagttctttgcaactgaaaattacctgtttctccttccctttcacactccatgtatatatgatcagcctctccattaaaaagaagctggacatgcaaatacatcatattatgttttctccatattttatgtttttctatgtatctgaatacagtgggataaataattgaaagtagtgttcctatggcattagtgtttttgtgagaagggtaaatgtagtgagaaaggttttttcatggcattaataagaaagcccttctgtaatatatatattattttgtaaacatttcactgaagggccaaaagttaaattataactaaatcactgtgttttcagaatgatatttaacaacaaacccgtggtcaaaccaaaatagtgggttgaagtgtattattcatcttttagtgcattggcaaaaaaaaaaaaaaaaaaaggaatttaatataaggctatagagattaattcagtgtctaacatttgtatttatttaaatagttattgacctatgatgactttctagtcttaacattttatctttttattgttgttgttcttcctttcaaagatgtggttcttaataggttcactgaatgcacagttgaggcacttcttgtgacaccagttcccaagtagcgttaataattgggcctgtgtcataaaatgcacggatcattaataactaaatgtccctgacacttttcactacagggctggacttagtaactgaccaacttcggggggagggttggggcaagggggggtgggcgttagaacatgatcaaaaaatgtctccgctcagggatttatggtggattattgcagacagtgctaaaaatatagagcacaagacaagtttactaaattaaaattttattttttgagaaactgttatttgtataaattatcaagatttgtaggctttccttttgtagaaataattgttttatgtgccagagaatttcaattttgttttcaacaataaagcattgataagaaaaaaaaaaaaaaaaaaaaaaaatctctaaaagagtt

SEQ ID NO: 4970 - DNA, 1094 bp, Homo sapiens
tcctggggagcgttgttggcccggttgctctggagccgggtctcgggtctggtggctgccggccctgcggcatctcgccatggggagcacggagagcagcgagggccgcagggtgtccttcggagtggacgaggaggagcgggtccgggtgctgcagggtgtccggctgtctgaaaacgtggtgaaccgcatgaaggagcccagctctccaccccctgctcccacatcttctacctttggccttcaagatggcaacttgagagcccctcacaaagaatccacactgcccaggtcggggagcagtggtggccagcagccctcagggatgaaggagggtgtcaagaggtatgaacaggagcattctgctatccaggataagctcttccaggtggcaaagagggaaagagaggctgccaccaagcactccaaggcatccctgcccacgggcgaaggcagcatcagccatgaggagcagaagtcagtccggctggccagggagctggagagcagagaggcagagctaagacgccgtgacaccttctacaaggagcagctggagcgtattgagaggaagaatgctgagatgtataaactgtcttcagagcaattccatgaggcagcctcaaagatggagagcacaataaagccccgcagggtggagcccgtctgctcagggttgcaggcccagattctccactgctaccgagatcgcccgcatgaggtgctgctgtgctcggacctggtcaaggcataccagcgctgcgtgagcgccgcccacaagggctgaggagcagacatcattccctgccctggcagtgacttggagccctgaagaagggaccaatcatgggaccacagccactgtgccctgccgtttcctgctgggcccctgcatatgcccctgagcctggggctgccacgtgtttaggaaacaaagtatgcgctactgtctgaaaacaaataaagcagatgcctttgttttcagtcaaaaaaaaaaaaaaaaaaaaaaaaaaaaaaaaaaaaaattgtccggtgtggcgggaaaaaagtcgtaatggaaagggccccttgggccctaaacttgtttccctgac

SEQ ID NO: 4971 - DNA, 6389 bp, Homo sapiens
  misc_feature (90)..(90): n is a, c, g, or t
  misc_feature (227)..(227): n is a, c, g, or t
  misc_feature (4317)..(4338): n is a, c, g, or t
  misc_feature (4558)..(4583): n is a, c, g, or t
  misc_feature (5396)..(5422): n is a, c, g, or t
agccttcagtcaacacaccctgagttcaaaatcctgcctctgctgcttgcctcatctacactgggcaactgacatcatttcctaagcttntgcctcatctgttaaatgcagataatatttgtacataatttacaggtctctgtgttagtctgataacatattggcagcacattaaatgctatctatgtgtgtcttctagctacttgctgacgtggctttcttcccangtgtataataagcaatctgaggacaggaaattagtcttactcatcttagtacccatgctgatcccagaagaacaagaaagtctcttgttctcttttacttttgcttgtcatgattcatggaacacattaaacctaactcctttgagttaacatattaatttattggtatcgccctatcctgcaaaggaattgagatgacttatgagatgcatacacaaaaagaaacataaaataatgttcagttggataatcgaagagtttaatttccccatcaggagtcaaaatgagtctgctgatgtttacacaactactgctctgtggatttttatatgttcgggttgatggatcgcgtcttcgccaggaggactttcccccgcggattgtggagcatccttccgatgtcatcgtctctaagggcgagcccacgactctgaactgcaaggcggagggccggccaacgcccaccattgagtggtacaaagatggggagcgagtggagactgacaaggacgatccccggtcccacaggatgcttctgcccagcggatccttattcttcttgcgcatcgtgcacgggcgcaggagtaaacctgatgaaggaagctacgtttgtgttgcgaggaactatcttggtgaagcagtgagtcgaaatgcgtctctggaagtggcattgttacgagatgacttccgacaaaaccccacagatgttgtagtggcagctggagagcctgcaatcctggagtgccagcctccccggggacacccagaacccaccatctactggaaaaaagacaaagttcgaattgatgacaaggaagaaagaataagtatccgtggtggaaaactgatgatctccaataccaggaaaagtgatgcagggatgtatacttgtgttggtaccaatatggtgggagaaagggacagtgacccagcagagctgactgtctttgaacgacccacatttctcaggaggccaattaaccaggtggtactggaggaagaagctgtagaatttcgttgtcaagtccaaggagatcctcaaccaactgtgaggtggaaaaaggatgatgcagacttgccaagaggaaggtatgacatcaaagacgattacacactaagaattaaaaagaccatgagtacagatgaaggcacctatatgtgtattgctgagaatcgggttggaaaaatggaagcctctgctacactcaccgtccgagctcccccacagtttgtggttcggccaagagatcagattgttgctcaaggtcgaacagtgacatttccctgtgaaactaaaggaaacccacagccagctgttttttggcagaaagaaggcagccagaacctacttttcccaaaccaaccccagcagcccaacagtagatgctcagtgtcaccaactggagacctcacaatcaccaacattcaacgttccgacgcgggttactacatctgccaggctttaactgtggcaggaagcattttagcaaaagctcaactggaggttactgatgttttgacagatagacctccacctataattctacaaggcccagccaaccaaacgctggcagtggatggtacagcgttactgaaatgtaaagccactggtgatcctcttcctgtaattagctggttaaaggagggatttacttttccgggtagagatccaagagcaacaattcaagagcaaggcacactgcagattaagaatttacggatttctgatactggcacttatacttgtgtggctacaagttcaagtggagagacttcctggagtgcagtgctggatgtgacagagtctggagcaacaatcagtaaaaactatgatttaagtgacctgccagggccaccatccaaaccgcaggtcactgatgttactaagaacagtgtcaccttgtcctggcagccaggtacccctggaacccttccagcaagtgcatatatcattgaggctttcagccaatcagtgagcaacagctggcagaccgtggcaaaccatgtaaagaccaccctctatactgtaagaggactgcggcccaatacaatctacttattcatggtcagagcgatcaacccccaaggtctcagtgacccaagtcccatgtcagatcctgtgcgcacacaagatatcagcccaccagcacaaggagtggaccacaggcaagtgcagaaagagctaggagatgtccttgtccgtcttcataatccagttgtgctgactcccaccacggttcaggtcacatggacggttgatcgccaaccccagtttatccaaggctaccgagtgatgtatcgtcagacttcaggtctgcaggcgacatcttcgtggcagaatttagatgccaaagtcccgactgaacgaagtgctgtcttagtcaacctgaaaaagggggtgacttatgaaattaaagtacggccatattttaatgagttccaaggaatggatagtgaatctaaaacggttcgtactactgaagaagccccaagtgccccaccacagtctgtcactgtactgacagttggaagctacaatagcacaagtattagtgtttcctgggatcctcctcctccagatcaccagaatggaattatccaagaatacaagatctggtgtctaggaaatgaaacgcgattccatatcaacaaaactgtggatgcagccattcggtccgtaataattggtggattattcccaggtattcaataccgggtagaggttgcagctagtaccagtgcaggggttggagtaaagagtgagccacagccaataataatcgggagacgcaatgaagttgtcattactgaaaacaataacagcataactgagcaaatcactgatgtggtgaagcaaccagcctttatagctggtattggtggtgcctgctgggtaattctgatgggttttagcatatggttgtattggcgaagaaagaagaggaagggactcagtaattatgctgttacgtttcaaagaggagatggaggactaatgagcaatggaagccgtccaggtcttctcaatgctggtgatcccagctatccatggcttgctgattcttggccagccacgagcttgccagtaaataatagcaacagtggcccaaatgagattggaaattttggccgtggagatgtgctgccaccagttccaggccaaggggataaaacagcaacgatgctctcagatggagccatttatagtagcattgacttcactaccaaaaccagttacaacagttccagccaaataacacaggctaccccatatgccacgacacagatcttgcattccaacagcatacatgaattggctgtcgatctgcctgatccacaatggaaaagctcaattcagcaaaaaacagatctgatgggatttggttattctctacctgatcagaacaaaggtaacaatggtgggaaaggtggaaaaaagaagaaaaataaaaactcttctaaaccacagaaaaacaatggatccacttgggccaatgtccctctacctccccccccagtccagccccttcctggcacggagctggaacactatgcagtggaacaacaagaaaatggctatgacagtgatagctggtgcccaccattgccagtacaaacttacttacaccaaggtctggaagatgaactggaagaagatgatgatagggtcccaacacctcctgttcgaggcgtggcttcttctcctgctatctcctttggacagcagtccactgcaactcttactccatccccacgggaagagatgcaacccatgctgcaggctcacctggatgagttgacaagagcctatcagtttgatatagcaaaacaaacatggcacattcaaagcaataatcaacctccacagcctccagttccaccgttaggttatgtgtctggagccttgatttctgatttggaaacggatgttgcagatgatgatgccgacgacgaagaggaagctttagaaatccccaggcccctgagagcactggaccagactcctggatccagcatggacaatctagacagctctgtgacaggaaaagcctttacctcctctcaaagacctcgacctaccagcccattnnnnnnnnnnnnnnnnnnnnnngcagccctgagtcaaagtcagaggcctcggcccactaaaaaacacaagggagggcggatggaccaacaaccagcattgcctcatcgaagggaaggaatgacagatgaggaggccttggtgccctatagcaagcccagtttcccatctccaggtggccacagctcatcaggaacagcttcttctaagggatccactggacctaggaaaaccgaggtgttgnnnnnnnnnnnnnnnnnnnnnnnnnngccagcgaccttcttgacataggatatatgggctccaacagtcaaggacagtttacaggtgaattatagtaaatgagaggagacatacaaagctgctctgaaggaccatcaggtccggactcatggaagtgatgactctaaacagtgcaatgaacaatttatttatgtactattaaaagaactgtaaatgcaatgtaaagacacacagccacacatatcccacagatattttcattgtgttcttctcttaagtacaccacccaccttaactctttcttgtcaggagtatataaaaaagaaagaaaacaaaactcgccctacaggaagaaaaggattctcctctgtatataatttcttttgtgcattgctatgcaagctcactctttttagctctgctcatattattgtctgttcttattggtctgttgtactatatgtgaattaataggctgtggtgccatatattaacttttaattgtgtaacttttatgtttaaattttgcactgcaattttatttggtgataagcacaaatctctactcctcatgacatgaagaaaaagactgaatgtgaagggagtttctgtactgtaagctagattggataatgatggctgtaacaaatcatgttagatggttttcagttggggtgtagaaataggaagatgcaaaggaacaatggtgttggcaaagtcttctttgaatatcagggactgagtcaataaaaaaaatagtagaaaggtggcttttactattgacaaaagccggggtcaaaaaaagtagtttaagtcttaagactgaatatgcattaaannnnnnnnnnnnnnnnnnnnnnnnnnnaatttgcttaaaaaaagaaattaaagttttatttagaatcaattttacctgtcattgtaattgacccatctgagaattacaataagcaagaggaaattaaggtgttttgcaagagctgtatttatattacagttttttaaaaacattttctgaattatcgtaattaagctctccaactcgttaagtcagaatataatatgaagttccccaaggaaacgaacaaaatgaactctagaatatctagcaaatagttaaagaagcaatttattattagggcatactcgggctgtttccaaatataaactctattgcaatatcttatttcatctttctaatacatgtacagtgcacactagaggatagagctgcatcacttaaattcatgacttaaaaaataatacagtttatatacaacttgttttttatttgattaagaagtgaagtttatgccacccaatgtatagccaaattgtacgtgcttaaaaaacagtgccgagagtatgttcagttcgcagtaagtagatttattggaataaatattctatggtacattctcagaaattggcttccaactaaaatacgtttgacccatttttaataaggaaattgaaaagaaaaatttaaaaggagaaaaaaatgcatgtttataaactttttaaataaaaccagaccttgtaagtggacattaataattgtcctgcctcatttgttttcacgactttgacaacaagaagttcctgaacattagtcatgtatgctcagaataaatgtgactttgaaatatatgttagctactgtacatgtatagtcagtcaagtagaagaggaccttcctgaaattcccacttgtgacattttcccatgggtttcctacacaatcttaaattttatttctgtctatactttctcaaatttttcctatgataagttcagttgttggtactcttctaaaatattcaacgtgatta

SEQ ID NO: 4972 - DNA, 552 bp, Homo sapiens
actacatactttcgacagcggcttccttgatccttgccacccgcgactgaacaccgacagcagcagcctcaccatgaagttgctgatggtcctcatgctggcggccctctcccagcactgctacgcaggctctggctgccccttattggagaatgtgatttccaagacaatcaatccacaagtgtctaagactgaatacaaagaacttcttcaagagttcatagacgacaatgccactacaaatgccatagatgaattgaaggaatgttttcttaaccaaacggatgaaactctgagcaatgttgaggtgtttatgcaattaatatatgacagcagtctttgtgatttattttaactttctgcaagacctttggctcacagaactgcagggtatggtgagaaaccaactacggattgctgcaaaccacaccttctctttcttatgtctttttactacaaactacaagacaattgttgaaacctgctatacatgtttattttaataaattgatggcaaaaaaagaataaaaaaaaaaaaaaggtttgcggccg

SEQ ID NO: 4973 - DNA, 473 bp, Homo sapiens
  misc_feature (452)..(452): n is a, c, g, or t
  misc_feature (464)..(467): n is a, c, g, or t
ttttttttttttttttttttttttagaaatctaaaattaaatatttaattagaactctgatttgctttaaagattggtggcattgcacaggctatattacaccctctttataatttttttgacaaaaaaaagatactgttcattttaacaggccactttaatattaatacatgtgtaataggattggaactgaaaatcagctagagatggtacattttacattattgggaaaattacagttctgtattgtaaaaacatttattttttaacaatgtacctacattaatcaaaaaattacagcatatttaataattttacaaattcttcataaaaaatatatctctgtacaaaaaggtctttcgcacctacgtcgtgacagcagcgtgtgggttggggacggggaggggagggggtcgggccgatggaccaatggggtttttccctgatccatnatggcccggcgnnnntttttt

SEQ ID NO: 4974 - DNA, 2528 bp, Homo sapiens
tcgctcccagatacagggatgagtatctggaagtgggcataaaagagtaggggcgtgaattaagaacgcactggatctgcgcggcagagggaggagagagcgaaattttgcagagagaaagagaaatgcacagcggtattgatgagtagatccttggattcagaggttggctgaaacgcaccatgcctgcttccatcttttgctctgtaaagttgtgaattgctcatgcctatagggaggaaggatggcacatgggattccttctcaaggcaaagttaccataacggtggatgagtacagctcaaaccccacccaggcattcacgcactacaacatcaaccagagcagattccagcctccacatgtacatatggtcgaccccatcccatatgacactccaaaaccagcgggccacacgcggtttgtctgcatctcagacacacactccagaacagatggtatccagatgccttatggggacatccttctccacacaggcgatttcaccgagctgggactgccctcagaggttaagaagtttaatgactggttaggaaacctgccatatgaatataaaatagtgattgctgggaatcatgaactgacatttgataaggaattcatggcagaccttgttaaacaggactactaccgtttcccctctgtgtccaaattgaaaccagaggactttgacaatgttcagtccctcctgacaaacagtatttacttacaagattcggaggtaacagtgaagggattcaggatatacggtgcaccttggaccccgtggtttaatggatggggctttaacctacccagaggtcagtctctgctggacaagtggaacctcatccctgagggcattgacatactcatgacacatggacctcctctaggttttcgagactgggttccaaaggagcttcaaagagtgggctgtgtggagctgttaaacacggttcagaggcgagtccggcccaagctccatgtgtttggtggaatccatgaaggttatggcatcatgaccgacggttacacaacgtacatcaatgcctcgacgtgtacagtcagctttcaaccgaccaaccctccaattatatttgaccttccaaacccacagggttcctgaagctctaaatgccctattggaatgtgagggaaggtctataaactgccatttttctaattataaacttacattctcttacttatttacaaaccctgtgagttctttttgtaaattgttggaacacaaatgatgctagaggttgtgcttcttattttattttattttaaatggggcatccatttgaaatcagaggaacattgtgaatttgtaaaatgacttctgttttctcaaaggccatgccattgtaaattgttagtgttcgccaaaggacagccaagctttcttttaaaaagtgataaaagtcttattttaatatgctttaagctgaaagaaaaaaaaataagaaacaggcagtgttttaaaaaccaacacagatttgcacaactgtttaagagtattgtttgaaatattttaattttcaatgttttgttgttgttgttttcttggtaatgcttcttttttgcagatgtggtcccaatttatagcaatcttctcaacagaagtaggcatggaaaagacttcttttcatactctcactataaagaaagctgcattgagaagaaaatggctgtcatttaaaggatggtttaactagtgagattcctattgtggttatacaaggtctcattgtttgtttgtttcttttaaattatttcagctttaaaaatacagaaatggaatctgtcaagagcaggtatttcatacggttaaaaaaatgaacatgcagactccttttcaatatgggtttatatatataagtattttttgtgtattatgactacgttaggagtttaatattgtcaaggacagtacaactgcaaagggatgctgtatagcagcacatcagaagtcggaaggaactgacacattctctcagagctcaaggtcttaaagagcttgagttaaatctaggtacagttacaggcatgtatagacttaaatggatgcaatggaagctaactaaaataaggcttagttgtcctttctatttaaataccccaagttgtcttcttacttcctctcccctctcccattttgcactgtgtgtcgatgcaatcttcgctagcacaaaatattgtcgctaatagtcatttctgttttcccattgtaaatgctgttgagctttattctattttatgttactttgttaatgaaatttaggaaagcagttgtttctttaaatttattgtgatattctatatctagcggcctttatatgcaaataaaattgcaagatttttaaaaaaaaaaaaaaaaaaaaaaaaaatggtggaggatggtagtttcgtcctggggaaggagggatttattcatatgcaacatcagtaatgcctttcagaagaattagaataagtgatttttttccctaattttcaataaatttttattacccaccaaa

SEQ ID NO: 4975 - DNA, 5681 bp, Homo sapiens
  misc_feature (902)..(914): n is a, c, g, or t
  misc_feature (4015)..(4033): n is a, c, g, or t
agaattcggagcgcggaagagccagagctgcgagcgcctggagctggatctctctccggtcgcgcacgccgaggccagtagggagagaagatggtggttctccgcagcagcttggagctgcacaaccactccgcggcctcggccacgggctccttggacctgtccagtgacttcctcagtctggagcacatcggccggaggcggctccgctcggccggcgcggcgcagaagaaacccgcggcgaccacagccaaagcgggcgatgggtcatcagttaaggaagttgaaacctaccaccggacacgtgctttaagatctttgagaaaagatgcacagaattcttcagattctagttttgagaagaatgtggaaataacggagcaacttgctaatggcaggcattttacaaggcagttggccagacagcaggctgataaaaaaaaagaagagcacagagaagacaaagtgattccagttactcggtcattgagggctagaaacatcgttcaaagtacagaacacttacatgaagataatggtgatgttgaagtgcgtcgaagttgtaggattagaagtcgttatagtggtgtaaaccagtccatgctgtttgacaaacttataactaacactgctgaagctgtacttcaaaaaatggatgacatgaagaagatgcgtagacagcgaatgagagaacttgaagacttgggagtgtttaatgaaacagaagaaagcaatcttaatatgtacacaagaggaaaacagaaagatattcaaagaactgatgaagaaacaactgataatcaagaaggcagtgtggagtcatctgaagagggtgaagaccaagaacatgaagatgatggtgaagatgaagatgatgaagatggatggatggatggatgaannnnnnnnnnnnngatgatgaaagatgatgaagatgaagaagatggagaagaagagaatcagaagcgatattatcttagacagagaaaagctactgtttactatcaggctccattggaaaaacctcgtcaccagagaaagcccaacatattttatagtggcccagcttctcctgcaagaccaagataccgattatcttccgcaggaccaagaagtccttactgtaaacgaatgaacaggcgaaggcatgcaatccacagtagtgactcgacttcatcttcctcctctgaagatgaacagcactttgagaggcggaggaaaaggagtcgtaatagggctatcaataggtgcctcccactaaattttcggaaagatgaattaaaaggcatttataaagatcgaatgaaaattggagcaagccttgccgatgttgatccaatgcaactagattcttcagtacgatttgatagtgttggtggcctgtctaatcatatagcagctctaaaagagatggtggtgtttccattactttatccagaagtctttgaaaaatttaaaattcaacccccaagaggttgtttgttttatgggccacctggaactggaaagactctggttgccagagcacttgccaatgagtgcagtcaaggggataaaagagtagcatttttcatgaggaaaggtgctgattgtctaagtaaatgggtaggagaatctgaaagacagctacgattgctgtttgatcaggcctatcagatgcgcccatcaattattttttttgacgaaattgatggtctggctccagtacggtcaagcaggcaagatcagattcacagttctattgtttccaccctgctagctcttatggatggattggacagcagaggggaaattgtggtcattggtgctacgaacaggctagattctatagatcctgctttacgaaggcctggtcgctttgatagagaattcctctttagcctgcctgataaagaggctcgaaaagagattctaaagattcacaccagggattggaatcccaaaccactggacacatttttagaagagctagcagaaaactgtgttggatactgtggagcagatattaaatcaatatgtgctgaagctgctttatgtgctttacgacgacgctacccacagatctataccactagtgagaaactgcagttggatctctcttcaattaatatctcagctaaggatttcgaggtagctatgcaaaagatgataccagcctcccaaagagctgtgacatcacctgggcaggcactgtccaccgttgtgaaaccactcctgcaaaacactgttgacaagattttagaagccctgcagagagtatttccacatgcagaattcagaacaaataaaacattagactcagatatttcttgtcctctgctagaaagtgacttggcttacagtgatgatgatgttccatcagtttatgaaaatggactttctcagaaatcttctcataaggcaaaagacaattttaattttcttcatttgaatagaaatgcttgttaccaacctatgtcttttcgaccaagaatattgatagtaggagaaccaggatttgggcaaggttctcacttggcaccagctgtcattcatgctttggaaaagtttactgtatatacattagacattcctgttctttttggagttagtactacatcccctgaagaaacatgtgcccaggtgattcgtgaagctaagagaacagcaccaagtatagtgtatgttcctcatatccacgtgtggtgggaaatagttggaccgacacttaaagccacatttaccacattattacagaatattccttcatttgctccagttttactacttgcaacttctgacaaaccccattccgctttgccagaagaggtgcaagaattgtttatccgtgattatggagagatttttaatgtccagttaccggataaagaagaacggacaaaattttttgaagatttaattctaaaacaagctgctaagcctcctatatcaaaaaagaaagcagttttgcaggctttggaggtactcccagtagcaccaccacctgagccaagatcactgacagcagaagaagtgaaacgactagaagaacaagaagaagatacatttagagaactgaggattttcttaagaaatgttacacataggcttgctattgacaagcgattccgagtgtttactaagcctgttgaccctgatgaggttcctgattatgtcactgtaataaagcaaccaatggacctttcatctgtaatcagtaaaattgatctacacaagtatctgactgtgaaagactatttgagagatattgatctaatctgtagtaatgccttagaatacaatccagatagagatcctggagatcgtcttattaggcatagagcctgtgctttaagagatactgcctatgccataattaaagaagaacttgatgaagactttgagcagctctgtgaagaaattcaggaatctagaaagaaaagaggttgtagctcctccaaatatgccccgtcttactaccatgtgatgccaaagcaaaattccactcttgttggtgataaaagatcagacccagagcagaatgaaaagctaaagacaccgagtactcctgtggcttgcagcactcctgctcagttgaagaggaaaattcgcaaaaagtcaaactggtacttaggcaccataaaaaagcgaaggaagatttcacaggcaaaggatgatagccagaatgccatagatcacaaaattgagagtgatacagaggaaactcaagacacaagtgtagatcataatgagaccggaaacacaggagagtcttccgcgtggaagaatgaaaaacagcaaaatgcctctgaaagcaaactggaattgagaaataattcaaatacttgtaatatagagaatgagcttgaagactctaggaagactacagcatgtacagaattgagagacaagattgcttgtaatggagatgcttctagctctcagataatacatatttctgatgaaaatgaaggaaaagaaatgtgtgttctgcgaatgactcgagctagacgttcccaggtagaacagcagcagnnnnnnnnnnnnnnnnnnnggctttggcaattctttctcagcctacaccctcacttgttgtggatcatgagcgattaaaaaatcttttgaagactgttgttaaaaaaagtcaaaactacaacatatttcagttggaaaatttgtatgcagtaatcagccaatgtatttatcggcatcgcaaggaccatgataaaacatcacttattcagaaaatggagcaagaggtagaaaacttcagttgttccagatgatgatgtcatggtatcgagtattctttatattcagttcctatttaagtcatttttgtcatgtccgcctaattgatgtagtatgaaaccctgcatctttaaggaaaagattaaaatagtaaaataaaagtatttaaactttcctgatatttatgtacatattaagataaatgtcatgtgtaagataactgataaatattggaactttgctagaacaagaccctgtagtaatagtaataatagttgaagtttggccaactcttaataaagttattttggtaactaatgttttatggcacttaagaataattagcagcgttaaattttgtttgtattaagcacttttaattttatccttcctaaaaatagtttattgtatctgacaagaaacttacttaaccattgtgtccttcccatcttttttgtcatctttgttttcttcaaatgccctcctcccatctgccttgagattcccttgtcttcacttaaaagccagagtgcaagtcatgatttgcgggagggctcttgaaccacttctggctgcaccacaattctgtacttgagtatcacagtcattgtttttgagacaaacatttttataattctaatttgggttaataaagattttaaatatttaaaaaaaaaaaaaaaaaaaaatatacacaacaaatgtattaataactaccttgttaaacaccttttaatagcacaaggtttttatatttgcaagctgttgatatctttctaaaactgtttaggttatagtctattgatactttttatatacaattttataaatataaatattataattttatattaatggtaccaaaaatacatttcttaaggttaaaagcatgcacttccatgcatacttgcttttggggagagtggggagaagacattctaataatcagtttgtgaaatagcttctgttggaaaccttttgaggggaataaggaatggtcatctaaaatgagagattctgggatttttatgcagtttcaaagttggagcctgtattttttgttggttgatttaatctgggatttttttttaaaaggctttcctaaaaaccccaagttggaatttcaattaaccctttaaatttaagggtacccattaacttaatccctttattgggtaaatgggccattaaaaagccaaaatggcccaaggttccaccttggagaaaaccatttttaaaataataatttctaattatttcccctgggggaggaatacccccgatttccctccattttttttgtttgggggttttatttattaaaaattaatttccttcctaaaaatggcaattcttttttataaaccttagggattttcccttttttggggtggtattagcctttatgtaaattaaattttttaaagggggaaaaaacttctcttttaaaa

SEQ ID NO: 4976 - DNA, 3129 bp, Homo sapiens
  misc_feature (2255)..(2255): n is a, c, g, or t
  misc_feature (2269)..(2273): n is a, c, g, or t
gcgggtggtgccggtggcggcggcgggggagcgcgggacaggaggcttcggggaagatggacccggcgccctcgctgggctgcagcctcaaggatgtgaagtggagctcggtggccgtgccgctcgacctcctggtcagcacttaccggctgccccagatcgcgcgcctggacaacggagagtgcgtagaagggctgcgggaaaatgactatctgctgattcattcctgccgccagtggaccaccatcactgcccacagcttggaggagggtcactatgtcattgggccaaagatagagattccggtacattatgcagggcaattcaagctgctggaacaagaccgagatataaaggagccagtgcaatatttcaacagtgtggaggaggtggctaaggcatttcctgaacgcgtgtacgtcatggaggatatcacattcaacgtgaaggttgcttcaggtgaatgcaatgaagacactgaagtttacaacatcaccctgtgtactggggatgaactcactctaatggggcaggcagaaatcctttatgcaaagacattcaaggaaaagtcacgactcaacacaatcttcaaaaagattgggaagctcaattccatcagcaagctgggaaaaggcaaaatgccgtgcctcatttgtatgaatcaccggaccaacgaaagcattagccttccattccagtgcaagggcagatttagcacccgaagtcccctggaacttcagatgcaagagggcgaacacaccatccgcaacattgtggagaaaaccaggcttcctgtgaatgtgactgtgccaagccctccaccgagaaacccatacgacctccacttcatccgtgaggggcaccgctataagtttgtgaacatccagaccaagacggtggtggtttgctgtgtgctgcggaacaacaagatcctccccatgcactttcctttgcacttgactgtccccaagttcagcctcccagaacacctggtgaagggagagagctggcccgaaaccctggtccatcactggctaggtatctgccaagaacagttcgacatcgatgagtattcacgggctgtccgtgatgtgaaaaccgactggaatgaagaatgcaagagccccaagaagggtcggtgctctggccacaaccacgtgcccaattcgctcagctacgcccgcgatgagctcacccagtccttccaccgactctcggtctgtgtgtatggcaacaatctccatggcaacagtgaggtgaaccttcatggttgcagggacctggggggagattgggctccctttcctcatgacatcctgccctatcaggactctggagatagtgggagcgactaccttttcccagaagctagtgaagaatcagcaggcatcccgggaaagtcagaacttccctacgaagagctgtggctggaggaaggcaagcccagccatcagcctctcactcgctctctgagcgagaagaacagatgtgatcagtttagaggttctgtccgatccaaatgtgcgacttctcctcttcccatccctgggactctgggagcagcagtgaagtcttcagatactgccctacctccacctccagtgcctcccaaatctgaagccgtcagagaagaatgccggctcctgaacgccccacctgttccaccccgaagcgcaaagcctttgtccaccagtccctccatccctcctcgcacagtcaagccagcgcggcaacagactcgctctcccagccccaccttgtcctactattcttcagggctacacaacatcagcgtcactaaaactgacacaaatccttctgaaagcactcctgtttcctgctatccatgtaaccgagtgaaaactgattctgtggacctgaaatccccgtttggaagtccttctgctgaagctgtgtcctctcggctctcatggcctaaccattattcaggagcatcagaaagccagaccaggagtgacttcctgctggatccaagcaggagttatagttaccctagacaaaagacgccaggcacaccaaagagaaactgcccagcaccttttgattttgatggctgtgagctcctggccagccccactagcccagtcactgcagaattcagtagcagcgtctctggttgtcccaagtcagccagctactctctggagagcacagatgtgaaatctcttgcagctggtgtgacaaagcagagtacgtcatgccctgccttaccccccagggctccaaaactagtnggaagagaaggtcnnnnngaaacatctcctttgcctctgaaaattgatggtgctgaggaagaccccaagtctgggtcaccagatctctcggaggaccagtattttgttaaaaagggcatgcaggacatcttctctgcctcctaccctttctcatctccgctccatctccagctggcccccagatcctgtggcgacggttccccatggcagccacctgctgacctatcaggactctctatagaggaagtgtccaagtcactacggttcattggtttgtccgaagatgtcatatcattctttgttactgaaaagattgatgggaacctgcttgttcagctaacggaagaaatcctctcagaggatttcaaattgagcaaattgcaggtgaagaagataatgcaattcattaatggctggaggcccaaaatatagccaaataacccccggccagcatggaacaaaactgatcaatgcgtgtgctagaaggggtgggctgggacacaatttcatgtttttgcactaaaaaccttctctgtaaatagggataagagaaactcttactatgcagattacgtttttgaatggtgaacaggctattttgtacatcaataaaaatgctgtacagaacacttggaggtgtgccttgtacgtcactcaacaaacactcagcagctgctaaaagaaaaaaaggcatgtgcagagaaatcattcttacccaagtaggtttatgtgagaaggtatgatatttattacaaaatagccaaagctgaaagacataaaaatctttaaaaaaaaaaaaaaaaattgggggggaaggttagggctgttggttcgccttttaaagggaggggcaaggggtataaggatagaaaag

SEQ ID NO: 4977 - DNA, 565 bp, Homo sapiens
cttttttttttttttttttttagtagagacagggtttcaccatgttagccaggatggtctcgatctcctgacctcatgatcttcctgctttggcctcccaaagtgctgcgattacaggcgtgagccactgcacccagcccagagttttttttaacaaggttcttctcagcaattctagtatccagatataggcccatcatagacatcacacaagcgtgtacttcataatcctggtgaatacagaagtttcctggactccttgatgagctactgctttcgctcctatatcagtgttttcagctgatgtcatttgtgattgtgtttctgactttctgtaggcagaaaaaaactttcattttttttttgcttacatgcacataaatgtaagcgctaattcttatattaaactgtttatttctataatacttaattggctgttttcctggctgaaccaaaccaagagcataaggaatgataaccttcaaaactgattaaattagagatcaataaatggagctgttttaattctattattcttctttcatagattaaatagaaaattttt

SEQ ID NO: 4978 - DNA, 4455 bp, Homo sapiens
  misc_feature (2512)..(2526): n is a, c, g, or t
agcaaactcgtcttgtctacccaccctccctcccccatcctccccaaaatagccttgtgatttcggaagtatggactaaaatcacactcctccttaccttaccgcttggactctggtggctcccaactcgccgtcagaccccacctgccccggtggtgggaagcgcctggacagaccatgaccacagccaaggagccaagcgcttcggggaaatccgtgcagcagcaggaacaggagctggtggggagtaaccctccgcagaggaattggaaaggaatagcaattgcactgcttgtcattctggtcatctgctccttgatcgtcacctcggtcatacttctgacaccagcggaagataatagtctgtctcaaaagaagaaggtcactgtagaagatctcttcagtgaagacttcaaaattcatgaccccgaggctaagtggataagtgatacagaattcatctacagagaacagaaaggaacagtgagactgtggaatgttgaaacaaatacttctactgtcttaatagaaggcaaaaaaattgaatcattaagagccatcagatatgaaatatctccagatagagagtatgcacttttttcatacaatgtggaacccatatatcaacactcgtatactggatattatgtcctgagcaaaattcctcatggggatcctcaaagtctggacccaccagaagtcagcaatgcaaagcttcagtatgcaggatggggccctaaaggccaacagctgatatttatttttgaaaacaatatctactactgtgcacatgtcgggaaacaggccatccgtgtggtctccactggcaaggaaggtgtgatttacaatggcctcagtgactggctgtatgaagaggagattttgaagacacacatcgcacactggtggtctccggatggcacgagactcgcctacgccgccatcaatgattcccgtgtccccatcatggagctcccaacttacaccggctccatctaccccaccgtgaagccctaccactatcccaaggctggaagtgagaaccccagcatttccctacacgttattggcttaaatggacccacccatgatctggagatgatgccgcctgatgatccacggatgagggagtactacatcaccatggtgaagtgggccaccagcaccaaggtcgccgtgacctggctgaaccgggcgcagaacgtgtccatcctcaccctctgcgacgccaccacgggggtctgcacgaagaaacacgaggatgaaagtgaggcctggctccacagacagaatgaagaacctgtgttctccaaggatggccgaaagtttttcttcatcagagccatcccccagggaggacgagggaaattctatcacatcacggtgtcctcgtcccagcccaacagcagcaacgacaacatccagtccatcacctccggggactgggacgtgaccaagatcctagcctacgatgagaaggggaataagatctacttcctgagcacggaggacctgcctcggagacgacaactctacagtgccaacacggtgggcaacttcaacaggcagtgcctctcctgtgacctggttgagaactgcacctacttcagcgcttccttcagccatagcatggacttcttcctgctcaagtgcgaaggtcctggtgttcctatggtgacggtgcacaacacaacagataagaaaaaaatgtttgacctagaaacaaatgaacatgtcaagaaggccataaatgaccgacagatgcctaaagtggaatacagggacattgagattgatgattacaacctgcccatgcagatactgaagccagcaaccttcaccgacaccacccactaccctctgctcctggtggtggatggcaccccgggcagccagagtgtagctgagaagttcgaggtgagctgggagacggtgatggtgagcagccacggcgcggtggtggtaaagtgtgacggccgtggcagcggcttccaagggaccaagctcctgcacgaagtgaggcggcggctgggcttgctggaggagaaggaccagatggaggccgtgcggacgatgctgaaggagcagtacattgacaggacgcgcgtggccgtgtttgggaaggattacggtggctacctgagcacctacatcctcccagcaaagggagaaaatcaaggccagacattcacctgcggctctgctctctctccaataacagacttcaaactctatgcctctgcgttttccgagaggtacttgggcctccatggacttgacaacagagcatacgagatgaccaaggtagcccatcgagtctccgcgctggaagaacagcagttcctgatcattcatcccactgccgatgaaaaaattcatttccagcacacagcagaactcattacacaactaattaggggaaaggctaattacagcttacagatttacccggacgaaagccattactttaccagctccagcctcaaacagcatctgtaccggtccatcatcnnnnnnnnnnnnnnntgcttcaggatccaggacaaactgccgacagtcacagcgaaagaggacgaggaggaggactaagctcaggtcgctctaagcacaaacgtggctctttctacaaccagatgcaaccgagggatttccctgccctccctcttccctcggaggggcggggcggggcggggccgggtgttccatagcatgtgtgtctcggatgcggaaggcagttttgcttgggaaacaagctccttccccggggtcatcactcacggcctccatggcaccagggacaacgctgtccccgcagcagcgcctcctcccggcgcccgagagaccggcacgccacggcccctcccccaaggaacagagcaaaggatggtggccgcaggccccacgcgagcccacaggacaccggcccctagattccagccaccaagcggaagcatgagacccgcccacactagcctctgtgttcccgttagggacatcacaccctgtctcacgtcgcagtgccatggacgcagcagttacagcaccattgttttagcagtgcgtgttcatatatgggcttgctacttcctgtaatgaggacgttcaacatggtgaggggctacaagaaaacgcttttctgtacagagtcttactgtagctacgctaatggttaacctgatagaattaactcgtatttttctatggttttaacctgatgctccactgtctccgtcatggggttgttttgctgtttggggttgggccttgtttccctttcctttctccagtccacgtgtagactttgcgcttgtttggatgaagaagcagatcggaagtaactgctccctcctcaaggttgtcttcagacgtcttggagacgttcctaaacactgagggggaagacagccaatagcacccattaaaagaaatacctaaataaaacctctctcccactcagctatgctagggcttggctgtaggtgtgcactgtctatttacatccgtccttacaaccatccttgtcctccttggtaccgtatcaagctctttcccatgacatttggttgaaaaaaaaaaaaaaaaaaaaaaaaaaaaacctgaaaaaagacaaagcgtcaactccacccgcaggcccgctgtgtgtgctcgggccacgggagtcctgagggttctgtgggcctgcgcgcatccctctcccatcgtgggggtggctccgtgaccttcctgccacgagcaggaggttgatgatgtgctacgttagccttgtaagatacacccccaccaaatgtgcagccggtgttcccagtgtatatttcattctcttgtatataaaggaagcaatgtgtgtcaggcctctgtgcagtcaacccagcctcctcccgccagtgctaaccctgtgttgagcctgcatgctgacactgtggccgatctggactctagaagtgctagtttgaaatatatccattactgtcatttccttttgagcttgtggacaagctgaatgtcaggactgacttctccagctcccagccctgcgggggtgtccttggcatcccatcagcagaggagatgcgtccctgttgcattttggcgtttggggctttgggtttatccacatgagctctgaacgtccgttatagttagggtgattggaaggtctccatcactgggtgttttaaaggtgattcaccaccatttgtgaaaggaccaacgtgctgataaacaggaccgatccgagtgctacatgactgtgcgtttgctatttcaatgggcctgaacgactacaaagccagctaggtctggaaggggaagccagctctggccacgacatctggtcggagggaagtggggatgtggcatggtagcgtctgttcatccatggaataaaacattattttaccaaaaaaaaaaaaaaaaaatgaaggaaaaaaaaaaaaaaaaaaaaaaaaaaaaaag

SEQ ID NO: 4979 - DNA, 918 bp, Homo sapiens
ggttggggagtggattggggatagagagaaaggtgtacttagtacacattttctaatgggcgttacgtgaactgtttgaacctgctgagtggcgcttgtagagctccatgtcacgtcagtgtcaacaccattcaacagctttgcacatcttcgtacaacataatctggctttggtgccccttgagccacctgtagaataatttatagcagggtcccacaatctactgcaatgatcgtgaacagttatcagtggatatagtgctccaagagtcaaattgtatccgttaagggttttctaacttttgctatcccccccgcgaccaaaaaaagggggggtttataatttaaagaaaaggaaaagaggcgtgggttggtagttgtgtccttaacattcaggaatgacatagcctctggagtctacaaactgaagaaactttcatctgatcagccttggaaatccaaagttaaagagcctatgtgtctcttgaggcgggggttagaggattcaaatttgggatgatgctcattgattcctgaccatagcagtgagaggccattttttgtgcaggaaatgtgcttaggactcagtcttgttttcgattatccaccacagaaaccctgagacacagagcagcttagaagtctctacccaggcgtaaatagagctccctactccagaccacctgccacccacctcccaagttgagaacacaagctccagctgggctggagagtcaggcttggtgcagggtgactttggcgaagttttgtcagatccataaagcaaactggaatttgagctttcacttaccctagtatacgttcttaaaaaaaaaaacaaaaaaccttgagggggggccccgtacccaatttggccttttgtgagtcgtattgcaataaactggccgttgttttaca

SEQ ID NO: 4980 - DNA, 1309 bp, Homo sapiens
  misc_feature (11)..(11): n is a, c, g, or t
  misc_feature (15)..(15): n is a, c, g, or t
  misc_feature (23)..(23): n is a, c, g, or t
  misc_feature (51)..(51): n is a, c, g, or t
  misc_feature (57)..(57): n is a, c, g, or t
  misc_feature (790)..(793): n is a, c, g, or t
ctcgacccccnctcncatgaccnccatcgtatccgcggcgagcaggcggantgcggngtcggggggctctcattgtgggcggggcgcaagggaggtttcgagcccggaaggtccggcgcccagagctaacgggagtcccaggttaaacactttaagatgagaaaaattgatctctgtctgagctctgaagggtccgaagtgattttagctacatcaagtgatgaaaaacacccacctgaaaatatcattgatgggaatccagaaacgttttggaccaccacaggaatgtttccccaggaattcattatttgtttccacaaacatgtaaggattgaaaggcttgtaatccaaagttactttgtacagaccttgaagattgaaaaaagcacgtctaaagagccagttgattttgagcaatggattgaaaaagatttggtacacacagaggggcagcttcaaaatgaagaaattgtggcacatgatggctccgctacttacttgagattcattattgtatcagcctttgatcattttgcatctgtgcatagcgtttctgcagaaggaacagtagtctcaaatctttcctcataatgataacaaaatgctcttgcatgattttttaacaatatatttaaacaggaagttgtcactgatatactttattaaaaggatttttatcaaagaaaaaaaaaaaaaaaaaaaaaaaaaaaaaattggcggcgggccgcgaaaaggtttctaaacacattcgtgggggcgggggcccaaggtattggaactggcaaagggnnnnggggggggccccctttaaaaaatccccctagaggggccccaggtttaacgctaacccattttttttttgaaaaaaggggcccccttaaggggggccgattataataagggaggggcggggcgccggtcttttttaaaacccgcgggagtggggaaaaaactggtaacctttgggaaattttttggaaaaaaacccctctctttggggggggggggacatatttgggcaaaccctccccctacgaaaattttagggccttcggggaaaaaaaaaaaatttttatgggggataagaggggggaaaacaaacacccaaaaaattttgcccgcttctgaaaaattttttttcttcgggggtaatgttttttgaaaaatttttttcccccgggggccctgggggttcccaattggtggggggaattttaaaaaaacacaagcccccaaggggtttttttgggggccccctttagcctcacagaggggtgtttttgtgtataaaattccccctcaacccctc

SEQ ID NO: 4981 - DNA, 7862 bp, Homo sapiens
  misc_feature (1117)..(1138): n is a, c, g, or t
  misc_feature (3562)..(3583): n is a, c, g, or t
  misc_feature (4697)..(4704): n is a, c, g, or t
gtttttcgtttttatagaaacacagatctttgtcctaaccacaaggttcccctttggtttatgtggtttcctctggttcctgccaccaccacctccccaggccggggccttcccatccctgcccagtggggagtgggaggaagagcctgggacagtggccatacgtcccgggctgatttctggattgggggttctggggaccagggaggtgcaggtgtctgcagtgtcagaggagccgctgggctcgcccaggtgttgcctgaagccctccgtggcctcttgccccttggactcctgacaggagggacaccagtgtttgctgctcacttctgacagccagacaagggctgtgctcaggggcagctcggctgggcacacagtaggtgctttagcggacagcactgaggcccccagcaagaagcccatgagctcctccccctcccgcagtgccgccgacatctacatccgggagtatttccacagccacgtcagcggcggccaccccgaggccactcctctccgtgtgatgtacacggaccggccgctgagccagacggacccagtcacgctgcagtactgttgcctgaccgacgaccgccaggctttccgcccgcccacacgggcagagctggcgcggcaccgcgtggtggtcaccaccacctcccaggcccgtgagctcagggtgccggtcggcttcttctcccacattctcatcgatgaggcggcccagatgctggagtgcgaggccctcaccccgctggcctacgcctcgcacggcacccgcctcgtgctggcgggcgaccacatgcaggtcacaccccggctgttcagtgtggccagggcccgggcggccgagcacacgctgctgcaccgcctcttcctgtgctaccagcaggagactcacgaggtggcgcggcagagccgcctggtcttccacgagaactaccgctgcacggacgccattgtcagcttcatctcgcggcacttctacgtggccaagggcaaccccatccacgccaggggcaaggttccgccccacccccggcactacccgctcatgttctgccacgtggcgggcaacccagaccgggacatgtccatggcgtcctggctgaannnnnnnnnnnnnnnnnnnnnngtcgagaaggtgcaggaggcctacaacacctggcccagctgctggggcggccgtgagcagaggtgcatctgtgtcgtttcccacggtgcccaggtcagtgcactgaggcaggagctgaggaggcgggacctaggccaggtgtctgtcggcagttttgagatcctgccagggcggcagttccgggtcgtggtgctcagcactgtgcacacctgccagagcctgctcagccctggggcactggcccctgagttcttcaccgacgcccgcgtgctcaacaccgtcctgacccgcgcccagtcccagctggtggtagtgggggacgccgtggccctctgctccttcggggcctgcggcaagctctgggagagcttcatccgtgagtgcgtggagcggcacagtgtctgccccgagggcctgtccatggagcaggtcgagcagggtgtggcgcagagacggcgctggcctccccgaggcacacaggctggggcagcggggaactgggaggctgccccagagccagtaggggacctggccgaggagcaggcggctgtggtgacggccatggtgaaggcagagccgggagatgaggctctgagcccagcatcccgtgacatcacggcaaccacagcgcagacggaggctgcggcagcaccagcaggagacgcagtgaaggaagacgtggtgcccggggcctgtgcggcaggagcggctgctgcagcgggcgtggagtccacggaggctgaggatgcagaggctgacttctggccgtgggacggggagctcaacgctgacgacgccatcctacgggagcttctggacgagagccagaaggtgatggtgaccgtcggggaggacgggctgctggacaccgtcgccaggcccgagtccctgcagcaggcccggctgtacgagaacctgcccccggctgcgctacggaagctgctgcgcgcggagcccgagcggtaccgccactgctctttcgtgccagagaccttcgagcgggcgtcagccatcccgctggacgatgcctcctcgggccccatccaggtcaggggccgcctggactgtgggatggccttcgccggggatgaggtgctggtgcagctcctttcgggagacaaggcgcccgaggggcggcttcggggccgcgtgctgggcgtgctgaagaggaagaggcacgagctggcgtttgtgtgccgcatggacacgtgggacccgcgcatcatggtccccatcaatggctccgtgaccaagatcttcgtggccgagctgaaggacccatcgcaggtccccatctacagcctccggaagggccggctgcagcgtgtggggcttgagaggctcaccgccgaggcccggcacagccggctcttctgggtccaaattgtcctgtggcggcaaggcttctactacccgctgggcatcgtccgggaggtgctgcctgaggccagcacctgggagcagggcctccgcatcctcggcctggagtacagcttgagggtgcccccgtcggaccaggccaccatcaccaaggtgctgcagaaataccacacggagcttggccgggttgccggccgccgagaggactgccgcgccttcttgaccttcactgtggacccccagggcgcctgcaacctcgatgatgccctcagtgtccgagacctgggtcccaggtgcgaggtggctgtgcacatcactgatgtggccagcttcgtgcccagggacggggtgctggacgtggaggcgcgaaggcagggcgctgcgttctatgcccccggcagggagccagtgcccatgctgccggccagcctctgccaggacgtcctcagcctcctgcctggccgggaccgcctggccatctccctgttcctcaccatggagaaggccagtggccagctgaagagcctgcgctttgcaccctccgtggtccagtctgaccgccagctgtcctacgaggaggcggaggaggtgatcaggcagcacccgggtgccggccgtgagctgccggcccgcctggactccgtggacgcctgcgtcgtggccgcgtgctacttctctcggctgctgcgccggcaccgcctgcggtccgactgcttctatgagcagccggacgaggacggcaccctgggcttccgcgcggcccacatcatggtgaaggagtacatgattcagtttaataggctcgtggctgagttcctggtgggcagcgagtgcacgcggacggtcacgcctctgcggtggcagccagcaccccgcagccagcagctcaaggccctgtgtgagaagcatggggaccgggtgcccctgtcactgcacctcggccaccacctgcacggcggcgggggcagtccccccgacacgcggctgcacctcctggcctccctctggaagcaggtccagtttgctgcccgcacccaggactannnnnnnnnnnnnnnnnnnnnnaccacggacgacatgcacccattcctggctcctgcaggccgcgacctccgcaaggccctggagcgctcggcgttcggccgctgcgcccggggccaccagcagcagggcggccactactcgctgcaggtggactggtacacgtgggccacctcgcccatccgcaggtacctggacgtggtgttgcagcggcagatcctgctggcgctgggccatgggggctctgcctactctgccagggacatcgatgggctctgccaggccttcagcctccagcacgcacttgcccagagctatcagcggcgggcgcgcagcctgcacctggccgtgcagctcaaggcccagcctctggacaagctgggcttcgtggtggacgtggaggcgggctcccgctgcttccggctgctcttccccagcaaccgggagacgctgcctgacccctgccccgtcccctacggctccctgcagctggccgagcacccccacgccctggcaggccggccgggcctgcggctcctgtggcggcgccgtgtctactcagcgcagggatccagcccgcccctgccactgcctggcactgtgccggacccacacaccctggccgtggagacggccctgtggaagcagctgctggagctggtggagctgcagcgctggccggaggcggctgctctcatccaggagaagggcgaggcgtcccagcggcgggagctggtgcaggtgcagcggagccactgtggccatttcctggaggtggcccgggagctgggcagtggggacaccctgcaggtgcagctcggcaccagcctgcagcacggcttcctggtaccgagccctcagctctggacggtggcaccgggcttcagcctctgcctggagcacgtggagcggcccggagactgcttctcaggccgtgtgtaccgggccccgagggaccggtaccgcgacgtggatgagtacgcctgcgtgtgggaaccattctgcgccctggagtcggccaccggcgcggttgccgagaatgactccgtcacacttcagcacctgagtgtctcctgggaggcgtcacggacgccgcaggggcagctgcagggcgccttccgcctggaggccgccttcnnnnnnnncacgagtgccgacatcaacttcagctgctgctacctctgcatccggctcgaggggctgctggctcccacggccagcccacgccccgggcccagcagcctcggccctggcctgaatgttgaccccggcacgtatacctgggtggcccacgggcagacggaggactgggaccaggagcgccgggcagaccggcaggaggctcccagacgggtgcacctcttcgtccaccacatgggcatggagaaggttccggaagaggtgctgaggccgggcaccctgttcaccgttgagctgctgcccaagcagcttcctgatctccgcaaggaggaagccgtgcgtggactagaggaggcgtccccgctggtcaccagcatcgcactgggccggcctgtcccgcagcccctctgcagagtgatccccagcaggttcctggagcggcagacctacaacatccccggaggccgccacaagctgaaccccagccagaacgtggcggtcagggaggctctggagaagcctttcacggtcattcagggcccaccaggtacagggaagacgatcgtgggcctccacatcgtattctggtttcataaatcaaaccaggagcaggtgcagcccggaggccccccccgtggggagaagcggctggggggtccctgcatcttgtactgcggcccctccaacaagtcggtggatgtcctggcaggactgctcctgagaaggatggagctgaagcccctccgtgtgtacagtgagcaggctgaggccagcgagttcccagtgccgcgtgtgggcagcaggaagctgctcaggaagagcccccgggaggggaggccgaaccagagcctcaggagcatcaccctgcaccaccggatccggcaggcccccaacccttactcgtcggaaatcaaggcctttgacacccggctgcagagaggggagctcttctccagggaggacctggtctggtacaagaaggtcttgtgggaggctcggaagttcgagctggaccggcatgaggtcatcctctgcacctgctcctgtgcagcctctgccagcctcaaaatcctggacgtgaggcagatccttgttgacgaggcaggcatggccacggaacctgaaaccctcatccccctggtgcagttcccacaggccgagaaggtggttcttctcggagaccacaagcagctgcggcctgtggtcaagaatgagcggctgcaaaacctgggtctggaccggtctctgttcgagcggtaccacgaggacgcacatatgctggacactcagtaccgcatgcatgagggcatctgtgccttcccctctgtggcgttctacaagagcaagctgaagacgtggcagggcctgaggaggccgcccagtgtcctgggccacgctggcaaggagagctgtcctgtcatctttggccacgtgcagggccacgagcggagcctgctggtgtccacggacgaagggaatgagaactccaaggccaacctggaggaggtggctgaggtggtccgtatcaccaagcagctgaccctggggaggaccgtagagccccaggacatcgccgtcctcacgccctacaacgcgcaggcctctgagatcagcaaggcccttcggcgagagggcatcgccggggtggccgtgtcctccatcaccaagagccaggggagcgagtggcgctatgtgctggtgagcaccgtccgcacctgtgccaagagcgacctggaccagcggcccaccaagagctggctcaagaagtttctgggcttcgttgtggaccccaaccaagtgaacgtggctgtcacgcgggcccaggaggggctctgcctgatcggagaccacctccttctgcgctgctgccccctctggcgtagcctcctggacttctgcgaggctcagcagaccctcgtgcctgccggccaggtgcgcgtctgcaggaggccaactatgccttcctgaagagccctctccacctgcaaggtgccaggactgggagggaaagtccagggcccccccaccctccccaccaccctccgccatcagcctgcctgggccagcctgcctcctggcctcaggatctccctggggcaggaagtgggtggacttggaggaggaacggcaagggccggtccccacactcttgcttctcctgggcatctggggacaggaacacctctcagggtggccaagaggggcttccttgggaccagtgtaaggaagttctgctgtccctgggaagtctcagaaccaggaaggaaaccctgtggaggctgccctttgacctttggacgccacctgtaatcactctggatggtgtctgtggagttcaggtttattttctatttaaatgaactaaaagccagcatcctgccgggcgtggtggctcacgcccataatccagcactttgggaagccgaggcgggcagatcacctgaggtcaggagttcgagaccatcctggccaacatggtgaaaccccgtctccactaaaaatacaaaattagctgggcgtggtggcgggcgcctgtaatcccagctacttgggaggctgaggcaggagaatcgcttgactccaggaggcgcaggctgcagtgagctctgatggtaccactgcactccagcctgggtgacagagcgagaccctgtcttaaaaaaaaaaaaacaaaacaaaaccagcatctgttactggaacagagacctcagcccaagctcaggacaaggaggcctccctgggagagggggcctttctcccaccatcaccgcctgtgtccttcaggggctgctggagggcagcccaaagccaggggcccaccccgccccaccccaccccaccccaccctctgaaatgtgaaaagcctgcactcttcctgtgggctgcgcagtgggctcgggggttggggggtgccggggcgatgcttccaccctggactgagtgttcggggcagcctgctcggctgtatgtttctcgcacgctcacccgcttcagtgcggctctgtccctgctgccgcctccagtcctgagggaggggcttgccccaccttctacattccaatttttatatctttgaattatgtgattagatattaatttaatgataaaaccactctgaaagctcaaataaaaaaaaaaaaaaaataggtgcggccctcttgcc

SEQ ID NO: 4982 - DNA, 1758 bp, Homo sapiens
ggggaaagaagaaccatgaggctcatcctgcctgtgggtttgattgctaccactcttgcaattgctcctgtccgctttgacagggagaaggtgttccgcgtgaagccccaggatgaaaaacaagcagacatcataaaggacttggccaaaaccaatgagcttgacttctggtatccaggtgccacccaccacgtagctgctaatatgatggtggatttccgagttagtgagaaggaatcccaagccatccagtctgccttggatcaaaataaaatgcactatgaaatcttgattcatgatctacaagaagagattgagaaacagtttgatgttaaagaagatatcccaggcaggcacagctacgcaaaatacaataattgggaaaagattgtggcttggactgaaaagatgatggataagtatcctgaaatggtctctcgtattaaaattggatctactgttgaagataatccactatatgttctgaagattggggaaaagaatgaaagaagaaaggctatttttatggattgtggcattcacgcacgagaatgggtctccccagcattctgccagtggtttgtctatcaggcaaccaaaacttatgggagaaacaaaattatgaccaaactcttggaccgaatgaatttttacattcttcctgtgttcaatgttgatggatatatttggtcatggacaaagaaccgcatgtggagaaaaaatcgttccaagaaccaaaactccaaatgcatcggcactgacctcaacaggaattttaatgcttcatggaactccattcctaacaccaatgacccatgtgcagataactatcggggctctgcaccagagtccgagaaagagacgaaagctgtcactaatttcattagaagccacctgaatgaaatcaaggtttacatcaccttccattcctactcccagatgctattgtttccctatggatatacatcaaaactgccacctaaccatgaggacttggccaaagttgcaaagattggcactgatgttctatcaactcgatatgaaacccgctacatctatggcccaatagaatcaacaatttacccgatatcaggttcttctttagactgggcttatgacctgggcatcaaacacacatttgcctttgagctccgagataaaggcaaatttggttttctccttccagaatcccggataaagccaacgtgcagagagaccatgctagctgtcaaatttattgccaagtatatcctcaagcatacttcctaaagaactgccctctgtttggaataagccaattaatccttttttgtgcctttcatcagaaagtcaatcttcagttatccccaaatgcagcttctatttcacctgaatccttctcttgctcatttaagtcccatgttactgctgtttgcttttacttactttcagtagcaccataacgaagtagctttaagtgaaaccttttaactacctttctttgctccaagtgaagtttggacccagcagaaagcattattttgaaaggtgatatacagtggggcacagaaaacaaatgaaaaccctcagtttctcacagattttcaccatgtggcttcatcaatttatgtgctaatacaataaaataaaatgcacttaatgctacaaaaaaaaaaaaaaaaaaaaaaaaaaaaatctctgtatttctctatagcattaataatcaatattaatgccattcattcagtctgttaataagaaataatatcttcaattttc

SEQ ID NO: 4983 - DNA, 977 bp, Homo sapiens
  misc_feature (189)..(190): n is a, c, g, or t
acctctgccccaccggcctgtccacgtcccctccgcgcccccaacgcctctccgacatcccccacgacggcaaacgctccttaggcgaatgggcccgcccccctccacgtgccgctcgaaactcataggccaaaggccctcccagttaatgctacccagccgcgctcttccccccattctgacttaagnngcacggcctctttattaaccccggttcagattttctctttttcttctccaaagaaggaaaatcattactcctccttggtggctcctcctcaagctcacaagcatcaaaaaggttaaaaaggtggagaactgaggcacaaaagagggcagtgaagatccggccacctcccctaagcccaggagaagaatgaagaagaaggagagacagccccagaagagacggaagaaatagccatggagggtgcggaaggggaagccgaggaggaggaagaaactgcagaaggagaagaagagcctggagaagacgaagattcctaggccttttcatgcttcatttcttccacttctccagaaaatggaagctatgaagcaacatttcaaatgtctctccacaaaccaaactcaacagaatactttggcttgaagccggcacacccagggttactgaggacttatgctgcctgacctggttagatgtacatggaggtatctcccgaatcatacaaaattaaatgtgaagaccgtttatgcataccttcatgtgcctgacagtcttggcttttgaagatttttttttcttttttgctctgcatagctagaccatcttattaataatactctgaaaaaaatgatttcaaggcatggaagttctctgtgatacaacaatagtatttcttcaaatgcgccttatgctacttatctcagaaacaggttttaaaatgaagtgctttccagagaaccatcatataaataaagattaatagaaaaataaaaaaaaaaaaaaaaaa

SEQ ID NO: 4984 - DNA, 737 bp, Homo sapiens
  misc_feature (708)..(708): n is a, c, g, or t
cggttttttttttttttcttaaattaccataaattaccctttctcgggtatatctttatgccagagtgagaacagacataatacacagggcaagagcttaatacctacaagggtcacagggtgattcagcagtggtttgggtctctgtgttgtacctgggacttgtcatcagggtatatgggtctccctggggtctctgatatgtcactgaccccagacctggacaggagcatggagcaggatcagggttgctcctccaagagccctgaggccgccccaacttaactcaccttcttgcagagctgggggccaggcccagtttatagacagtgtggttgggtggaggggtgaggtggcctctgaaggggcttccctcaccctctggaggtaagaaacagatcttgactctggaggtagggctcagacacaggaccaaattgaggactagccaaaacagggacagagcggaagcatctttccattggacacgcccaccagtgtgccatgtcagtttgccatcaccatggcaacactcaggagctactgcccttttccatggcaaagacccgatgacccggaaataaccaccctttccctagaaatttctgcataaaccagtccttaatctgcatgcaattaaaagtaggtataaatatggtgcagaactgccctgagctgctattctctgcctggggagaagccctgctnctgcacgagcagtcatggagctgtagtcc

SEQ ID NO: 4985 - DNA, 689 bp, Homo sapiens
tatgattgcttgagtacagttccttggaaaggacacaaggggtttcataaagcggtactaaaaatctgcttttctccctagcatttaccaacaaccttgcgatccgatggcttgaaataatggtcagagtgcatgttacccaacttctcctgggctgctcctactctgtcacactgcacacagatcatgcccgccaccaccctacactccccgacctcacccaccagtcaggacagtttaaggtcctggctggacgcaccacggcgtgtgttggctcgtggttgtacttttcatgagtagcagggaagatacactccaggaaggcgggatacaaattattgaactgtgtgacttaaaagctccagtgagtttcgtcggaagtataggagtttgaaagtgctccccagtcaaacccagaactacatagggtcagccgtggttgagctaatttctgcttacacatgtgtggagggtgtcattttctgactacgcctaggcatgagtggacagccgattaaaagatgtaaattcgtggattgtatcaaggagagcgggttccatctttgtggtcaggagggggcccactcttttgttccgcaaagggtttatctggatgttccttgctggaagttgcttttccagtttggatcaaaccacttaagtggagctccagcctcagtccttgcaat

SEQ ID NO: 4986 - DNA, 578 bp, Homo sapiens
tctcatttccacaattcttttattgataaagttcagaatatattgagtacaattttttttttgtaacgagatctgttaacgagacaagtggatttcttattttttgggagaataacatttcaagtcattgggattcaaagagtgttccataccatcaaattgactgcaacgtttatatgtacaaataattcttagctcatgactgtacaaaaattgggagctcagttatagtttggtgattgctgtggtactcctgtgattggggtggagcccaggaatctgcattttacatgcctctcacatgattctggtaatgggccatggacccaatggactatccaatcctcggaatctctgtccaccaaaggggcctgtggttttgcagtgcgagaacccggctgtgcacctaccagttgctcaacctctccaaaaatcagatgattcatcctcacaacaggggtggcattgcactgcttggcctacccttaaagagttgctgggatgattaagtgagatgatccatgaggtgctatgagcatactatgtcccagatactaaagacatgcaagttatgttga

SEQ ID NO: 4987 - DNA, 4826 bp, Homo sapiens
  misc_feature (1556)..(1574): n is a, c, g, or t
gtctagcctcaggttatcactctccctgggatcctgggcatctttcactacccccaaatttcagacattggagtcaggacagagaggtgttaggaaccccaatctgatttgaacaggctttctagaggcataattgtggccatttaccacagtctctgtcccttgcatctgtagagctggttgtagtagaggcagggattcccaggagctatcatcgtcttcaaagcagtgatctgtctgagacctgaagatgctcagtaaaagttacccttaccacttggggtcctcatgtgaggcaagggtggctcccctccacccacgcctgctggtttgaagcaagccagctgccatggatgaataggcagataacagctggcgccatgttggacttctcaggcaggagccccaaccatctcttctgtccattttggtaggtggcacctctgagcatgagaagctgtgccgggcccgggaccagtgccgggagattctcaagtatgtgaatgaagcggtaaaacaaacagagaaccgccaccgtttagagggctaccagaaacgcctggatgccaccgccctggagagggccagcaaccccctggcagcagagttcaagagcctggatcttacaaccagaaaaatgatccatgagggacccctgacctggaggatcagcaaggataagaccttggacctccacgtgctgctgctggaggacctcctagtgctgctacagaaacaggatgagaagctattgctgaagtgccacagcaagactgctgtgggctcctcagacagcaagcagaccttcagccccgtgctcaagctcaatgctgtgctcatccgctctgtggccacagataaacgggccttcttcatcatctgcacctccaagctgggcccaccccagatctatgagctggttgcattgacgtcatcagacaagaacacatggatggagctcttagaagaggccgtgcggaatgccaccaggcaccccggagctgccccaatgcccgtccatcctccacccccaggtccccgggagccagcccagcagggccccacacccagcagggtagaactggatgactcagacgtgttccatggtgaacctgaacctgaggagctgcctggaggcactgggtcccagcagagggtccaagggaagcaccaggtcctgctagaggaccctgagcaggagggcagtgcagaggaagaggaactgggtgtcctgccttgcccttccacatccctggatggagagaacaggggcatcaggacaaggaaccccatccacttggccttcccaggccctctgttcatggaagggctcgctgactccgctctggaagatggtgagtgcttcaaggccctgcgtcagcccctggtccccagtcgcacacccagtgtgaactggcaggcgcctgcaccctccaccttcccgaaggctcttcctggtgtgcttgaggagagatggatgcggagacagatgtcattccccacccaacccccaccagctagttggccagagccctccagcttcacctgtgcctgannnnnnnnnnnnnnnnnnngtggggcagtacaacgatccttctggcgtggtgtgcagtcccatgctgggaagacatcaccctgtttcccctccagtggagaacctgcgacatctgatcctgtggagcctgctgccaggtcacaccatggaaactcaggctgcccaggagcccgaggacgacctgacacccacaccttctgtcatcagcgtcacctctcacccctgggacccaggctccccagggcaagcaccccctgggggtgaaggggacaacacccagcttgcagggctggagggggaacggccagagcaggaagacatgggtctctgttctctggaacacctacccccaaggaccagaaattctgggatatgggagtctccagaactggacaggaatctggctgaagatgcttcaagcacagaggcagcaggaggttacaaagttgtgagaaaaggtaaaataaatgggagtgtccagtggggagacaagcacccttgctaggtgagataagtcttccgaacagctgcttccttccctatactccccctgggtaccgtgtgagcagagacctacgctgggtcctggaagaaggagacaacgccgatatcaggcaggctttggagttggacattcgagattcagagcttagctctgccacttaatatctgtgtggctttagacaaaattctgaatcatctctgaactttgttttatagcacataaggacatttctttctgcctggcacaaaccaactaccagtaccagtctctgttagtgctcctcactgatctcctgttcccagggaaaagagccactcttctcaggagcctcaggccgggaaagacagggcaggtgcatgcagcccctcacgccaggcaacagctccaagggcagtagaggtggcagctgggactggaaggggtggaggacaaagctgggaagacatttggcgagtgagggatgtggggagtgaacaaggtggcagggagggcaccccggattgggaaacaccatggacggccttgagacaagaaaagccaagacaagctcacagggaggccaatagatgagcccagggaggaaggtccccaccccgggaagagtgggctggtctgagagggtggcaagaaaagtagaacaaagcctggggcacacatgggatggggttccacgctagtgggcctgccctcccctgggattccactctgcctcccttccagcagcatttttcattccatctgcccaagggccacctgtctcctgggtttctgggaactgaccttccttctctgtctctcggtgaattggtggaaagttctctgcactgcctgggatgtcatcgtgtatgatcttgtgttcaccttgttcttcccattttctcctccccctgtccccacctcctgccctctctccttcctgttctctctcccttccctttccttgtgttttggtctctcctcttcctggtggtggtggtgtcggtgcagctgaggtggcaggcagcaaggttgtccctgcactaccagagagtggccagtcagagcctgggccacctgaagtggaaggcggaacaaaggctacggggaactgcttttatgtcagcatgccatcaggacccccggactcaagcaccgaccactcagaggcacccatgagcccccctcagcctgacagcctccctgcagggcagacagagcctcagcctcagctgcagggaggcaacgatgatccaagacgccccagccgctctcctccaggcctggccctcagggacgtgggcatgatcttccgtaccattgagcagctcactctcaagctcaacaggctcaaggatatggagctggcccacagagagctgctcaagtcccttgggggagagtcatctggtggcaccacgcctgtgggcagtttccacacagaagcagctagatggacagatggctccctctcacctcccgctaaggagcccctagcttctgactccaggaacagccatgaactggggccctgccctgaggatggctctgacgcccccctggaagacagcacagcagacgcagccgcgtcaccaggaccataaccgtacaaaccaccaaatcctctgcgtccccactcctccttcagggactggcctgagaccggggcacagggtaggggggatcccaacactcctccctgtggaggaggcagttagggaaactaggatccagccaaggcccggggggagacccgcatgttgcttggtctgctcaagtcggagtcaggtttcagtgtcttttccctcccttagcccaaccctccaaggcctcatgtctcctaagcatgctgactgcatccgaaaggcccccactcaccatggtctgccctcaccccacatatgtgtgtacacgcgcacgcctgtatgtgcgctgccctcagacatgcaagtgaaaggaggaggcttctgtgtaaatgcactttcttcctcccctctttctccataagaccccaggcagaggtgggtgcctcccctcccctctttgtcactttggtttcctataaatatgtatgtatcgtatgtgcatctttgctattgtaaataactttgaccttttttgttcctgttcctgaagtgctggaggcagttatggaaggagctgcttagggaagaggggtttcacttgtatctccttagttaacaacccagttccaggatcgagcctaaagcgggagccaggcctgagtgttcctgtccctgtgagtgggaaggtcttctggctccccatcccacctggctccagagcctgccctccacagcttgctgccaagctactccctccctccctggacttctcatcttcacaagatggggatcatgggggtttcttaccccacctatgtccccctcttccccaccctgtccctgtagaaaaccagtgaagcaggtacggagctgaggactgggccccaggaggtggggacaggggtctgaatgccgagtccctgaattcacccaggaccatccaaggggccaccgcagcattggccccatcaccacgtcctcacccaactctccctgatgaatagaatatacacactgtgctaggtgtatatatacatatatatatatataaatatatatataatatataaaatatagatatggaaatgactgttctgctgttaagataatgtatactcttttattttcttcctttcatggttaagattttttttttaagaaaagttaaatatcaaaaaaaaaaaaaaaaaaaaaaaaaaaaaaa

SEQ ID NO: 4988 - DNA, 1570 bp, Homo sapiens
  misc_feature (2)..(2): n is a, c, g, or t
tnggtcaggaattctcgggatgcctgtcccagtgaggacagggacacagtactcggccacaccatggggcgcccactgcacctcgtcctgctcagtgcctccctggctggcctcctgctgctcggggaaagtctgttcatccgcagggagcaggccaacaacatcctggcgagggtcacgagggccaattcctttcttgaagagatgaagaaaggacacctcgaaagagagtgcatggaagagacctgctcatacgaagaggcccgcgaggtctttgaggacagcgacaagacgaatgaattctggaataaatacaaagatggcgaccagtgtgagaccagtccttgccagaaccagggcaaatgtaaagacggcctcggggaatacacctgcacctgtttagaaggattcgaaggcaaaaactgtgaattattcacacggaagctctgcagcctggacaacggggactgtgaccagttctgccacgaggaacagaactctgtggtgtgctcctgcgcccgcgggtacaccctggctgacaacggcaaggcctgcattcccacagggccctacccctgtgggaaacagaccctggaacgcaggaagaggtcagtggcccaggccaccagcagcagcggggaggcccctgacagcatcacatggaagccatatgatgcagccgacctggaccccaccgagaaccccttcgacctgcttgacttcaaccagacgcagcctgagaggggcgacaacaacctcaccaggatcgtgggaggccaggaatgcaaggacggggagtgtccctggcaggccctgctcatcaatgaggaaaacgagggtttctgtggtggaaccattctgagcgagttctacatcctaacggcagcccactgtctctaccaagccaagagattcaaggtgagggtaggggaccggaacacggagcaggaggagggcggtgaggcggtgcacgaggtggaggtggtcatcaagcacaaccggttcacaaaggagacctatgacttcgacatcgccgtgctccggctcaagacccccatcaccttccgcatgaacgtggcgcctgcctgcctccccgagcgtgactgggccgagtccacgctgatgacgcagaagacggggattgtgagcggcttcgggcgcacccacgagaagggccggcagtccaccaggctcaagatgctggaggtgccctacgtggaccgcaacagctgcaagctgtccagcagcttcatcatcacccagaacatgttctgtgccggctacgacaccaagcaggaggatgcctgccagggggacagcgggggcccgcacgtcacccgcttcaaggacacctacttcgtgacaggcatcgtcagctggggagagggctgtgcccgtaaggggaagtacgggatctacaccaaggtcaccgccttcctcaagtggatcgacaggtccatgaaaaccaggggcttgcccaaggccaagagccatgccccggaggtcataacgtcctctccattaaagtgagatcccactcaaaaaaaaaaaaaaaaaaaaaaaaaaaaaa

SEQ ID NO: 4989 - DNA, 2141 bp, Homo sapiens
  misc_feature (426)..(427): n is a, c, g, or t
agcggactgtagggtgcgaaggggccggcgccgctgccgagttacgagtcggcgaaagcggcgggaagttcgtactgggcagaacgcgacgggtctgcggcttaggtgaaaatgcctcgtgtaaaagcagctcaagctggaagacagagctctgcaaagagacatcttgcagaacaatttgcagttggagagataataactgacatggcaaaaaaggaatggaaagtaggattacccattggccaaggaggctttggctgtatatatcttgctgatatgaattcttcagagtcagttggcagtgatgcaccttgtgttgtaaaagtggaacccagtgacaatggacctctttttactgaattaaagttctaccaacgagctgcaaaaccagagcaaattcagaaatggattcgtacccgtaagctnnagtacctgggtgttcctaagtattgggggtctggtctacatgacaaaaatggaaaaagttacaggtttatgataatggatcgctttgggagtgaccttcagaaaatatatgaagcaaatgccaaaaggttttctcggaaaactgtcttgcagctaagcttaagaattctggatattctggaatatattcacgagcatgagtatgtgcatggagatatcaaggcctcaaatcttcttctgaactacaagaatcctgaccaggtgtacttggtagattatggccttgcttatcggtactgcccagaaggagttcataaagaatacaaagaagaccccaaaagatgtcacgatggcactattgaattcacgagcatcgatgcacacaatggtgtggccccatcaagacgtggtgatttggaaatacttggttattgcatgatccaatggcttactggccatcttccttgggaggataatttgaaagatcctaaatatgttagagattccaaaattagatacagagaaaatattgcaagtttgatggacaaatgttttcctgagaaaaacaaacagggtgaaattgccaaatacatggaaacagtgaaattactagactacactgaaaaacctctttatgaaaatttacgtgacattcttttgcaaggactaaaagctataggaagtaaggatgatggcaaattggacctcagtgttgtggagaatggaggtttgaaagcaaaaacaataacaaagaagcgaaagaaagaaattgaagaaagcaaggaacctggtgttgaagatacggaatggtcaaacacacagacagaggaggccatacagacccgttcaagaaccagaaagagagtccagaagtaattcagatgctgtgaaccagatttccttttctttgttttcttttgacttttttctccttttctatttgaactgttttattttcctgtgagtcttgcgaggtggaagtaatgattaaatactcatgtgttcagaaaacataaactttttttataaaaatattttgtacaattcattaaaggctaatttatgaaatttgaaaatcttcaggttatactccttaagttatcccaaagccgtgtgtttgtgatgttttggagtacatatatatgaaaattattatgacacgcacttttctaatcattgtacatttctcagagtggataaaaatgtttgacaaagtcctcacttttaaggaaatgcaaagcttaaaataaaactctcttttgtttgatgcagaacacaaaaaaaaaaaaaaaaaaaaaaaaaaaaatcaatataaaaaagggggggcgcagccaaaaagtttccccggggggggccaaagtatacgggtacccaggttttgtgtgacaagggggccccatatggggagcgagatttatataaggtatgcgcatgtggcactaattatacaacacctcagaccagcgggcaaaccccgtcacgacggagaaaatccggggacgaagaaacacccttactcgcaggcggggaccacattattgtgcaaccaacattccccttaaaggattttacaaggccctccaagggaacaaatatatacaaccttgtcaaagggggccaaacgcgtgtaaacacaccgcgtcacataagcctgcgtgttagaaaaaatttggtgcaactaggaaatgtcatatctcgagcaaatttctattcac

SEQ ID NO: 4990 - DNA, 4340 bp, Homo sapiens
  misc_feature (2616)..(2640): n is a, c, g, or t
cggcagggagaaggtggatgaaggggccgccaggagggagctgaatggctttctcctggcctgtcctggcttgttgggcatggctcagtatcactcacagtgagagactgagccatgtttcccagccaagggtctctacgagcaggctaggaagatgctgcagtgagtccttctacctgtcttctccaaatgtactttcaagcctgctgggatggccctgcaaggcaggccaccatgcacagctttactcacagcccctggccaggactgccaaggctggcctcatgcagtgagtccggagggaagaccctaaagcttagagctggaagggcccagccctggcaccgactccctggggtgtggttcagggatgactgggacctgcccaaggccgcgcagtcctctgggaggaggcagggcttctaacacagtgcatttgggcttcaagttcatggctctttccagttctcagattacaggcagcaagcagccaagtaacagagaattcctatttccaagtagggaaattgaggccaaagcagattaaggttctcagctgaggtgatgctgtgagctgggggtgtggtctccagtgacccagatgtgaaccagagctgacccaggctgttggtgcccctggaatcctggagagaactctgccttcctattttctccttgtcccctgaggcgacttttcttgagtagatttcctagtggatttcaggagggcagggtaaaaacatgtttagaccacgagagaaaggggctgggaaagttcaggggtctttccatgtcagcacgcttggagcctgcacacctagaaaagaatatggctgcttcgagtgcagcaggaaggatgcaggttagacttaagcaggaacttccaggccttggagaatgtccacctggtaagaagttctccaagatccttttgcgggcttctcctagaggttattaaatattcccactcttgatataaaccctaactagtgtagtgatggcacattagagttgaccaggggctgcattagaaacatctcaccgtttcttcagcccagccctgccaggtgagtgggacagtgctgactgttttgcaggccagggacctgagccttaggagcatgagggggactttggattctagatgtttcttgcttctctgcccctgtatcctacccgctggagcacacggttggggtggacacttcctggaggcagaagagtggaggagatggccttctgagttctccttggcatcctgctttggatgtggtggcgaggaccgtccctgtcctcagctctattcctctgagttgttgtggccaagagagaatgcagagtctcactccttagccttgttctatctcctcttgggccttgttctgctccaagtatgaagtgttcagttctccagaggggcccgacctgggaaagtagagaaaccacgtggcctggggccctggcagggagccaagtcattccttgggcctggggccagcctgctgcagccaggagctcgggcatgtggaggaaggtccctgctgctggccaggctgggcatgcatgccatgtggtcgccttacacatgcaggcatggccagagagagggaagcagatggggttgaagtgggggctatacattccagctcagcagccgccaccctaagacccagggagctctggggtgactgctggaaatggctctgccacttagtagcggagggatgaggcaaggtatgggtgagggggtcttgggtgtgttctgggctgcagtctccccattggtgtaatgaggtggtgaacatcaagaacgtctcgggtcctttcatccttagaccatctgtgattgttccaatcagagatttgttccagcacctttaaagctcttttttccaaccactgtgctcttaattacaaaccctagattcctagaggtcatctgcttgacccctccattggaagggagattgaagatggagacaggggttgactcccggaggccctcagcgtgtccaagcagaaccagtcctcagcatcaatcatgccattcctttttgcacattagctcagggctctaatgagccctcggagagcctgtaggctggttctagttcatctgttcattcagtgtccagttgtagctaagagaacagcttctggagtcacactgcctaggttcgaatctcatctctgctatgccagggctgtgtgactttggaaacatttcctagcctttcagaatcacagtttcctcatctcaaaaattcagccaataatagggacctgttgggtggtcacgctgttggggtttactgttgctatgattgtttcatcccaccatcatcgccctctggctagactcaggctgcattttgtctgcagaggttactcccctccagaaactgactcaaaattctgatgaccgtctctcccttgcttatacctcagagacattccctcacatggctgaggcctcccatgtggcagtgaggcaccctcactgaggcacccttcatgtggcatctcagctcatcctcacagcactcccttttggatggcaaagagaactgaggccccaagaggcctgtgggtggtgcagtcaggactgtcttgggnnnnnnnnnnnnnnnnnnnnnnnnntctgaatgcagacccatgggtctgagacctgcctggcagctgctgtatgtgaatatattgggcatcacagggtcctaaaggatccttagagatcacacacctccaacctgagcaggacagagggtcaagtgtgggggcctgcccaaggtcagacagccagcctagaggagagccagggctcatctgcaggccatctccatatgctggacttggagaacagggcaggactacaagttctgtcccttgtaggccatgtggagtcagccaggtgcccagccagacaacattgcccttgtctcaaggagttgctttcctctcctaccaggttcttctaccccaaagttcagaggccagaggtgggaactcaatgccttcagaaggtgccctggctggacgccatggctcacacctgtaatcccaacactttgggaggccaaggcaggcagatcgcttgagcccaaggagttcgagaccagcttgggcaacatggagaaaccccatctttaccaaaaatacaaaaattagccaggtgtagtggtgtgcatctgtaatcccagctacttgggaggctgaggcggcaggatcactaggaggcagaggttgcagtgagcagttatcacagcactgcacttcagcctgtatgacagagtgagaccctgtatcatgaaaaaaaaaaaaaggaattccctgttatgacagagagatgatgaaagtaggcagggctgtgttcctttgtgtagcctgtatatattttccatatgtagagccctgattaacttcaaggacaaacactggctggagaaagccagactgatgggaatgagactttggccaaaaatcccaaaacatcattttcaatcagtaaagaagtgcttagggttgaaaattgatttcatttgctactgaatttggtaaatcctgggtaacttttatcaagatgaagacattttaccctacctactctagaaatatacaacaatgttatattttacactccttggaaacatttgaggaaaaaaatgcaatttgcacttcactttgttggaatatcccatagcactcaataaactcagctgctagagtgccgatgtcaggagggctgtgtcgggtaatgcgtgtggctgaatgggcataaccactgtggcttcttgtgctgcagaagctcgttgacaagactgaggaggatttcaagagcaaccaagtaaagtcatgcattttctaattttgtgtatatggaatatatttttaaatagagatttttctactttagataatgtgttaatattgctattacctaggttaagcactattgtctgtgctagtaagaaaaagaaaggaaaaccatcattgctttatagtagcttatatcaatttagatttcatcattactattttgcatactggaatttataaatgtgtaaattatcattttcttagttttgtaataccttttttatttgtgaataaaattatcacctggtattcttaaaaaaaaaaaaaaaaaaaaaaaaaaaaaaaaaaaaaaaaccctccaaggggcccccaaagcttaccgcgtacgccagccttttcctggtaccaaagtgggaccccctaatagggggaggccgcaatttaataaggcttaagggccactgggccccgctcgttttttaacaaaacaaccgcggtgaacctgggggaaaaaaattcggctttaa

SEQ ID NO: 4991 - DNA, 2546 bp, Homo sapiens
  misc_feature (1948)..(1963): n is a, c, g, or t
cagcggcggcccaggaggcagccggtgagcgcctgcgagcagagtggcgggggccgctgacaggtcccgcgcagcccagcccagcccagccacgcggctcacaggtggggtccaagagcagtttggagcaacccggcgctacggagaggggtggacggctctgcacgggcctcctgtctcccgctcgggcagagggactcggggggacctcgctccttggccgagagaacctgaactcgggcggagagaacgcgcccaggcgggcaaggggaccagagaaagccggggctggaagtcactgtcgctcgccactgtctggagcgcacggagcgcagaggcccggcagccgcgcgtgccctcccggggaccgagccagtgatgcaggatcgctgagcggagatccgcgccgagaagtctctcggggccggggctgagacgcacgccttcgacaccgctgccaagaccccgattccggcgactcttgcggggaaccgaggggccaaggctgccccaagctcaggacttgggcgagtctaagacgatggtttcttaagcacggacccgcgttccccttcccgccccctcgactggaggcagggatcctgcgcggggcccccgggattccgtttccccgcggagccccggccgctgcctcccgggacagttcgcacggccacaggggcgcacggcgatgtggcctccgtccagcgcgctggcccgccggggggatgctctggcacctgtcggggtccaggcctagcatggccggcgcgttgcccgacgtcgcctccggctaggatggcccctccgggcccggccagtgccctctccacctcggccgagccgctgtcccgcagcatcttccggaagttcttgctgatgctctgctccctgctcacgtccctttacgtcttctactgcctggccgagcgctgccagaccctgtccggccccgtcgtggggctgtccggcggcggcgaggaggcgggggcccctggtggcggcgtcctggccggaggcccgagggagctggcggtgtggccggcggcggcacagagaaagcgcctcctgcaactgccgcagtggcggaggcgccggccgcccgcgccccgcgacgacggcgaggaggcggcctgggaagaagagtcccctggcctgtcagggggtccgggcggctccggggccggaagcaccgtggccgaggccccgccggggaccctggcgctgctcctggacgaaggcagcaagcagctgccgcaggccatcatcatcggagtgaagaagggcggcacgcgggcgctgctggagttcctgcgcgtgcaccccgacgtgcgcgccgtgggcgccgagccccacttcttcgaccgcagctacgacaagggcctcgcctggtaccgggacctgatgcccagaaccctggacgggcagatcaccatggagaagacgcccagttacttcgtcacgcgggaggcccccgcgcgcatctcggccatgtccaaggacaccaagctcatcgtggtggtgcgggacccggtgaccagggccatctcggactacacgcagacgctgtccaagcggcccgacatccccaccttcgagagcttgacgttcaaaaacaggacagcgggcctcatcgacacgtcgtggagcgccatccagatcggcatctacgccaagcacctggagcactggctgcgccacttccccatccgccagatgctcttcgtgagcggcgagcggctcatcagcgacccggccggggagctgggccgcgtgcaagacttcctgggcctcaagaggatcatcacggacaagcacttctacttcaacaagaccaagggcttcccctgcctgaagaaggcggagggcagcagccggccccattgcctgggcaagaccaagggcaggacccatcctgagatcgaccgcgaggtggtgcgcaggctgnnnnnnnnnnnnnnnnctttcaacctcaagttctaccagatgaccgggcacgactttggctgggatggataaccatataatttaaaaagaaaaaaaaaatcaaaatataatatatttttttaccaatcggtagagaagagacagtttaatatttgtgctgaaaatatgtttcagtatttttttcaatgaatgttaagagattgttctcactcccgccccatcttaatgtataaccaacaccaaacacgtggatcaacagaaaaggaaaatttcactcgtctaaacactttcaattttcagtttttattttatgttctatatacccagtcataaagtataagcatcagttgtcattaaaagttttcagaaaatcttgaggttaaacatctctctctctttttttaaaatacaaggccctgataaaattgatatctatccttatatttttctccctttttcccgtgccactttttcttaaattatttcccagttagtattatcatatgtttgtacccgtcacagttttcatagtgctttcaaatacacctttttgatcattaaaataaaaaaataaatcttggaaaaaaaaaaaaaaaaaa

SEQ ID NO: 4992 - DNA, 8100 bp, Homo sapiens
agcgggcgcagcggccgaggtggcggcggctgcagctgcggcggcgcgctccgagcctgcgtctagggcgcccccgggtcagagctgtcgccgtggccgccgctgcaaagaacaatgtaccgcaagcagcgctcgctcctccgtttcttcccaccggcctaaagacgacggcgggggcggcccgcgcagcggccgcagctctggctcctcttcaggcccggctcgccgcagctcaccgccgccttccgccctccggctcctcgtcgcggaccccggctcgccgaccccgctcgccctcaaggcaccgcggccgccgggcctcgccgtccccgccacgggttcgtcgcgtctccccgtccccgcctcgggcccgtcgcggctccccgtcgccaccgcggggccgacgactcttcccgccgggcccggccggcttcagaggcagcagccgaggggagtcccgcgccgactatgcccgggacggccgcggagaccatccaggcgacagcggcagccggagacgctctcctggtctgtgttctgactctttggaaaagagcttaaggatcactgttggcaatgaccacttctgtgttagcacaccagaacggcgacggcttagtgatcggctggggtcaccagtggataatctggaagacatggacagggatgacctgactgatgattctgtcttcactcgaagctcccagtgctctcggggtcttgagcgatatatttcccaggaggaagggcctctcagtcccttcttgggacaacttgatgaggactaccgaacaaaagaaactttcctgcatcgatctgattatagtccccatatcagttgtcatgatgagctgttgcggggaacagaacggaatcgagaaaaactcaaaggctactccatacgatctgaagaaaggagccgggaggccaaaagaccccgttatgatgacacagtgaagataaacagcatgggaggggatcacccaagttttacatcaggaactcgcaactatcgacagcgtagaagaagcccaagtcctaggtttctcgaccctgagtttcgagaactggatcttgccagacgaaagcgagaggaagaggaggagcgaagtaggagcttgagtcaggagctggttggggttgatggtggtggtactggctgttccatccctggattgtcaggtgtcctaacagcatcggagccaggatattctttgcatcggcctgaggaagtatctgtgatgcccaagaaatccattttgaagaagcggattgaggtggacataatggagccctccatgcagcttgagagtttttccagcagtaccagctccagccaggatcaccctctctactctgggcacccatcccttccactaagtggtgctattgctgcttttgcctcagagattgaaaacaaggggactatggtagagactgccttgaaggaacctcagggcaacctctaccaatggggtccccttcctgggattcccaaagacaacagtcctctcagagaaaaatttggaagttttctatgccacaaggataatttggatttgaaggctgagggacctgagcgacacacagacttcctgctgccccatgagagagctagccaggatggcagtggtttttcccgcattctgagcatgttggctgattctaccagtacacaggaaaaaaggcgacgtagctttcccgacattgaagatgaggagaaatttctctatggggatgaagaagaggatttaaaggcagaatccgtaccaaagccccttgggagctctgagagtgaagttatgaggcagaaggcaagctccctgccgtcttcagctccagctgtaaagctagaatcactagaagagaccaatccagaatatgcgaagatccatgacttgctcaagacaatagggctggatattggagtagcagagattagtcaattggctgcacgcacccaggaacgacttcatggcaagaagccatcattacgctcctcagctgaccgccgttcctcagttgaccgatacttttcagctgaccactgttcctcagttgaccaccgcttctcagctgaccgctgttcctcagttgaccactgcttctcagctgatcgacgttcctcagatccccacagactagagagcagggaggcacatcatagcaatacccactctccagaggtgtcccatccacacccaccttctcctgtggatccttacctgctcacaaaaaacagccctccattcctaaagtctgaccatccagtgggtcatatttcaggaccagaggtggttggtagtgggtttcagtcatctgttgcagtcaggtgcatgttgccatcagccccatctgccccaattagacttccacacactgctgctttatctcagtttcacatgccaagggcctctcagtttgctgcagctcggatacctccgaactaccagggacctgccattccccctgcctcttttgatgcctataggcactacatggcatatgcagcctccagatggcccatgtatcccacctctcaaccgtcaaaccaccctgtacctgaaccacacaggataatgccaataaccaaacaagctactcgtagccgtcccaatcttcgtgtgatccccactgtgactcctgataagcctaagcagaaagagtctctgcgaggctcaattcctgcggcccaagtgcctgtccaggtgtccattccatcactcataagatataatccagagaagatctctgatgagaagaaccgtgcttcccagaagcaaaaggttattgaagagagggaaaaactaaagaatgaccgggaagcccgccagaagaagatgtactatcttaggaccgagttagagcggcttcataaacaacaaggagaaatgctgcgcaagaaacgaagggagaaggatggccacaaagatcctctcttggtggaggtgagtcggcttcaggataacattatgaaggacattgcagagctacggcaagaggcagaagaggcagaaaagaagcaatctgaactggacaaagtggctcagatcttgggaattaacattttcgataaatcccagaagtctttaagtgacagtagagagcctacagagaagcctgggaaagcagaaaaatctaagagcccagaaaaagtgtcatcgttctcaaactcctcctccaacaaggaatcaaaagtaaacaatgagaagttttgtattaagagccccaagcctgccgaaagcccccagtcagccactaagcagttggatcagcccactgctgcttatgagtattatgatgctggcaatcactggtgcaaagactgcaacaccatctgtgggaccatgtttgatttcttcactcatatgcacaataagaagcacacacagacactggatccctacaacagaccttgggcttcaaagacccagagtgaggccaagcaagatgccataaagcgcactgacaagataactgttcctgcaaaaggctctgagtttctggttcccatcagtggattttattgccagctctgtgaggaatttttgggggatccaatttctggggagcaacatgtgaagggtcaccaacacaatgagaaatacaagaaatatgtggatgaaaacccattatatgaggagcggcggaatctggaccgccaagctggcttggctgtggtcctagagacagaacggcgacggcagagtgagctaaagcgcaaacttagtgagaaaccaaaggaggagaagaaagaaaaaaaggcaaaggctgtgaaagaagtaaaggaggatgacaaggtctctgagaaattagaagaccaactctctgagggtaggaactcccctgaaaaagctgaaaataaaaggaacactggcatcaaactccagtttaaagaagaagtaaagaaggaatcaccaacatcatcttcttttgggaaattcagctggaagaagcccgaaaaagaagaggagaaaagttccttggtgaccccaagtatctctaaagaagagattctagaaagtagtaaggacaaagaggatggcaaaactgaagctgggaaggcaaagcctatcaaaatcaagctctctgggaaaactgttgttgcacataccagcccttggatgcctgttgtgacaacttccacacagactaagatcggacccaacctgcctattccatccacagtactccgcaagtcatgttcagccacaatgagcaagccagctcctcttaacacctttctgtctattaagtcctctggaaccactgctaaacctctgccagtggttaaagagtcttcagctgatctcctcttacctccagacatcatctccaaagcatttggaggggaagaggtgattctaaaagggtctccagaggaaaaagtggtgttggctgaaaagagtgagccatctcatttacctgaacaaatactaccacctcctccaccacccccacctccaccacctccaccaccccccgttatacctcatccagctgccccgtctgctgctcaagcaaatgctatcttggctccagtaaaatcaaacccagttgtatctcaaactctcagccctggcttcgtgggtcctaacattttgaacccagtgttgcctgtagccatcatggcctcagcacagccagctgccattccttctgatgagacagctcctggggtgagtgagagtgaccgagaccagaccctgttctctgtgttagtacgtcctccaccacccctctcaagtgtgttcagtgaacaagccaaaaaattagagaagcgaaattcatgcttagccacagccaatgctaaggacctgtatgacatattctatagtagtggtggaaagggggcccctgagactaagggggcccctgagactaagctaagtggtggtccattggccaatggggaaaatagcaacctctctagaaccaaaagttcagacacctcttctacttctcctttgaacagcagtgcatcccaagaggagttgcatcaagatgagggtttggtcgctgctcctatagttagcaactctgaaaagcccattgcaaaaactctggtggccctagggaaatggtcagttgtagaacatgtaggcccaaaaagcacaggcagcacctatggcttcctacagcctctgacaaggttgtgccaaagcaggccttatgaaacaattaccccaaagacagacactttggccatatggacctctagttccttccagagtgacactagtagggatatatctccagagaagagtgagcttgacctgggagagccaggaccacctggtgtagaaccacctcctcaactgttagatatacagtgcaaagaatctcagaagttggtagaaatccacctcagagaatctgttaaccaggataaggaaagccaagagctccgtaaatctgaggattgtagagaaagtgagatagagacaaacactgaactaaaagaaagggtaaaggagctgtctgaggggatagttgatgagggagcaagtaccagcattggaccccacagcatagatgattctaatttgaaccatggaaacagatacatgtgggagggagaagtaaaacagcccaacttgctaatgattgacaaagaggctgaacagtccaataaattgatgacaggaagtgaaactccaagtaaagtagtgatcaaattgagtccacaggcttgctctttcacaaaggcaaaattagactcatttttatcagaagctaggtctttactcaacccacaagatacacctgtgaaaatttctgccccagagttgctgcttcattccccagccagatcagctatgtgtttaacaggtagtccacaagagcaaggagtttcagttgttagtgaggaggggctagagaattcagctccagaatcagcttctagaacttctaggtacagaagtctcaaactcaagagagaaagatcaaaagactttcaagttaaaaagatctatgagttggctgtcttgggatgaatacaagaagaggccagagacctgggagagcccagagaaaccaaaaacagaagcactggagctacaagatgtccatccagagttaacagtgacaatagaaagcaaggccctagaagactttgaagctacagacttaaaggtagaggagcttactgccctggggaatctgggggatatgcctgttgatttctgcactactcgggtaagcccagcacatagatccccaactgtcttgtgtcagaaagtgtgtgaagaaaattctgtatcacctatagggtgtaattcctccgatcccgctgacttcgaaccaatcccatctttttctgggtttccgttagattctcccaaaaccttggtgcttgactttgagacagagggtgaacgaaactcacctaatcccaggagtgttaggatcccttctcctaacattttgaaaactggacttacagaaaatgttgaccgtggcttggggggcctagagggaacacaccaggcccttgacctgttagcaggaggaatgatgcctgaggaagtaaaagaatcttcccaattagacaaacaagagtcactcggattggaattaaaaacaattaattctgcaggccttgggccatctccttgccttccagaccttgttgactttgtcacacggacctctggagttcaaaaagataaactgtgttctccactctctgagccaggtgacccttctaaatgtagttccctggagttggggccattacagctagaaatatcgaatgcatccaccacagaggtggcaattctgcaagtagatgatgacagtggcgaccctctgaatttggttaaagctccagtgtcaaggtcccctccaagggagcaggtaattgaagacaatatggtccctcagggaatgcctgaacaggaaactacagttggtgccatccaggaccacacagaatccagtgttcacaactaagaataaatacctagagctacttgtgagtgaatcattggcttctagaaatcagatgcccagatgatccaagactagtttgttatctcatctggaacctacaccaagagatgcagtcagcatcttaaagtaaatgttcatggaagctaaaaaatttacctcctttccttttccctttccccttaaaacaccagacaaatcgataacaacttatatataatatatatatatctgtaaaaatgtattttgttaatttttttggccaatttattttctcccactttgtcattaaaatcacatgtctaactggctcaccacatagtgtgctttgattgtattttggctttgactctgccatttctgaaatgtgggggaggatggaggcagctgacctctccagttgctgtgttgtattcctacccaatttcctgggcagttgatgcatctctgggaaaaacaccagaaagcttgctgaaatggaaaacttggaagaattgttcatctcttaggcttccatttggatgggcctgccttaacattgtttgaaatgcagcgtgagtagctcttttgtttactgtttacaccccttattggcatgtcaactcctgtacttcccttactctgttgcctttcttgagatgcattgtcctgctaacccacaaacctgtttggaaataaacatggaagaatatctggcaggcttacttttagaagacgacaaatcggtaaggcttattcatggttcattgccaggagcagatatgcttttgagatcacttttatttttgaaatggcctttgttcattgtattgtgatccaataacactttgtattaaattgtttagcagccatttgtgttgtgaaggggtagaagatctctgaaacttgtcttgagattgaactcattccctgttccacaaacccatatgtatcctttcctctacctcctcctttcccaattaatttcaaccatagtacgatgtttggggttgtatattttgttaaaaagattaaagaatttatgagttggcttggacaagtttaactttatttttaatgtgttaattacttggaataaatgcattaatttcagaaaaaaaaaaaaaaaaaaaaaaaaaaaaaaaaaaaaaaaaaaaaaaaaaaaaa

SEQ ID NO: 4993 - DNA, 5111 bp, Homo sapiens
  misc_feature (718)..(735): n is a, c, g, or t
  misc_feature (780)..(794): n is a, c, g, or t
  misc_feature (4978)..(4978): n is a, c, g, or t
ggctgatgaactccgacaggagctgatcaacagacatttaataacaatggctcaaattgatcaagcagatatgccagcagttcctacagaggttgacagctaccatagcctattccctctagaaccactgccacctcccaaccggatacagaaatcaagtaattttggatatattacatcttgctacaaagctgtaaacagcaaagatgatctgccatattgccttcggaggatacatggttttcgtcttgttaacacaaagtgcatggtgttggtcgacatgtggaagaaaattcaacactcaaatatcgtaactttgcgtgaagtatttaccactaaagcatttgctgagccctctcttgtgtttgcatatgatttccatgctggaggagaaactatgatgagcagacactttaatgaccctaatgctgatgcctacttcaccaagagaaagtggggtcagcacgagggaccattgcccaggcagcatgctggattattgccagaatctcttatttgggcatatattgtccaactaagttctgcattgcgtaccattcatacagcaggtttggcatgtcgagttatggatccaacaaagattctgataactggcaaaacaaggttgcgagtaaattgtgttggagtttttgatgttttaacatttgataacagtcaaaataataatcccattggcattaatgggccagtaccagcnnnnnnnnnnnnnnnnnntaggaaaagttgtgttggctttggcttgcaactctttggcaggannnnnnnnnnnnnnnttacagaaagccatggaactggtgacaatcaactattcctctgacctgaagaatctgattttgtatttgttgactgaccaaaacaggatgcgaagtgtaaatgacatcatgcccatgattggtgctcgattttatactcaattggatgctgctcaaatgagaaatgatgtcatagaggaagaccttgcaaaggaggttcaaaatggaagactgtttaggctcctagcaaaattgggaacaatcaatgagaggccggagtttcagaaggatcccacttggtcagagactggagaccgttatctgttgaaactctttagggatcatctttttcatcaggtgacagaagcaggtgctccctggattgacctcagtcatataatttcttgtcttaacaagctagatgctggtgtgccagaaaaaataagcctgatttccagagatgagaagagtgtacttgtggtgacctacagtgacttaaagcgctgctttgaaaatacttttcaagaactgattgcagctgcaaatggtcagttgtagtatttgctaaaaaagcacgcaggacatggctaaagaccttaaccaatagcaaattgcactacagctgaacttttcatcatctcattcacatttgggaaacgaacaggagatgagcaaagctgcttgcacttcagtcaggtacactgttacttgaaaggaagaatgtttcacttacccaagagctatggctgccattggaggctgttatctgtgaagaatttattttagatttaggagcaccatcaggtgaatgatgttcctgcttttgttttttccacttgtatatgcactaattttaattttttaaagactttttctgatctttgaacttttgccacattgtatacttacaatgggaaactttgcaaggacatttttgggaagcaatgctgggcagcgtttttgccattgagggttgcagaatttgctctttttgggatgggttgccctgaataacattacggaccaggtaaataatttcatagaagttcagtatagtacgtaattcttgtaagagtattgtatgcaagctctctgtatgccacccactgttagttcaaattgagatttttgttttgttttgttcttaagaacataccaagaaaatatcagtgaattgttggatatgaattccctgttagttgatttaaatcctttctgaataaagatcagataaacagtaactgaaggagcatgtatagctctttccttcaaattcaactagagcctttttaaaaagacatttgcctgctagtcagatacatttacatttatgcaaattttttaaataggagaaaattaagaaattgtgttaaaggcctaaagttcaggagtgtattactttaggttctttccagtttgctggtttttttttttttttttttttttgggcgggggggaggtttatgaagttttgctctttgaaccacagctttattatggtcctttacactggagacagacacagagacactgttcagaagatgaactaaactcagcagtggtctggtatcaagagctttctgatgttttacagcctgaatttggagggataacgatctgctgtgcctttgcagtcactgcttagcccaaagtaatagtacttttgataataactcactctgtgcgatattcctgaataagtccatctcaaaagtttgggattttcctcctcttaactttcttaatatttggacatgcagttgtcgccaaacttgggtattcatggaatttctagtaaatgaaatacctatactttgatactgaagactgccaaatacataggaattttctttcttaaaaaacagtaatgaagactatatctcctttcccagcactgaatgttttactagcactgggtgctcaccatgcaactgaagaaaatgtggaaactcaaaaggtcaggacagacttccaagcacttgcaactgatgttactgtcttcaattttaataattacacatatttgtatatttcagagaagtttttaatatttctctgtccactttttataagctttaaaatgattttctctgccttgagatttgcatcaagaaaaagcacctctcttcacctgaaagctttgaagactagagacacgctttacacgttttaacaagtatattgagtccacgtttggtagcatcagttgttgagttaaaaagaaaattattgcatttgatctggatggattttaaaagaatataatgttcaatattaaaaggataattcacatttgccaccataatgttcttttttatgtaaaaagaagaacttggagacattaacatgaaaaagtcttttatcattagctcatgtatttgaggaagagcagctgtctttttatatgttttttgacaaatcatattgtattcttttgtacaaaaaagaactacttgtattctagaagaaatatgaaatgcttaatttataagcgggctggagattttttccaatattgttttctttgaaaatgaaaggggatcatctattttagttttggggtctgggaactttttgaaaatttaatttgtggaccaatgttttgtgaaagctaaagagggcaggggttaaaatagggcttgaatttctcattctgtatagaccagcaaacttccctgtgcaaggcaagtttacatcacaaatccaagaatgtttgcatcctaaatgctagtttgcttcagcccctagttaacctcaggacttggtttgcatataaaaggtagacagctgatatgttttcatgaataaatattgtcagccagaaaaggttggtgtcaggtaatgcatatttttttaagctttgttttatatttatttttcatttagtttttattgggaatggttttcaaagaactctcagttctgcctaggtgtttttgggggagccctgttttccatagtgtaattccatttaagaggttgtctaaaagtctttttaattaatagaaagattttaatatccaagagtagtcaaattaaggatataaactttccacaccttcctgtcgtgacagataaaagcacagaaaggacaacccttgaaatcatgtaacgttggtcatttcaatattttgtacctgttttaaattctgttagtgtatttacttcattgtaaatatttttgagggtacctttgtattttgcttttgaccttggttctgtgatttggatgtcaacaacttccctaaaaagcaccagtgtgttaggttctaatgtcatgacccaatttgtgttattcatctttaatcctgttttcagtctctatgtgtacagcagtatttttaataaagaattacagagataaaaaaaaaaaaaaaaaaaaaaaaaaaaaaaaaaaaaaaaaggcagaaagcaaaaaaaaaaaaaaaaaaagtagccaaaactaaaacaaaaacaagatttatttaacaaaagtggaacaccataatgcagccccatcccgacctatgcaccgcgcgcgcccctcacaaattgattagcagggcaaaccctggaaaccaggcctccatggtcccggaaaactagttccgccgggtgcgcacgcgcctttttatacccctaccctccgacgttgcataagccccacaccacagctttatacctcccccccaacggcctaagcgcgcgcccatcgtgagtgacacccaactctggccgcctagtagaagacgttccccggacctcggtgccccgctctccattgtagcacaccttagttctagcacaaggaacccacagtccgactccctgcagacctttttgcgaccgccgcgtgtcaaccactccaacataccgcgctgtagcccatatcgttctttaagcccgtcgtccccccaaacgacttgacacacagaagataggatctctgtcgggaggaactgagacgcccgtgttgctgtaacacagactgtatttgcccgacacctagctctcaggcgagtgtgatctgtcgtatgcgacgattgccgcgaacatccgctcccgccccgctttgacgcatgtagcacccactcatgaattgcggagctgtcagcgcgcgttttcttttttcgcgtgcgcccccccaccctatgcgtaatgcactcttgcccaaaccgcaccgcgccctgttctccgccgtcatccaccctccactgccatgttgnacgattgacagacacgtacctatatactactcgatacacacccacctatccccgccagatttactatagtgtggcaccataacaagtgtctcgctaaatgaccacggctcccataagattcgtccgcataatg
